United States Patent Application Publication US 2024/0131193 A1 - sequence listing, part 7

SEQ ID NO: 11174 - DNA, 2502 bp, synthetic construct
  source 1..2502: mol_type = other DNA; note = Synthetic coding sequence
ctgagcagaagagtgccctgcgtgagaagaggctgcagaccccccctgccccccctgcccggcagccagagcagagcctggagcagagacagagaggcccccctggaccccggcagacccgcccagagcggcagaagacccaccagcagaagcgtgagccacgcctgcagctggaacggcggcagcctggaccccctggagggcacccccgccctgctgagaagcgccgagagactgatgagaaaggtgaagaagctgagactggacaaggagaacaccggcagctggagaagcttcagcctgaacagcgagggcgccgagagaatcaccagctacgacttccacagcgagagcggcctgttcctgttccaggccagcaacagcctgttccactgcagagacggcggcaagaacggcttcatggtgagccccatgaagcccctggagatcaagacccagtgcagcggccccagaatggaccccaagatctgccccgccgaccccgccttcttcagcttcatcaacaacagcgacctgtgggtggccaacatcgagaccggcgaggagagaagactgaccttctgccaccagggcctgagcaacgtgctggacgaccccaagagcgccggcgtggccaccttcgtgatccaggaggagttcgacagattcaccggctactggtggtgccccaccgccagctgggagggcagcgagggcctgaagaccctgagaatcctgtacgaggaggtggacgagagcgaggtggaggtgatccacgtgcccagccccgccctggaggagagaaagaccgacagctacagataccccagaaccggcagcaagaaccccaagatcgccctgaagctggccgagttccagaccgacagccagggcaagatcgtgagcacccaggagaaggagctggtgcagcccttcagcagcctgttccccaaggtggagtacatcgccagagccggctggaccagagacggcaagtacgcctgggccatgttcctggacagaccccagcagtggctgcagctggtgctgctgccccccgccctgttcatccccagcaccgagaacgaggagcagagactggccagcgccagagccgtgcccagaaacgtgcagccctacgtggtgtacgaggaggtgaccaacgtgtggatcaacgtgcacgacatcttctaccccttcccccagagcgagggcgaggacgagctgtgcttcctgagagccaacgagtgcaagaccggcttctgccacctgtacaaggtgaccgccgtgctgaagagccagggctacgactggagcgagcccttcagccccggcgaggacgagttcaagtgccccatcaaggaggagatcgccctgaccagcggcgagtgggaggtgctggccagacacggcagcaagatctgggtgaacgaggagaccaagctggtgtacttccagggcaccaaggacacccccctggagcaccacctgtacgtggtgagctacgaggccgccggcgagatcgtgagactgaccacccccggcttcagccacagctgcagcatgagccagaacttcgacatgttcgtgagccactacagcagcgtgagcacccccccctgcgtgcacgtgtacaagctgagcggccccgacgacgaccccctgcacaagcagcccagattctgggccagcatgatggaggccgccagctgcccccccgactacgtgccccccgagatcttccacttccacaccagaagcgacgtgagactgtacggcatgatctacaagccccacgccctgcagcccggcaagaagcaccccaccgtgctgttcgtgtacggcggcccccaggtgcagctggtgaacaacagcttcaagggcatcaagtacctgagactgaacaccctggccagcctgggctacgccgtggtggtgatcgacggcagaggcagctgccagagaggcctgagattcgagggcgccctgaagaaccagatgggccaggtggagatcgaggaccaggtggagggcctgcagttcgtggccgagaagtacggcttcatcgacctgagcagagtggccatccacggctggagctacggcggcttcctgagcctgatgggcctgatccacaagccccaggtgttcaaggtggccatcgccggcgcccccgtgaccgtgtggatggcctacgacaccggctacaccgagagatacatggacgtgcccgagaacaaccagcacggctacgaggccggcagcgtggccctgcacgtggagaagctgcccaacgagcccaacagactgctgatcctgcacggcttcctggacgagaacgtgcacttcttccacaccaacttcctggtgagccagctgatcagagccggcaagccctaccagctgcagatctaccccaacgagagacacagcatcagatgccccgagagcggcgagcactacgaggtgaccctgctgcacttcctgcaggagtacctgtag

SEQ ID NO: 11175 - DNA, 5073 bp, synthetic construct
  source 1..5073: mol_type = other DNA; note = Synthetic coding sequence
atggactgcctgctggagctgagcgccaccgacaccaagatcgaggagagcagcagccagagcttcgtggccagcgagaaccaggtgggcgccgccgagagcaagatcatggagaagagacccgaggaggagagcgaggacagcaagatggacagcttcctggacatgcagctgaccgaggacctggacagcctgatccagaacgccttcgagaagctgaacagcagccccgacgaccaggtgtacagcttcctgcccagccaggacgtgaacagcttcaacgacagcagcgagttcatcaaccccgacagcagcaacatgacccccatcttcagcacccagaacatgaacctgaacggcgagaacctggagaacagcggcagcaccctgagcctgaaccccctgcccagccacagcgtgctgaacgagagcaagtgcttcatcaaggacaacaccctggccctggagagcaactaccccgaggacagcctgctgagcagcagcctgaacgtggccagcgacagcatcgccggctgcagcagcctgaaccagaagcagaaggagctgctggagagcgagtgcgtggaggcccagttcagcgaggcccccgtggacctggacgccagcgagccccaggcctgcctgaacctgcccggcctggacctgcccggcaccggcggcgaccagaagagcaccagagtgagcgacgtgttcctgcccagcgagggcttcaacttcaagccccacaagcaccccgagctgcccaccaagggcaaggacgtgagctactgccccgtgctggcccccctgcccctgctgctgcccccccccccccccccccccatgtggaaccccatgatccccgccttcgacctgttccagggcaaccacggcttcgtggcccccgtggtgaccaccgccgcccactggagaagcgtgaactacaccttcccccccagcgtgatcagccacaccagccccaccaaggtgtggagaaacaaggacggcaccagcgcctaccaggtgcaggagacccccgtgagccaggtggtgagaaagaagaccagctacgtgggcctggtgctggtgctgctgagaggcctgcccggcagcggcaagagcttcctggccagaaccctgcaggaggacaaccccagcggcgtgatcctgagcaccgacgactacttctacatcaacggccagtaccagttcgacgtgaagtacctgggcgaggcccacgagtggaaccagaacagagccaaggaggccttcgagaagaagatcagccccatcatcatcgacaacaccaacctgcaggcctgggagatgaagccctacgtggccctgagccagaagcacaagtacaaggtgctgttcagagagcccgacacctggtggaagttcaagcccaaggagctggccagaagaaacatccacggcgtgagcaaggagaagatcaccagaatgctggagcactaccagagattcgtgagcgtgcccatcatcatgagcagcagcgtgcccgagaagatcgagagaatcgagctgtgcgcctacagctgcgaggacagaagcaccagccccagagacgacgaggacatcatcagcgagaaggaggagaacatcctgagcctgagcctgaagcacctggagttcaccgaggagaagaacctggacgtgaccaaggagaccatgctgcccgagaacgtggcctacctgagcaacgccgacctgaacaagagaagaaaggagatcagcgacatgaaccccagcatccagagcgccctgatcctggagaccccccacatgtacttcagcgacagcgagagcaagctgcaggccaccgacaagagcgagaacgagcagatcgagatggtggccgtgaagggctacagcaagaccgacaccgacagcagcatggagagagtgagccccagcacctgctgcagcgagaacaaccaggaggactgcgacctggccaacagcggccccctgcagaacgagaagagcagccccggcgagatcgtggaggagagagccaccgtgaccaagaaggccttcggcaagcagaagagcaagagcaccctggagaagttccccagacacgagctgagcaacttcgtgggcgactggcccgtggacaagaccatcggccagagaaccaagagaaacagaaagaccgagaagaccagcagcgtgcagagcgacaagaagtacaactacccccagagccacaagctggtgaacagcgtgagcgtgaacaccgactgcgtgcagcagagaggcagcccccacgagagcgtggaggacggcagaaagagccagtgcgacgacgccagcgagcccctgaacagctacaagtacgacgcctacaagaacatcgacaagaacagcttcaacatcatgggcgactggcccagcagcgacagcctggcccagagagagcacagaagcagaatgcccaagaccggcctgagcgagcccaacctggagatcggcaccaacgacaagatgaacgagatcagcctgagcaccgcccacgaggcctgctggggcaccagcagccagaagctgaagaccctgggcagcagcaacctgggcagcagcgagatgctgctgagcgagatgacctgcgagagccagacctgcctgagcaagaagagccacggccagcacaccagcctgcccctgaccttcaccaacagcgcccccaccgtgagcggcgtggtggagccccagaccctggccgagtgccaggagcagatgcccaagagagaccccggcaaggaggtgggcatgtgcacccagaccgagccccaggacttcgccctgctgtggaagatcgagaagaacaagatcagcatcagcgacagcatcaaggtgctgaccggcagactggacggcttcaagcccaaggtgttcaacatcaacaccaagagcgacgtgcaggaggccatcccctacagagtgatgtacgacaagagcaccttcgtggaggagagcgagctgaccagcgccgacgagagcgagaacctgaacatcctgtgcaagctgttcggcagcttcagcctggaggccctgaaggacctgtacgagagatgcaacaaggacatcatctgggccaccagcctgctgctggacagcgagaccaagctgtgcgaggacaccgagttcgagaacttccagaagagctgcgacggcagccagatcggccccttcagcctgggcctgaacctgaaggagatcatcagccagagaggcaccctggagaacagcaacagccccgtgcccgagttcagccacggcatcggcatcagcaacgccgacagccagagcacctgcgacgccgagagaggcaacagcgagcaggccgagatgagagccgtgacccccgagaaccacgagagcatgaccagcatcttccccagcgccgccgtgggcctgaagaacaacaacgacatcctgcccaacagccaggaggagctgctgtacagcagcaagcagagcttccccggcatcctgaaggccaccacccccaaggacatgagcgagaccgagaagaacctggtggtgaccgagaccggcgacaacatccacagccccagccacttcagcgacatcttcaacttcgtgagcagcaccagcaacctggagctgaacgaggagatctacttcaccgacagcctggagatcaagagaaacgagaacttccccaaggactacgtgaagttcagcgacgaggaggagttcatgaacgaggacgagaaggagatgaaggagatcctgatggccggcagcagcctgagcgccggcgtgagcggcgaggacaagaccgagatcctgaaccccacccccgccatggccaagagcctgaccatcgactgcctggagctggccctgccccccgagctggccttccagctgaacgagctgttcggccccgtgggcatcgacagcggcagcctgaccgtggaggactgcgtggtgcacatcgacctgaacctggccaaggtgatccacgagaagtggaaggagagcgtgatggagagacagagacaggaggaggtgagctgcggcaagttcatgcaggaccccagcctggtgggccacaccggcctggacaaccccgagcagaagagcagccagagaaccggcaagaagctgctgaagaccctgaccgccagcgagatgctgcccctgctggaccactggaacacccagaccaagaaggtgagcctgagagagatcatgagcgaggagatcgccctgcaggagaagcacaacctgaagagagagaccctgatgttcgagaaggactgcgccaccaagctgaaggagaagcagctgttcaagatcttccccgccatcaaccagaacttcctggtggacatcttcaaggaccacaactacagcctggagcacaccgtgcagttcctgaactgcgtgctggagggcgaccccgtgaagaccgtggtggcccaggagttcgtgcaccagaacgagaacgtgaccagccacaccggccagaagagcaaggagaagaagcccaagaagctgaaggagaccgaggagacccccagcgagctgagcttccaggacttcgagtaccccgactacgacgactacagagccgaggccttcctgcaccagcagaagagaatggagtgctacagcaaggccaaggaggcctacagaatcggcaagaagaacgtggccaccttctacgcccagcagggcaccctgcacgagcagaagatgaaggaggccaaccacctggccgccatcgagatcttcgagaaggtgaacgccagcctgctgccccagaacgtgctggacctgcacggcctgcacgtggacgaggccctggagcacctgatgagagtgctggagaagaagaccgaggagttcaagcagaacggcggcaagccctacctgagcgtgatcaccggcagaggcaaccacagccagggcggcgtggccagaatcaagcccgccgtgatcaagtacctgatcagccacagcttcagattcagcgagatcaagcccggctgcctgaaggtgatgctgaagtag

SEQ ID NO: 11176 - DNA, 477 bp, synthetic construct
  source 1..477: mol_type = other DNA; note = Synthetic coding sequence
atgggcagcggcagcagcagaagcagcagaaccctgagaagaagaagaagccccgagagcctgcccgccggccccggcgccgccgccctggagggcggcaccagaagaagagtgcccgtggccgccgccgaggtgcccggcgccgccgccgaggaggcccccggcagagaccccagccccgtggccccccccgacggcagagacgagaccctgagactgctggacgagctgctggccgagagcgccgcctggggcccccccgagcccgcccccagaagacccgccagactgagacccaccgccgtggccggcagcgccgtgtgcgccgagcagagcaccgagggccaccccggcagcggcaacgtgagcgaggcccccggcagcggcagaaagaagcccgagagacccgccgccatcagctacgaccacagcgaggagggcctgatggccagcatcgagagagagtactgcagatag

SEQ ID NO: 11177 - DNA, 738 bp, synthetic construct; identical to SEQ ID NO: 9283
  source 1..738: mol_type = other DNA; note = Synthetic coding sequence

SEQ ID NO: 11178 - DNA, 1014 bp, synthetic construct
  source 1..1014: mol_type = other DNA; note = Synthetic coding sequence
atggagcagccctggcccccccccggcccctggagcctgcccagagccgagggcgaggccgaggaggagagcgacttcgacgtgttccccagcagccccagatgcccccagctgcccggcggcggcgcccagatgtacagccacggcatcgagctggcctgccagaagcagaaggagttcgtgaagagcagcgtggcctgcaagtggaacctggccgaggcccagcagaagctgggcagcctggccctgcacaacagcgagagcctggaccaggagcacgccaaggcccagaccgccgtgagcgagctgagacagagagaggaggagtggagacagaaggaggaggccctggtgcagagagagaagatgtgcctgtggagcaccgacgccatcagcaaggacgtgttcaacaagagcttcatcaaccaggacaagagaaaggacaccgaggacgaggacaagagcgagagcttcatgcagaagtacgagcagaagatcagacacttcggcatgctgagcagatgggacgacagccagagattcctgagcgaccacccctacctggtgtgcgaggagaccgccaagtacctgatcctgtggtgcttccacctggaggccgagaagaagggcgccctgatggagcagatcgcccaccaggccgtggtgatgcagttcatcatggagatggccaagaactgcaacgtggaccccagaggctgcttcagactgttcttccagaaggccaaggccgaggaggagggctacttcgaggccttcaagaacgagctggaggccttcaagagcagagtgagactgtacagccagagccagagcttccagcccatgaccgtgcagaaccacgtgccccacagcggcgtgggcagcatcggcctgctggagagcctgccccagaaccccgactacctgcagtacagcatcagcaccgccctgtgcagcctgaacagcgtggtgcacaaggaggacgacgagcccaagatgatggacaccgtgtag

SEQ ID NO: 11179 - DNA, 927 bp, synthetic construct
  source 1..927: mol_type = other DNA; note = Synthetic coding sequence
atggagcagccctggcccccccccggcccctggagcctgcccagagccgagggcgaggccgaggaggagagcgacttcgacgtgttccccagcagccccagatgcccccagctgcccggcggcggcgcccagatgtacagccacggcatcgagctggcctgccagaagcagaaggagttcgtgaagagcagcgtggcctgcaagtggaacctggccgaggcccagcagaagctgggcagcctggccctgcacaacagcgagagcctggaccaggagcacgccaaggcccagaccgccgtgagcgagctgagacagagagaggaggagtggagacagaaggaggaggccctggtgcagagagagaagatgtgcctgtggagcaccgacgccatcagcaaggacgtgttcaacaagagcttcatcaaccaggacaagagaaaggacaccgaggacgaggacaagagcgagagcttcatgcagaagtacgagcagaagatcagacacttcggcatgctgagcagatgggacgacagccagagattcctgagcgaccacccctacctggtgtgcgaggagaccgccaagtacctgatcctgtggtgcttccacctggaggccgagaagaagggcgccctgatggagcagatcgcccaccaggccgtggtgatgcagttcatcatggagatggccaagaactgcaacgtggaccccagaggctgcttcagactgttcttccagaaggccaaggccgaggaggagggctacttcgaggccttcaagaacgagctggaggccttcaagagcagagtgagactgtacagccagagccagagcttccagcccatgaccgtgcagaaccacgtgccccacagcggcgtgggcagcatcggcctgctggagagcctgccccaggcccccagattctag

SEQ ID NO: 11180 - DNA, 4227 bp, synthetic construct; identical to SEQ ID NO: 10132
  source 1..4227: mol_type = other DNA; note = Synthetic coding sequence

SEQ ID NO: 11181 - DNA, 528 bp, synthetic construct
  source 1..528: mol_type = other DNA; note = Synthetic coding sequence
atgatcctgaacgtgctggagtacggcagccagcaggtggccgacctgaccctgaacctggacgactacatcgacgccgagcacctgggcgacttccacagaacctacaagaacagcgaggagctgagaagcagaatcgtgagcggcatcatcacccccatccacgagcagtgggagaaggccaacgtgagcagcccccacagagagttcccccccgccaccgccagagaggtggaccccctgagaatccccccccaccacccccacaccagcagacagcccccctggtgcgaccccctgggccccttcgtggtgggcggcgaggacctggaccccttcggccccagaagaggcggcatgatcgtggaccccctgagaagcggcttccccagagccctgatcgaccccagcagcggcctgcccaacagactgccccccggcgccgtgccccccggcgccagattcgaccccttcggccccatcggcaccagcccccccggccccagacccgacagaagaggccagtag

SEQ ID NO: 11182 - DNA, 552 bp, synthetic construct
  source 1..552: mol_type = other DNA; note = Synthetic coding sequence
atggccggcctggaggtgctgttcgccagcgccgcccccgccatcacctgcagacaggacgccctggtgtgcttcctgcactgggaggtggtgacccacggctacttcggcctgggcgtgggcgaccagcccggccccaacgacaagaagagcgagctgctgcccgccggctggaacaacaacaaggacctgtacgtgctgagatacgagtacaaggacggcagcagaaagctgctggtgaaggccatcaccgtggagagcagcatgatcctgaacgtgctggagtacggcagccagcaggtggccgacctgaccctgaacctggacgactacatcgacgccgagcacctgggcgacttccacagaacctacaagaacagcgaggagctgagaagcagaatcgtgagcggcatcatcacccccatccacgagcagtgggagaaggccaacgtgagcagcccccacagagagttcccccccgccaccgccagagaggtggaccccctgagaatccccccccaccacccccacaccagcagacagcccccctag

SEQ ID NO: 11183 - DNA, 888 bp, synthetic construct; identical to SEQ ID NO: 9312
  source 1..888: mol_type = other DNA; note = Synthetic coding sequence

SEQ ID NO: 11184 - DNA, 888 bp, synthetic construct; identical to SEQ ID NO: 9312
  source 1..888: mol_type = other DNA; note = Synthetic coding sequence

SEQ ID NO: 11185 - DNA, 414 bp, synthetic construct
  source 1..414: mol_type = other DNA; note = Synthetic coding sequence
atgggcctgagagccggcggcaccctgggcagagccggcgccggcagaggcgcccccgagggccccggccccagcggcggcgcccagggcggcagcatccacagcggcagaatcgccgccgtgcacaacgtgcccctgagcgtgctgatcagacccctgcccagcgtgctggaccccgccaaggtgcagagcctggtggacaccatcagagaggaccccgacagcgtgccccccatcgacgtgctgtggatcaagggcgcccagggcggcgactacttctacagcttcggcggctgccacagatacgccgcctaccagcagctgcagagagagaccatccccgccaagctggtgcagagcaccctgagcgacctgagagtgtacctgggcgccagcacccccgacctgcagtag

SEQ ID NO: 11186 - DNA, 1731 bp, synthetic construct
  source 1..1731: mol_type = other DNA; note = Synthetic coding sequence
atgaagtgccactacgaggccctgggcgtgagaagagacgccagcgaggaggagctgaagaaggcctacagaaagctggccctgaagtggcaccccgacaagaacctggacaacgccgccgaggccgccgagcagttcaagctgatccaggccgcctacgacgtgctgagcgacccccaggagagagcctggtacgacaaccacagagaggccctgctgaagggcggcttcgacggcgagtaccaggacgacagcctggacctgctgagatacttcaccgtgacctgctacagcggctacggcgacgacgagaagggcttctacaccgtgtacagaaacgtgttcgagatgatcgccaaggaggagctggagagcgtgctggaggaggaggtggacgacttccccaccttcggcgacagccagagcgactacgacaccgtggtgcaccccttctacgcctactggcagagcttctgcacccagaagaacttcgcctggaaggaggagtacgacaccagacaggccagcaacagatgggagaagagagccatggagaaggagaacaagaagatcagagacaaggccagaaaggagaagaacgagctggtgagacagctggtggccttcatcagaaagagagacaagagagtgcaggcccacagaaagctggtggaggagcagaacgccgagaaggccagaaaggccgaggagatgagaagacagcagaagctgaagcaggccaagctggtggagcagtacagagagcagagctggatgaccatggccaacctggagaaggagctgcaggagatggaggccagatacgagaaggagttcggcgacggcagcgacgagaacgagatggaggagcacgagctgaaggacgaggaggacggcaaggacagcgacgaggccgaggacgccgagctgtacgacgacctgtactgccccgcctgcgacaagagcttcaagaccgagaaggccatgaagaaccacgagaagagcaagaagcacagagagatggtggccctgctgaagcagcagctggaggaggaggaggagaacttcagcagaccccagatcgacgagaaccccctggacgacaacagcgaggaggagatggaggacgcccccaagcagaagctgagcaagaagcagaagaagaagaagcagaagcccgcccaggacgtgcccggcaaggacagctacctgcccgccgcccacttccagatggcctggggcaagaagtgcgtgctgggcgagagaagagacggcgagagcgagcacaagtgcgccaagatgctgctggagaacagacagaactacgacgacaacttcaacgtgaacggccccggcgagggcgtgaaggtggaccccgaggacaccaacctgaaccaggacagcgccaaggagctggaggacagcccccaggagaacgtgagcgtgaccgagatcatcaagccctgcgacgaccccaagagcgaggccaagagcgtgcccaagcccaagggcaagaagaccaaggacatgaagaagcccgtgagagtgcccgccgagccccagaccatgagcgtgctgatcagctgcaccacctgccacagcgagttccccagcagaaacaagctgttcgaccacctgaaggccaccggccacgccagagcccccagcagcagcagcctgaacagcgccaccagcagccagagcaagaaggagaagagaaagaacagatag

SEQ ID NO: 11187 - DNA, 798 bp, synthetic construct
  source 1..798: mol_type = other DNA; note = Synthetic coding sequence
atgctggccctgaccgtgctggagacctgcgtgaagaactgcggccacagattccacgtgctggtggccagccaggacttcgtggagagcgtgctggtgagaaccatcctgcccaagaacaacccccccaccatcgtgcacgacaaggtgctgaacctgatccagagctgggccgacgccttcagaagcagccccgacctgaccggcgtggtgaccatctacgaggacctgagaagaaagggcctggagttccccatgaccgacctggacatgctgagccccatccacaccccccagagaaccgtgttcaacagcgagacccagagcggccaggacagcgtgggcaccgacagcagccagcaggaggacagcggccagcacgccgcccccctgcccgccccccccatcctgagcggcgacacccccatcgcccccacccccgagcagatcggcaagctgagaagcgagctggagatggtgagcggcaacgtgagagtgatgagcgagatgctgaccgagctggtgcccacccaggccgagcccgccgacctggagctgctgcaggagctgaacagaacctgcagagccatgcagcagagagtgctggagctgatcccccagatcgccaacgagcagctgaccgaggagctgctgatcgtgaacgacaacctgaacaacgtgttcctgagacacgagagagacagaggcctgaccgtgctgcccagactggtgagcaacagctggccccaggccgtgctgcccccctggccccccaaggccctggtgctgcaggcctag

SEQ ID NO: 11188 - DNA, 6273 bp, synthetic construct
  source 1..6273: mol_type = other DNA; note = Synthetic coding sequence
atggacgaggtggagcaggaccagcacgaggccagactgaaggagctgttcgacagcttcgacaccaccggcaccggcagcctgggccaggaggagctgaccgacctgtgccacatgctgagcctggaggaggtggcccccgtgctgcagcagaccctgctgcaggacaacctgctgggcagagtgcacttcgaccagttcaaggaggccctgatcctgatcctgagcagaaccctgagcaacgaggagcacttccaggagcccgactgcagcctggaggcccagcccaagtacgtgagaggcggcaagagatacggcagaagaagcctgcccgagttccaggagagcgtggaggagttccccgaggtgaccgtgatcgagcccctggacgaggaggccagacccagccacatccccgccggcgactgcagcgagcactggaagacccagagaagcgaggagtacgaggccgagggccagctgagattctggaaccccgacgacctgaacgccagccagagcggcagcagccccccccaggactggatcgaggagaagctgcaggaggtgtgcgaggacctgggcatcaccagagacggccacctgaacagaaagaagctggtgagcatctgcgagcagtacggcctgcagaacgtggacggcgagatgctggaggaggtgttccacaacctggaccccgacggcaccatgagcgtggaggacttcttctacggcctgttcaagaacggcaagagcctgacccccagcgccagcaccccctacagacagctgaagagacacctgagcatgcagagcttcgacgagagcggcagaagaaccaccaccagcagcgccatgaccagcaccatcggcttcagagtgttcagctgcctggacgacggcatgggccacgccagcgtggagagaatcctggacacctggcaggaggagggcatcgagaacagccaggagatcctgaaggccctggacttcagcctggacggcaacatcaacctgaccgagctgaccctggccctggagaacgagctgctggtgaccaagaacagcatccaccaggccgccctggccagcttcaaggccgagatcagacacctgctggagagagtggaccaggtggtgagagagaaggagaagctgagaagcgacctggacaaggccgagaagctgaagagcctgatggccagcgaggtggacgaccaccacgccgccatcgagagaagaaacgagtacaacctgagaaagctggacgaggagtacaaggagagaatcgccgccctgaagaacgagctgagaaaggagagagagcagatcctgcagcaggccggcaagcagagactggagctggagcaggagatcgagaaggccaagaccgaggagaactacatcagagacagactggccctgagcctgaaggagaacagcagactggagaacgagctgctggagaacgccgagaagctggccgagtacgagaacctgaccaacaagctgcagagaaacctggagaacgtgctggccgagaagttcggcgacctggaccccagcagcgccgagttcttcctgcaggaggagagactgacccagatgagaaacgagtacgagagacagtgcagagtgctgcaggaccaggtggacgagctgcagagcgagctggaggagtacagagcccagggcagagtgctgagactgcccctgaagaacagccccagcgaggaggtggaggccaacagcggcggcatcgagcccgagcacggcctgggcagcgaggagtgcaaccccctgaacatgagcatcgaggccgagctggtgatcgagcagatgaaggagcagcaccacagagacatctgctgcctgagactggagctggaggacaaggtgagacactacgagaagcagctggacgagaccgtggtgagctgcaagaaggcccaggagaacatgaagcagagacacgagaacgagacccacaccctggagaagcagatcagcgacctgaagaacgagatcgccgagctgcagggccaggccgccgtgctgaaggaggcccaccacgaggccacctgcagacacgaggaggagaagaagcagctgcaggtgaagctggaggaggagaagacccacctgcaggagaagctgagactgcagcacgagatggagctgaaggccagactgacccaggcccaggccagcttcgagagagagagagagggcctgcagagcagcgcctggaccgaggagaaggtgagaggcctgacccaggagctggagcagttccaccaggagcagctgaccagcctggtggagaagcacaccctggagaaggaggagctgagaaaggagctgctggagaagcaccagagagagctgcaggagggcagagagaagatggagaccgagtgcaacagaagaaccagccagatcgaggcccagttccagagcgactgccagaaggtgaccgagagatgcgagagcgccctgcagagcctggagggcagatacagacaggagctgaaggacctgcaggagcagcagagagaggagaagagccagtgggagttcgagaaggacgagctgacccaggagtgcgccgaggcccaggagctgctgaaggagaccctgaagagagagaagaccaccagcctggtgctgacccaggagagagagatgctggagaagacctacaaggagcacctgaacagcatggtggtggagagacagcagctgctgcaggacctggaggacctgagaaacgtgagcgagacccagcagagcctgctgagcgaccagatcctggagctgaagagcagccacaagagagagctgagagagagagaggaggtgctgtgccaggccggcgccagcgagcagctggccagccagagactggagagactggagatggagcacgaccaggagagacaggagatgatgagcaagctgctggccatggagaacatccacaaggccacctgcgagaccgccgacagagagagagccgagatgagcaccgagatcagcagactgcagagcaagatcaaggagatgcagcaggccaccagccccctgagcatgctgcagagcggctgccaggtgatcggcgaggaggaggtggagggcgacggcgccctgagcctgctgcagcagggcgagcagctgctggaggagaacggcgacgtgctgctgagcctgcagagagcccacgagcaggccgtgaaggagaacgtgaagatggccaccgagatcagcagactgcagcagagactgcagaagctggagcccggcctggtgatgagcagctgcctggacgagcccgccaccgagttcttcggcaacaccgccgagcagaccgagcagttcctgcagcagaacagaaccaagcaggtggagggcgtgaccagaagacacgtgctgagcgacctggaggacgacgaggtgagagacctgggcagcaccggcaccagcagcgtgcagagacaggaggtgaagatcgaggagagcgaggccagcgtggagggcttcagcgagctggagaacagcgaggagaccagaaccgagagctgggagctgaagaaccagatcagccagctgcaggagcagctgatgatgctgtgcgccgactgcgacagagccagcgagaagaagcaggacctgctgttcgacgtgagcgtgctgaagaagaagctgaagatgctggagagaatccccgaggccagccccaagtacaagctgctgtacgaggacgtgagcagagagaacgactgcctgcaggaggagctgagaatgatggagaccagatacgacgaggccctggagaacaacaaggagctgaccgccgaggtgttcagactgcaggacgagctgaagaagatggaggaggtgaccgagaccttcctgagcctggagaagagctacgacgaggtgaagatcgagaacgagggcctgaacgtgctggtgctgagactgcagggcaagatcgagaagctgcaggagagcgtggtgcagagatgcgactgctgcctgtgggaggccagcctggagaacctggagatcgagcccgacggcaacatcctgcagctgaaccagaccctggaggagtgcgtgcccagagtgagaagcgtgcaccacgtgatcgaggagtgcaagcaggagaaccagtacctggagggcaacacccagctgctggagaaggtgaaggcccacgagatcgcctggctgcacggcaccatccagacccaccaggagagacccagagtgcagaaccaggtgatcctggaggagaacaccaccctgctgggcttccaggacaagcacttccagcaccaggccaccatcgccgagctggagctggagaagaccaagctgcaggagctgaccagaaagctgaaggagagagtgaccatcctggtgaagcagaaggacgtgctgagccacggcgagaaggaggaggagctgaaggccatgatgcacgacctgcagatcacctgcagcgagatgcagcagaaggtggagctgctgagatacgagagcgagaagctgcagcaggagaacagcatcctgagaaacgagatcaccaccctgaacgaggaggacagcatcagcaacctgaagctgggcaccctgaacggcagccaggaggagatgtggcagaagaccgagaccgtgaagcaggagaacgccgccgtgcagaagatggtggagaacctgaagaagcagatcagcgagctgaagatcaagaaccagcagctggacctggagaacaccgagctgagccagaagaacagccagaaccaggagaagctgcaggagctgaaccagagactgaccgagatgctgtgccagaaggagaaggagcccggcaacagcgccctggaggagagagagcaggagaagttcaacctgaaggaggagctggagagatgcaaggtgcagagcagcaccctggtgagcagcctggaggccgagctgagcgaggtgaagatccagacccacatcgtgcagcaggagaaccacctgctgaaggacgagctggagaagatgaagcagctgcacagatgccccgacctgagcgacttccagcagaagatcagcagcgtgctgagctacaacgagaagctgctgaaggagaaggaggccctgagcgaggagctgaacagctgcgtggacaagctggccaagagcagcctgctggagcacagaatcgccaccatgaagcaggagcagaagagctgggagcaccagagcgccagcctgaagagccagctggtggccagccaggagaaggtgcagaacctggaggacaccgtgcagaacgtgaacctgcagatgagcagaatgaagagcgacctgagagtgacccagcaggagaaggaggccctgaagcaggaggtgatgagcctgcacaagcagctgcagaacgccggcggcaagagctgggcccccgagatcgccacccaccccagcggcctgcacaaccagcagaagagactgagctgggacaagctggaccacctgatgaacgaggagcagcagctgctgtggcaggagaacgagagactgcagaccatggtgcagaacaccaaggccgagctgacccacagcagagagaaggtgagacagctggagagcaacctgctgcccaagcaccagaagcacctgaaccccagcggcaccatgaaccccaccgagcaggagaagctgagcctgaagagagagtgcgaccagttccagaaggagcagagccccgccaacagaaaggtgagccagatgaacagcctggagcaggagctggagaccatccacctggagaacgagggcctgaagaagaagcaggtgaagctggacgagcagctgatggagatgcagcacctgagaagcaccgccacccccagccccagcccccacgcctgggacctgcagctgctgcagcagcaggcctgccccatggtgcccagagagcagttcctgcagctgcagagacagctgctgcaggccgagagaatcaaccagcacctgcaggaggagctggagaacagaaccagcgagaccaacaccccccagggcaaccaggagcagctggtgaccgtgatggaggagagaatgatcgaggtggagcagaagctgaagctggtgaagagactgctgcaggagaaggtgaaccagctgaaggagcaggtgagcctgcccggccacctgtgcagccccaccagccacagcagcttcaacagcagcttcaccagcctgtactgccactag

SEQ ID NO: 11189 - DNA, 4134 bp, synthetic construct
  source 1..4134: mol_type = other DNA; note = Synthetic coding sequence
atggacgaggtggagcaggaccagcacgaggccagactgaaggagctgttcgacagcttcgacaccaccggcaccggcagcctgggccaggaggagctgaccgacctgtgccacatgctgagcctggaggaggtggcccccgtgctgcagcagaccctgctgcaggacaacctgctgggcagagtgcacttcgaccagttcaaggaggccctgatcctgatcctgagcagaaccctgagcaacgaggagcacttccaggagcccgactgcagcctggaggcccagcccaagtacgtgagaggcggcaagagatacggcagaagaagcctgcccgagttccaggagagcgtggaggagttccccgaggtgaccgtgatcgagcccctggacgaggaggccagacccagccacatccccgccggcgactgcagcgagcactggaagacccagagaagcgaggagtacgaggccgagggccagctgagattctggaaccccgacgacctgaacgccagccagagcggcagcagccccccccaggactggatcgaggagaagctgcaggaggtgtgcgaggacctgggcatcaccagagacggccacctgaacagaaagaagctggtgagcatctgcgagcagtacggcctgcagaacgtggacggcgagatgctggaggaggtgttccacaacctggaccccgacggcaccatgagcgtggaggacttcttctacggcctgttcaagaacggcaagagcctgacccccagcgccagcaccccctacagacagctgaagagacacctgagcatgcagagcttcgacgagagcggcagaagaaccaccaccagcagcgccatgaccagcaccatcggcttcagagtgttcagctgcctggacgacggcatgggccacgccagcgtggagagaatcctggacacctggcaggaggagggcatcgagaacagccaggagatcctgaaggccctggacttcagcctggacggcaacatcaacctgaccgagctgaccctggccctggagaacgagctgctggtgaccaagaacagcatccaccaggccgccctggccagcttcaaggccgagatcagacacctgctggagagagtggaccaggtggtgagagagaaggagaagctgagaagcgacctggacaaggccgagaagctgaagagcctgatggccagcgaggtggacgaccaccacgccgccatcgagagaagaaacgagtacaacctgagaaagctggacgaggagtacaaggagagaatcgccgccctgaagaacgagctgagaaaggagagagagcagatcctgcagcaggccggcaagcagagactggagctggagcaggagatcgagaaggccaagaccgaggagaactacatcagagacagactggccctgagcctgaaggagaacagcagactggagaacgagctgctggagaacgccgagaagctggccgagtacgagaacctgaccaacaagctgcagagaaacctggagaacgtgctggccgagaagttcggcgacctggaccccagcagcgccgagttcttcctgcaggaggagagactgacccagatgagaaacgagtacgagagacagtgcagagtgctgcaggaccaggtggacgagctgcagagcgagctggaggagtacagagcccagggcagagtgctgagactgcccctgaagaacagccccagcgaggaggtggaggccaacagcggcggcatcgagcccgagcacggcctgggcagcgaggagtgcaaccccctgaacatgagcatcgaggccgagctggtgatcgagcagatgaaggagcagcaccacagagacatctgctgcctgagactggagctggaggacaaggtgagacactacgagaagcagctggacgagaccgtggtgagctgcaagaaggcccaggagaacatgaagcagagacacgagaacgagacccacaccctggagaagcagatcagcgacctgaagaacgagatcgccgagctgcagggccaggccgccgtgctgaaggaggcccaccacgaggccacctgcagacacgaggaggagaagaagcagctgcaggtgaagctggaggaggagaagacccacctgcaggagaagctgagactgcagcacgagatggagctgaaggccagactgacccaggcccaggccagcttcgagagagagagagagggcctgcagagcagcgcctggaccgaggagaaggtgagaggcctgacccaggagctggagcagttccaccaggagcagctgaccagcctggtggagaagcacaccctggagaaggaggagctgagaaaggagctgctggagaagcaccagagagagctgcaggagggcagatacgagagcgagaagctgcagcaggagaacagcatcctgagaaacgagatcaccaccctgaacgaggaggacagcatcagcaacctgaagctgggcaccctgaacggcagccaggaggagatgtggcagaagaccgagaccgtgaagcaggagaacgccgccgtgcagaagatggtggagaacctgaagaagcagatcagcgagctgaagatcaagaaccagcagctggacctggagaacaccgagctgagccagaagaacagccagaaccaggagaagctgcaggagctgaaccagagactgaccgagatgctgtgccagaaggagaaggagcccggcaacagcgccctggaggagagagagcaggagaagttcaacctgaaggaggagctggagagatgcaaggtgcagagcagcaccctggtgagcagcctggaggccgagctgagcgaggtgaagatccagacccacatcgtgcagcaggagaaccacctgctgaaggacgagctggagaagatgaagcagctgcacagatgccccgacctgagcgacttccagcagaagatcagcagcgtgctgagctacaacgagaagctgctgaaggagaaggaggccctgagcgaggagctgaacagctgcgtggacaagctggccaagagcagcctgctggagcacagaatcgccaccatgaagcaggagcagaagagctgggagcaccagagcgccagcctgaagagccagctggtggccagccaggagaaggtgcagaacctggaggacaccgtgcagaacgtgaacctgcagatgagcagaatgaagagcgacctgagagtgacccagcaggagaaggaggccctgaagcaggaggtgatgagcctgcacaagcagctgcagaacgccggcggcaagagctgggcccccgagatcgccacccaccccagcggcctgcacaaccagcagaagagactgagctgggacaagctggaccacctgatgaacgaggagcagcagctgctgtggcaggagaacgagagactgcagaccatggtgcagaacaccaaggccgagctgacccacagcagagagaaggtgagacagctggagagcaacctgctgcccaagcaccagaagcacctgaaccccagcggcaccatgaaccccaccgagcaggagaagctgagcctgaagagagagtgcgaccagttccagaaggagcagagccccgccaacagaaaggtgagccagatgaacagcctggagcaggagctggagaccatccacctggagaacgagggcctgaagaagaagcaggtgaagctggacgagcagctgatggagatgcagcacctgagaagcaccgccacccccagccccagcccccacgcctgggacctgcagctgctgcagcagcaggcctgccccatggtgcccagagagcagttcctgcagctgcagagacagctgctgcaggccgagagaatcaaccagcacctgcaggaggagctggagaacagaaccagcgagaccaacaccccccagggcaaccaggagcagctggtgaccgtgatggaggagagaatgatcgaggtggagcagaagctgaagctggtgaagagactgctgcaggagaaggtgaaccagctgaaggagcaggtgagcctgcccggccacctgtgcagccccaccagccacagcagcttcaacagcagcttcaccagcctgtactgccactag

SEQ ID NO: 11190 - DNA, 3171 bp, synthetic construct
  source 1..3171: mol_type = other DNA; note = Synthetic coding sequence
atggccaccggcaactacttcggcttcacccacagcggcgccgccgccgccgccgccgccgcccagtacagccagcagcccgccagcggcgtggcctacagccaccccaccaccgtggccagctacaccgtgcaccaggcccccgtggccgcccacaccgtgaccgccgcctacgcccccgccgccgccaccgtggccgtggccagacccgcccccgtggccgtggccgccgccgccaccgccgccgcctacggcggctaccccaccgcccacaccgccaccgactacggctacacccagagacagcaggaggccccccccccccccccccccgccaccacccagaactaccaggacagctacagctacgtgagaagcaccgcccccgccgtggcctacgacagcaagcagtactaccagcagcccaccgccaccgccgccgccgtggccgccgccgcccagccccagcccagcgtggccgagacctactaccagaccgcccccaaggccggctacagccagggcgccacccagtacacccaggcccagcagaccagacaggtgaccgccatcaagcccgccacccccagccccgccaccaccaccttcagcatctaccccgtgagcagcaccgtgcagcccgtggccgccgccgccaccgtggtgcccagctacacccagagcgccacctacagcaccaccgccgtgacctacagcggcaccagctacagcggctacgaggccgccgtgtacagcgccgccagcagctactaccagcagcagcagcagcagcagaagcaggccgccgccgccgccgccgccgccgccgccaccgccgcctggaccggcaccaccttcaccaagaaggcccccttccagaacaagcagctgaagcccaagcagccccccaagcccccccagatccactactgcgacgtgtgcaagatcagctgcgccggcccccagacctacaaggagcacctggagggccagaagcacaagaagaaggaggccgccctgaaggccagccagaacaccagcagcagcaacagcagcaccagaggcacccagaaccagctgagatgcgagctgtgcgacgtgagctgcaccggcgccgacgcctacgccgcccacatcagaggcgccaagcaccagaaggtggtgaagctgcacaccaagctgggcaagcccatccccagcaccgagcccaacgtggtgagccaggccaccagcagcaccgccgtgagcgccagcaagcccaccgccagccccagcagcatcgccgccaacaactgcaccgtgaacaccagcagcgtggccaccagcagcatgaagggcctgaccaccaccggcaacagcagcctgaacagcaccagcaacaccaaggtgagcgccgtgcccaccaacatggccgccaagaagaccagcacccccaagatcaacttcgtgggcggcaacaagctgcagagcaccggcaacaaggccgaggacatcaagggcaccgagtgcgtgaagagcacccccgtgaccagcgccgtgcagatccccgaggtgaagcaggacaccgtgagcgagcccgtgacccccgccagcctggccgccctgcagagcgacgtgcagcccgtgggccacgactacgtggaggaggtgagaaacgacgagggcaaggtgatcagattccactgcaagctgtgcgagtgcagcttcaacgaccccaacgccaaggagatgcacctgaagggcagaagacacagactgcagtacaagaagaaggtgaaccccgacctgcaggtggaggtgaagcccagcatcagagccagaaagatccaggaggagaagatgagaaagcagatgcagaaggaggagtactggagaagaagagaggaggaggagagatggagaatggagatgagaagatacgaggaggacatgtactggagaagaatggaggaggagcagcaccactgggacgacagaagaagaatgcccgacggcggctacccccacggcccccccggccccctgggcctgctgggcgtgagacccggcatgcccccccagccccagggccccgcccccctgagaagacccgacagcagcgacgacagatacgtgatgaccaagcacgccaccatctaccccaccgaggaggagctgcaggccgtgcagaagatcgtgagcatcaccgagagagccctgaagctggtgagcgacagcctgagcgagcacgagaagaacaagaacaaggagggcgacgacaagaaggagggcggcaaggacagagccctgaagggcgtgctgagagtgggcgtgctggccaagggcctgctgctgagaggcgacagaaacgtgaacctggtgctgctgtgcagcgagaagcccagcaagaccctgctgagcagaatcgccgagaacctgcccaagcagctggccgtgatcagccccgagaagtacgacatcaagtgcgccgtgagcgaggccgccatcatcctgaacagctgcgtggagcccaagatgcaggtgaccatcaccctgaccagccccatcatcagagaggagaacatgagagagggcgacgtgaccagcggcatggtgaaggacccccccgacgtgctggacagacagaagtgcctggacgccctggccgccctgagacacgccaagtggttccagcaggccagagccaacggcctgcagagctgcgtgatcatcatcagaatcctgagagacctgtgccagagagtgcccacctggagcgacttccccagctgggccatggagctgctggtggagaaggccatcagcagcgccagcagcccccagagccccggcgacgccctgagaagagtgttcgagtgcatcagcagcggcatcatcctgaagggcagccccggcctgctggacccctgcgagaaggaccccttcgacaccctggccaccatgaccgaccagcagagagaggacatcaccagcagcgcccagttcgccctgagactgctggccttcagacagatccacaaggtgctgggcatggaccccctgccccagatgagccagagattcaacatccacaacaacagaaagagaagaagagacagcgacggcatggacctgaagctgagaggcaagaagaccaagaagatcatgatcaccttcaagaagtgcctgtag

SEQ ID NO: 11191 - DNA, 390 bp, synthetic construct
  source 1..390: mol_type = other DNA; note = Synthetic coding sequence
atgggctgctgcggctgcagcggcggctgcggcagcggctgcggcggctgcggcagcggctgcggcggctgcggcagcagctgctgcgtgcccatctgctgctgcaagcccgtgtgctgctgcgtgcccgcctgcagctgcaccagctgcggcagctgcggcggcagcaagggctgctgcggcagctgcggcggcagcaagggcggctgcggcagctgcggcggcagcaagggcggctgcggcagctgcggctgcagccagtgcagctgctgcaagccctgctactgcagcagcggctgcggcagcagctgctgccagagcagctgctgcaagccctgctgcagccaggccagctgctgcgtgcccatctgctgccagtgcaagatctag

SEQ ID NO: 11192 - DNA, 1344 bp, synthetic construct
  source 1..1344: mol_type = other DNA; note = Synthetic coding sequence
atgcccatgcccaccgagggcacccccccccccctgagcggcacccccatccccgtgcccgcctacttcagacacgccgagcccggcttcagcctgaagagacccagaggcctgagcagaagcctgcccccccccccccccgccaagggcagcatccccatcagcagactgttcccccccagaacccccggctggcaccagctgcagcccagaagagtgagcttcagaggcgaggccagcgagaccctgcagagccccggctacgaccccagcagacccgagagcttcttccagcagagcttccagagactgagcagactgggccacggcagctacggcgaggtgttcaaggtgagaagcaaggaggacggcagactgtacgccgtgaagagaagcatgagccccttcagaggccccaaggacagagccagaaagctggccgaggtgggcagccacgagaaggtgggccagcacccctgctgcgtgagactggagcaggcctgggaggagggcggcatcctgtacctgcagaccgagctgtgcggccccagcctgcagcagcactgcgaggcctggggcgccagcctgcccgaggcccaggtgtggggctacctgagagacaccctgctggccctggcccacctgcacagccagggcctggtgcacctggacgtgaagcccgccaacatcttcctgggccccagaggcagatgcaagctgggcgacttcggcctgctggtggagctgggcaccgccggcgccggcgaggtgcaggagggcgaccccagatacatggcccccgagctgctgcagggcagctacggcaccgccgccgacgtgttcagcctgggcctgaccatcctggaggtggcctgcaacatggagctgccccacggcggcgagggctggcagcagctgagacagggctacctgccccccgagttcaccgccggcctgagcagcgagctgagaagcgtgctggtgatgatgctggagcccgaccccaagctgagagccaccgccgaggccctgctggccctgcccgtgctgagacagcccagagcctggggcgtgctgtggtgcatggccgccgaggccctgagcagaggctgggccctgtggcaggccctgctggccctgctgtgctggctgtggcacggcctggcccaccccgccagctggctgcagcccctgggcccccccgccaccccccccggcagccccccctgcagcctgctgctggacagcagcctgagcagcaactgggacgacgacagcctgggcccctgcgtgctgaagagaaccgagggcgccctggagtgcagccagatggagggcctgtag

SEQ ID NO: 11193 - DNA, 1005 bp, synthetic construct
  source 1..1005: mol_type = other DNA; note = Synthetic coding sequence
atgagcgccgccaaccccgagacccccaacagcaccatcagcagagaggccagcacccagagcagcagcgccgccgccagccagggctgggtgctgcccgagggcaagatcgtgcccaacaccgtgttcgtgggcggcatcgacgccagaatggacgagaccgagatcggcagctgcttcggcagatacggcagcgtgaaggaggtgaagatcatcaccaacagaaccggcgtgagcaagggctacggcttcgtgagcttcgtgaacgacgtggacgtgcagaagatcgtgggcagccagatccacttccacggcaagaagctgaagctgggccccgccatcagaaagcagaagctgtgcgccagacacgtgcagcccagacccctggtggtgaacccccccccccccccccagttccagaacgtgtggagaaaccccaacaccgagacctacctgcagccccagatcacccccaaccccgtgacccagcacgtgcaggcctacagcgcctacccccacagccccggccaggtgatcaccggctgccagctgctggtgtacaactaccaggagtaccccacctaccccgacagcgccttccaggtgaccaccggctaccagctgcccgtgtacaactaccagcccttccccgcctaccccagaagccccttccaggtgaccgccggctaccagctgcccgtgtacaactaccaggccttccccgcctaccccaacagccccttccaggtggccaccggctaccagttccccgtgtacaactaccagcccttccccgcctaccccagcagccccttccaggtgaccgccggctaccagctgcccgtgtacaactaccaggccttccccgcctaccccaacagccccttccaggtggccaccggctaccagttccccgtgtacaactaccaggccttccccgcctaccccaacagccccgtgcaggtgaccaccggctaccagctgcccgtgtacaactaccagtag

SEQ ID NO: 11194 - DNA, 1173 bp, synthetic construct
  source 1..1173: mol_type = other DNA; note = Synthetic coding sequence
atgagcgccgccaaccccgagacccccaacagcaccatcagcagagaggccagcacccagagcagcagcgccgccgccagccagggctgggtgctgcccgagggcaagatcgtgcccaacaccgtgttcgtgggcggcatcgacgccagaatggacgagaccgagatcggcagctgcttcggcagatacggcagcgtgaaggaggtgaagatcatcaccaacagaaccggcgtgagcaagggctacggcttcgtgagcttcgtgaacgacgtggacgtgcagaagatcgtgggcagccagatccacttccacggcaagaagctgaagctgggccccgccatcagaaagcagaagctgtgcgccagacacgtgcagcccagacccctggtggtgaacccccccccccccccccagttccagaacgtgtggagaaaccccaacaccgagacctacctgcagccccagatcacccccaaccccgtgacccagcacgtgcaggcctacagcgcctacccccacagccccggccaggtgatcaccggctgccagctgctggtgtacaactaccaggagtaccccacctaccccgacagcgccttccaggtgaccaccggctaccagctgcccgtgtacaactaccagcccttccccgcctaccccagaagccccttccaggtgaccgccggctaccagctgcccgtgtacaactaccaggccttccccgcctaccccaacagccccttccaggtggccaccggctaccagttccccgtgtacaactaccagcccttccccgcctaccccagcagccccttccaggtgaccgccggctaccagctgcccgtgtacaactaccaggccttccccgcctaccccaacagccccgtgcaggtgaccaccggctaccagctgcccgtgtacaactaccaggccttccccgcctaccccagcagccccttccaggtgaccaccggctaccagctgcccgtgtacaactaccaggccttccccgcctaccccaacagcgccgtgcaggtgaccaccggctaccagttccacgtgtacaactaccagatgcccccccagtgccccgtgggcgagcagagaagaaacctgtggaccgaggcctacaagtggtggtacctggtgtgcctgatccagagaagagactag

SEQ ID NO: 11195 - DNA, 1173 bp, synthetic construct; identical to SEQ ID NO: 11194
  source 1..1173: mol_type = other DNA; note = Synthetic coding sequence

SEQ ID NO: 11196 - DNA, 1101 bp, synthetic construct
  source 1..1101: mol_type = other DNA; note = Synthetic coding sequence
atgagcgccgccaaccccgagacccccaacagcaccatcagcagagaggccagcacccagagcagcagcgccgccgccagccagggctgggtgctgcccgagggcaagatcgtgcccaacaccgtgttcgtgggcggcatcgacgccagaatggacgagaccgagatcggcagctgcttcggcagatacggcagcgtgaaggaggtgaagatcatcaccaacagaaccggcgtgagcaagggctacggcttcgtgagcttcgtgaacgacgtggacgtgcagaagatcgtgggcagccagatccacttccacggcaagaagctgaagctgggccccgccatcagaaagcagaagctgtgcgccagacacgtgcagcccagacccctggtggtgaacccccccccccccccccagttccagaacgtgtggagaaaccccaacaccgagacctacctgcagccccagatcacccccaaccccgtgacccagcacgtgcaggcctacagcgcctacccccacagccccggccaggtgatcaccggctgccagctgctggtgtacaactaccaggagtaccccacctaccccgacagcgccttccaggtgaccaccggctaccagctgcccgtgtacaactaccagcccttccccgcctaccccagaagccccttccaggtgaccgccggctaccagctgcccgtgtacaactaccaggccttccccgcctaccccaacagccccttccaggtggccaccggctaccagttccccgtgtacaactaccagcccttccccgcctaccccagcagccccttccaggtgaccgccggctaccagctgcccgtgtacaactaccaggccttccccgcctaccccaacagccccgtgcaggtgaccaccggctaccagctgcccgtgtacaactaccaggccttccccgcctaccccaacagcgccgtgcaggtgaccaccggctaccagttccacgtgtacaactaccagatgcccccccagtgccccgtgggcgagcagagaagaaacctgtggaccgaggcctacaagtggtggtacctggtgtgcctgatccagagaagagactag

SEQ ID NO: 11197 - DNA, 1149 bp, synthetic construct
  source 1..1149: mol_type = other DNA; note = Synthetic coding sequence
atgagcgccgccaaccccgagacccccaacagcaccatcagcagagaggccagcacccagagcagcagcgccgccgccagccagggctgggtgctgcccgagggcaagatcgtgcccaacaccgtgttcgtgggcggcatcgacgccagaatggacgagaccgagatcggcagctgcttcggcagatacggcagcgtgaaggaggtgaagatcatcaccaacagaaccggcgtgagcaagggctacggcttcgtgagcttcgtgaacgacgtggacgtgcagaagatcgtgggcagccagatccacttccacggcaagaagctgaagctgggccccgccatcagaaagcagaagctgtgcgccagacacgtgcagcccagacccctggtggtgaacccccccccccccccccagttccagaacgtgtggagaaaccccaacaccgagacctacctgcagccccagatcacccccaaccccgtgacccagcacgtgcaggcctacagcgcctacccccacagccccggccaggtgatcaccggctgccagctgctggtgtacaactaccaggagtaccccacctaccccgacagcgccttccaggtgaccaccggctaccagctgcccgtgtacaactaccagcccttccccgcctaccccagaagccccttccaggtgaccgccggctaccagctgcccgtgtacaactaccaggccttccccgcctaccccaacagccccttccaggtggccaccggctaccagttccccgtgtacaactaccagcccttccccgcctaccccagcagccccttccaggtgaccgccggctaccagctgcccgtgtacaactaccaggccttccccgcctaccccaacagccccttccaggtggccaccggctaccagttccccgtgtacaactaccaggccttccccgcctaccccaacagccccgtgcaggtgaccaccggctaccagctgcccgtgtacaactaccaggccttccccgcctaccccaacagccccttccaggtggccaccggctaccagttccccgtgtacaactaccaggccttccccgcctaccccaacagccccgtgcaggtgaccaccggctaccagctgcccgtgtacaactaccagtag

SEQ ID NO: 11198 - DNA, 1842 bp, synthetic construct
  source 1..1842: mol_type = other DNA; note = Synthetic coding sequence
atgagcgccgccaaccccgagacccccaacagcaccatcagcagagaggccagcacccagagcagcagcgccgccgccagccagggctgggtgctgcccgagggcaagatcgtgcccaacaccgtgttcgtgggcggcatcgacgccagaatggacgagaccgagatcggcagctgcttcggcagatacggcagcgtgaaggaggtgaagatcatcaccaacagaaccggcgtgagcaagggctacggcttcgtgagcttcgtgaacgacgtggacgtgcagaagatcgtgggcagccagatccacttccacggcaagaagctgaagctgggccccgccatcagaaagcagaagctgtgcgccagacacgtgcagcccagacccctggtggtgaacccccccccccccccccagttccagaacgtgtggagaaaccccaacaccgagacctacctgcagccccagatcacccccaaccccgtgacccagcacgtgcagagcgccgccaaccccgagacccccaacagcaccatcagcagagaggccagcacccagagcagcagcgccgccgccagccagggctgggtgctgcccgagggcaagatcgtgcccaacaccgtgttcgtgggcggcatcgacgccagaatggacgagaccgagatcggcagctgcttcggcagatacggcagcgtgaaggaggtgaagatcatcaccaacagaaccggcgtgagcaagggctacggcttcgtgagcttcgtgaacgacgtggacgtgcagaagatcgtgggcagccagatccacttccacggcaagaagctgaagctgggccccgccatcagaaagcagaagctgtgcgccagacacgtgcagcccagacccctggtggtgaacccccccccccccccccagttccagaacgtgtggagaaaccccaacaccgagacctacctgcagccccagatcacccccaaccccgtgacccagcacgtgcagagcgccgccaaccccgagacccccaacagcaccatcagcagagaggccagcacccagagcagcagcgccgccgccagccagggctgggtgctgcccgagggcaagatcgtgcccaacaccgtgttcgtgggcggcatcgacgccagaatggacgagaccgagatcggcagctgcttcggcagatacggcagcgtgaaggaggtgaagatcatcaccaacagaaccggcgtgagcaagggctacggcttcgtgagcttcgtgaacgacgtggacgtgcagaagatcgtgggcagccagatccacttccacggcaagaagctgaagctgggccccgccatcagaaagcagaagctgtgcgccagacacgtgcagcccagacccctggtggtgaacccccccccccccccccagttccagaacgtgtggagaaaccccaacaccgagacctacctgcagccccagatcacccccaaccccgtgacccagcacgtgcaggcctacagcgcctacccccacagccccggccaggtgatcaccggctgccagctgctggtgtacaactaccaggagtaccccacctaccccgacagcgccttccaggtgaccaccggctaccagctgcccgtgtacaactaccagcccttccccgcctaccccagaagccccttccaggtgaccgccggctaccagctgcccgtgtacaactaccaggccttccccgcctaccccaacagccccttccaggtggccaccggctaccagttccccgtgtgcgagatctgcaagatcctggtgctgaagaacgccgccgccttcctgtgccacagcaaggtgaacagaagcatctag

SEQ ID NO: 11199 - DNA, 384 bp, synthetic construct; identical to SEQ ID NO: 9944
  source 1..384: mol_type = other DNA; note = Synthetic coding sequence

SEQ ID NO: 11200 - DNA, 537 bp, synthetic construct
  source 1..537: mol_type = other DNA; note = Synthetic coding sequence
atgatgagagccatgaagccccccggcggcgagagcagcaacctgttcggcagccccgaggaggccacccccagcagcagacccaacagaatggccagcaacatcttcggccccaccgaggagccccagaacatccccaagagaaccaacccccccggcggcaagggcagcggcatcttcgacgagagcacccccgtgcagaccagacagcacctgaacccccccggcggcaagaccagcgacatcttcggcagccccgtgaccgccaccagcagactggcccaccccaacaagcccaaggaccacgtgttcctgtgcgagggcgaggagcccaagagcgacctgaaggccgccagaagcatccccgccggcgccgagcccggcgagaagggcagcgccagaaaggccggccccgccaaggagcaggagcccatgcccaccgtggacagccacgagcccagactgggccccagacccagaagccacaacaaggtgctgaacccccccggcggcaagagcagcatcagcttctactag

SEQ ID NO: 11201 - DNA, 657 bp, synthetic construct
  source 1..657: mol_type = other DNA; note = Synthetic coding sequence
atgttccaggtgcccgacagcgagggcggcagagccggcagcagaaagtggcagctgctgaccggcagcctggccagcaccagccccagcctgctgagcggccagggcccctgggcccccctgcagagagccatgaagccccccggcggcgagagcagcaacctgttcggcagccccgaggaggccacccccagcagcagacccaacagaatggccagcaacatcttcggccccaccgaggagccccagaacatccccaagagaaccaacccccccggcggcaagggcagcggcatcttcgacgagagcacccccgtgcagaccagacagcacctgaacccccccggcggcaagaccagcgacatcttcggcagccccgtgaccgccaccagcagactggcccaccccaacaagcccaaggaccacgtgttcctgtgcgagggcgaggagcccaagagcgacctgaaggccgccagaagcatccccgccggcgccgagcccggcgagaagggcagcgccagaaaggccggccccgccaaggagcaggagcccatgcccaccgtggacagccacgagcccagactgggccccagacccagaagccacaacaaggtgctgaacccccccggcggcaagagcagcatcagcttctactag

SEQ ID NO: 11202 - DNA, 4866 bp, synthetic construct
  source 1..4866: mol_type = other DNA; note = Synthetic coding sequence
atggccggcggcagaggcgcccccggcagaggcagagacgagccccccgagagctacccccagagacaggaccacgagctgcaggccctggaggccatctacggcgccgacttccaggacctgagacccgacgcctgcggccccgtgaaggagccccccgagatcaacctggtgctgtacccccagggcctgaccggcgaggaggtgtacgtgaaggtggacctgagagtgaagtgcccccccacctaccccgacgtggtgcccgagatcgagctgaagaacgccaagggcctgagcaacgagagcgtgaacctgctgaagagcagactggaggagctggccaagaagcactgcggcgaggtgatgatcttcgagctggcctaccacgtgcagagcttcctgagcgagcacaacaagcccccccccaagagcttccacgaggagatgctggagagaagagcccaggaggagcagcagagactgctggaggccaagagaaaggaggagcaggagcagagagagatcctgcacgagatccagagaagaaaggaggagatcaaggaggagaagaagagaaaggagatggccaagcaggagagactggagatcgccagcctgagcaaccaggaccacaccagcaagaaggaccccggcggccacagaaccgccgccatcctgcacggcggcagccccgacttcgtgggcaacggcaagcacagagccaacagcagcggcagaagcagaagagagagacagtacagcgtgtgcaacagcgaggacagccccggcagctgcgagatcctgtacttcaacatgggcagccccgaccagctgatggtgcacaagggcaagtgcatcggcagcgacgagcagctgggcaagctggtgtacaacgccctggagaccgccaccggcggcttcgtgctgctgtacgagtgggtgctgcagtggcagaagaagatgggccccttcctgaccagccaggagaaggagaagatcgacaagtgcaagaagcagatccagggcaccgagaccgagttcaacagcctggtgaagctgagccaccccaacgtggtgagatacctggccatgaacctgaaggagcaggacgacagcatcgtggtggacatcctggtggagcacatcagcggcgtgagcctggccgcccacctgagccacagcggccccatccccgtgcaccagctgagaagatacaccgcccagctgctgagcggcctggactacctgcacagcaacagcgtggtgcacaaggtgctgagcgccagcaacgtgctggtggacgccgagggcaccgtgaagatcaccgactacagcatcagcaagagactggccgacatctgcaaggaggacgtgttcgagcagaccagagtgagattcagcgacaacgccctgccctacaagaccggcaagaagggcgacgtgtggagactgggcctgctgctgctgagcctgagccagggccaggagtgcggcgagtaccccgtgaccatccccagcgacctgcccgccgacttccaggacttcctgaagaagtgcgtgtgcctggacgacaaggagagatggagcccccagcagctgctgaagcacagcttcatcaacccccagcccaagatgcccctggtggagcagagccccgaggacagcgagggccaggactacgtggagaccgtgatccccagcaacagactgcccagcgccgccttcttcagcgagacccagagacagttcagcagatacttcatcgagttcgaggagctgcagctgctgggcaagggcgccttcggcgccgtgatcaaggtgcagaacaagctggacggctgctgctacgccgtgaagagaatccccatcaaccccgccagcagacagttcagaagaatcaagggcgaggtgaccctgctgagcagactgcaccacgagaacatcgtgagatactacaacgcctggatcgagagacacgagagacccgccggccccggcacccccccccccgacagcggccccctggccaaggacgacagagccgccagaggccagcccgccagcgacaccgacggcctggacagcgtggaggccgccgcccccccccccatcctgagcagcagcgtggagtggagcaccagcggcgagagaagcgccagcgccagattccccgccaccggccccggcagcagcgacgacgaggacgacgacgaggacgagcacggcggcgtgttcagccagagcttcctgcccgccagcgacagcgagagcgacatcatcttcgacaacgaggacgagaacagcaagagccagaaccagatggagtactgcgagaagagcaccctgagagacaccatcgaccagggcctgtacagagacaccgtgagactgtggagactgttcagagagatcctggacggcctggcctacatccacgagaagggcatgatccacagagacctgaagcccgtgaacatcttcctggacagcgacgaccacgtgaagatcggcgacttcggcctggccaccgaccacctggccttcagcgccgacagcaagcaggacgaccagaccggcgacctgatcaagagcgaccccagcggccacctgaccggcatggtgggcaccgccctgtacgtgagccccgaggtgcagggcagcaccaagagcgcctacaaccagaaggtggacctgttcagcctgggcatcatcttcttcgagatgagctaccaccccatggtgaccgccagcgagagaatcttcgtgctgaaccagctgagagaccccaccagccccaagttccccgaggacttcgacgacggcgagcacgccaagcagaagagcgtgatcagctggctgctgaaccacgaccccgccaagagacccaccgccaccgagctgctgaagagcgagctgctgccccccccccagatggaggagagcgagctgcacgaggtgctgcaccacaccctgaccaacgtggacggcaaggcctacagaaccatgatggcccagatcttcagccagagaatcagccccgccatcgactacacctacgacagcgacatcctgaagggcaacttcagcatcagaaccgccaagatgcagcagcacgtgtgcgagaccatcatcagaatcttcaagagacacggcgccgtgcagctgtgcacccccctgctgctgcccagaaacagacagatctacgagcacaacgaggccgccctgttcatggaccacagcggcatgctggtgatgctgcccttcgacctgagaatccccttcgccagatacgtggccagaaacaacatcctgaacctgaagagatactgcatcgagagagtgttcagacccagaaagctggacagattccaccccaaggagctgctggagtgcgccttcgacatcgtgaccagcaccaccaacagcttcctgcccaccgccgagatcatctacaccatctacgagatcatccaggagttccccgccctgcaggagagaaactacagcatctacctgaaccacaccatgctgctgaaggccatcctgctgcactgcggcatccccgaggacaagctgagccaggtgtacatcatcctgtacgacgccgtgaccgagaagctgaccagaagagaggtggaggccaagttctgcaacctgagcctgagcagcaacagcctgtgcagactgtacaagttcatcgagcagaagggcgacctgcaggacctgatgcccaccatcaacagcctgatcaagcagaagaccggcatcgcccagctggtgaagtacggcctgaaggacctggaggaggtggtgggcctgctgaagaagctgggcatcaagctgcaggtgctgatcaacctgggcctggtgtacaaggtgcagcagcacaacggcatcatcttccagttcgtggccttcatcaagagaagacagagagccgtgcccgagatcctggccgccggcggcagatacgacctgctgatcccccagttcagaggcccccaggccctgggccccgtgcccaccgccatcggcgtgagcatcgccatcgacaagatcagcgccgccgtgctgaacatggaggagagcgtgaccatcagcagctgcgacctgctggtggtgagcgtgggccagatgagcatgagcagagccatcaacctgacccagaagctgtggaccgccggcatcaccgccgagatcatgtacgactggagccagagccaggaggagctgcaggagtactgcagacaccacgagatcacctacgtggccctggtgagcgacaaggagggcagccacgtgaaggtgaagagcttcgagaaggagagacagaccgagaagagagtgctggagaccgagctggtggaccacgtgctgcagaagctgagaaccaaggtgaccgacgagagaaacggcagagaggccagcgacaacctggccgtgcagaacctgaagggcagcttcagcaacgccagcggcctgttcgagatccacggcgccaccgtggtgcccatcgtgagcgtgctggcccccgagaagctgagcgccagcaccagaagaagatacgagacccaggtgcagaccagactgcagaccagcctggccaacctgcaccagaagagcagcgagatcgagatcctggccgtggacctgcccaaggagaccatcctgcagttcctgagcctggagtgggacgccgacgagcaggccttcaacaccaccgtgaagcagctgctgagcagactgcccaagcagagatacctgaagctggtgtgcgacgagatctacaacatcaaggtggagaagaaggtgagcgtgctgttcctgtacagctacagagacgactactacagaatcctgttctag

SEQ ID NO: 11203 - DNA, 2388 bp, synthetic construct
  source 1..2388: mol_type = other DNA; note = Synthetic coding sequence
atgaagttcaccaacaccaaggtgcagatgatgcagaacgtgcacctggcccccgagaccgacgaggacgacctgtacagcggctacaacgactacaaccccatctacgacatcgaggagctggagaacgacgccgccttccagcaggccgtgagaaccagccacggcagaagaccccccatcaccgccaagatcagcagcaccgccgtgaccagacccatcgccaccggctacggcagcaagaccagcctggccagcagcatcggcagacccatgaccggcgccatccaggacggcgtgaccagacccatgaccgccgtgagagccgccggcttcaccaaggccgccctgagaggcagcgccttcgaccccctgagccagagcagaggccccgccagccccctggaggccaagaagaaggacagccccgaggagaagatcaagcagctggagaaggaggtgaacgagctggtggaggagagctgcatcgccaacagctgcggcgacctgaagctggccctggagaaggccaaggacgccggcagaaaggagagagtgctggtgagacagagagagcaggtgaccacccccgagaacatcaacctggacctgacctacagcgtgctgttcaacctggccagccagtacagcgtgaacgagatgtacgccgaggccctgaacacctaccaggtgatcgtgaagaacaagatgttcagcaacgccggcatcctgaagatgaacatgggcaacatctacctgaagcagagaaactacagcaaggccatcaagttctacagaatggccctggaccaggtgcccagcgtgaacaagcagatgagaatcaagatcatgcagaacatcggcgtgaccttcatccaggccggccagtacagcgacgccatcaacagctacgagcacatcatgagcatggcccccaacctgaaggccggctacaacctgaccatctgctacttcgccatcggcgacagagagaagatgaagaaggccttccagaagctgatcaccgtgcccctggagatcgacgaggacaagtacatcagccccagcgacgacccccacaccaacctggtgaccgaggccatcaagaacgaccacctgagacagatggagagagagagaaaggccatggccgagaagtacatcatgaccagcgccaagctgatcgcccccgtgatcgagaccagcttcgccgccggctacgactggtgcgtggaggtggtgaaggccagccagtacgtggagctggccaacgacctggagatcaacaaggccgtgacctacctgagacagaaggactacaaccaggccgtggagatcctgaaggtgctggagaagaaggacagcagagtgaagagcgccgccgccaccaacctgagcgccctgtactacatgggcaaggacttcgcccaggccagcagctacgccgacatcgccgtgaacagcgacagatacaaccccgccgccctgaccaacaagggcaacaccgtgttcgccaacggcgactacgagaaggccgccgagttctacaaggaggccctgagaaacgacagcagctgcaccgaggccctgtacaacatcggcctgacctacgagaagctgaacagactggacgaggccctggactgcttcctgaagctgcacgccatcctgagaaacagcgccgaggtgctgtaccagatcgccaacatctacgagctgatggagaaccccagccaggccatcgagtggctgatgcaggtggtgagcgtgatccccaccgacccccaggtgctgagcaagctgggcgagctgtacgacagagagggcgacaagagccaggccttccagtactactacgagagctacagatacttcccctgcaacatcgaggtgatcgagtggctgggcgcctactacatcgacacccagttctgggagaaggccatccagtacttcgagagagccagcctgatccagcccacccaggtgaagtggcagctgatggtggccagctgcttcagaagaagcggcaactaccagaaggccctggacacctacaaggacacccacagaaagttccccgagaacgtggagtgcagcggcagcgtgagaaccggccacatggagagagaccccctgaacctgctgcccagaaagagcgtgctgcccggccccgagatcgccaagtgcaactacttcagcggcgagaagtactacctgagcgccttcctgagcagcagcctgcacagaagctggatcaagagatgcagcagaatctgccagaagaccgaggaggtgggcaagaacgagagaaacaagggcaccgcccacaaggtgagacagagatggcagtggggcctgccctggcagaagagaagaaagtgctag

SEQ ID NO: 11204 - DNA, 192 bp, synthetic construct
  source 1..192: mol_type = other DNA; note = Synthetic coding sequence
atgagctactacagaagctactacggcggcctgggctacggctacggcggcttcggcggctggggctacggctacggctgcggctacggcagcttcagaagactgggctacggctgcggctacggcggctacggcttcagctgctgcagacccctgtactacggcggctacggcttcagcgccttctactag

SEQ ID NO: 11205 - DNA, 135 bp, synthetic construct
  source 1..135: mol_type = other DNA; note = Synthetic coding sequence
atgagctactacggcaactactacggcggcctgggctacggctacgactgcaagtacagctacaccagcggcttcggcgccttcagaatcctggactgcggctacagatgcggctgcggcggcgtgtggatctag

SEQ ID NO: 11206 - DNA, 135 bp, synthetic construct
  source 1..135: mol_type = other DNA; note = Synthetic coding sequence
atgagctactacagccacctgagcggcggcctgggctgcggcctggccgtggccgtgaccatgggcagaaccgtggccgtggccgagtacggcagatgcagacacggctgccacagcagctacagcgccagatag

SEQ ID NO: 11207 - DNA, 138 bp, synthetic construct
  source 1..138: mol_type = other DNA; note = Synthetic coding sequence
atgtgctactaccacaactactacggcagcctggactacggctgcagctacggcagcgagtacggcaacagcggctacgcctgcaacttcccctgcagctacggcagattcctgctggcccccagaaagaagttctag

SEQ ID NO: 11208 - DNA, 624 bp, synthetic construct
  source 1..624: mol_type = other DNA; note = Synthetic coding sequence
atgccccacagccactgccacagcctgagaagcttccacaacgccccccccctgagcgccatcacccacggcaccaaccccatcaccttcgaggacagactgtgcctgcccagcagcttccacagcagaacctgcttcctggacaacttccaggagacctgcaacgagaccaccagctgccagatgaccaactgcgagcaggacctgttcaccgacgacagctgcgtgcagagcaactgcttccccggcgtggtgcagaccacctacagcaacagcagaccctgcgagagaaccgcctgccagagcgagagcagcagcgccggcctggcctgcgtgagccagccctgccagagcgagagcacccagcagatgggcttcgtggcccagagctgccagcccgccagcctgaagggcaacagctgcccccccaagaccagcaagagcaagaacttcgagaccctggagagagccagcagccagtgccagtgccagagccagaaccccgagagcagcagctgcagacccctggtgaacgtggcccccgagccccagctgctggagagcagccccggcgtggagcccacctgctgcgtgaccggcggcagccagctgcccagcaagtag

SEQ ID NO: 11209 - DNA, 645 bp, synthetic construct
  source 1..645: mol_type = other DNA; note = Synthetic coding sequence
atggcccacgtgagcagcgagacccaggacgtgagccccaaggacgagctgaccgccagcgaggccagcaccagaagccccctgtgcgagcacaccttccccggcgacagcgacctgagaagcatgatcgaggagcacgccttccaggtgctgagccagggcagcctgctggagagccccagctacaccgtgtgcgtgagcgagcccgacaaggacgacgacttcctgagcctgaacttccccagaaagctgtggaagatcgtggagagcgaccagttcaagagcatcagctgggacgagaacggcacctgcatcgtgatcaacgaggagctgttcaagaaggagatcctggagaccaaggccccctacagaatcttccagaccgacgccatcaagagcttcgtgagacagctgaacctgtacggcttcagcaagatccagcagaacttccagagaagcgccttcctggccaccttcctgagcgaggagaaggagagcagcgtgctgagcaagctgcacgtgttcgtgttccaccacagcctgttcggcgccaccttcggcgagcaccacttccagccctgccccctgcccagcggcaacaaggcccccatcagcacctggagcggcgacagctggctgctgtag

SEQ ID NO: 11210 - DNA, 645 bp, synthetic construct; identical to SEQ ID NO: 11209
  source 1..645: mol_type = other DNA; note = Synthetic coding sequence

SEQ ID NO: 11211 - DNA, 1437 bp, synthetic construct
  source 1..1437: mol_type = other DNA; note = Synthetic coding sequence
atggccgccgccctgaagtgcctgctgaccctgggcagatggtgccccggcctgggcgtggccccccaggccagagccctggccgccctggtgcccggcgtgacccaggtggacaacaagagcggcttcctgcagaagagaccccacagacagcaccccggcatcctgaagctgccccacgtgagactgccccaggccctggccaacggcgcccagctgctgctgctgggcagcgccggccccaccatggagaaccaggtgcagaccctgaccagctacctgtggagcagacacctgcccgtggagcccgaggagctgcagagaagagccagacacctggagaagaagttcctggagaaccccgacctgagccagaccgaggagaagctgagaggcgccgtgctgcacgccctgagaaagaccacctaccactggcaggagctgagctacaccgagggcctgagcctggtgtacatggccgccagactggacggcggcttcgccgccgtgagcagagccttccacgagatcagagccagaaaccccgccttccagccccagaccctgatggacttcggcagcggcaccggcagcgtgacctgggccgcccacagcatctggggccagagcctgagagagtacatgtgcgtggacagaagcgccgccatgctggtgctggccgagaagctgctgaagggcggcagcgagagcggcgagccctacatccccggcgtgttcttcagacagttcctgcccgtgagccccaaggtgcagttcgacgtggtggtgagcgccttcagcctgagcgagctgcccagcaaggccgacagaaccgaggtggtgcagaccctgtggagaaagaccggccacttcctggtgctggtggagaacggcaccaaggccggccacagcctgctgatggacgccagagacctggtgctgaagggcaaggagaagagccccctggaccccagacccggcttcgtgttcgccccctgcccccacgagctgccctgcccccagctgaccaacctggcctgcagcttcagccaggcctaccaccccatccccttcagctggaacaagaagcccaaggaggagaagttcagcatggtgatcctggccagaggcagccccgaggaggcccacagatggcccagaatcacccagcccgtgctgaagagacccagacacgtgcactgccacctgtgctgccccgacggccacatgcagcacgccgtgctgaccgccagaagacacggcagatacggcggctgcgaccagaaccagtgggacgtggccggcagctgcagccccagacagcacctgttcccccagggcttcgtgagcctgtgcccctgccagctgctgggcagaagcttcacctgcgcctacagcgtgtgcgtgagcagcatctacggcagcggcagcctgtag

SEQ ID NO: 11212 - DNA, 774 bp, synthetic construct
  source 1..774: mol_type = other DNA; note = Synthetic coding sequence
atggaggaggaggccagcagccccggcctgggctgcagcaagccccacctggagaagctgaccctgggcatcaccagaatcctggagagcagccccggcgtgaccgaggtgaccatcatcgagaagccccccgccgagagacacatgatcagcagctgggagcagaagaacaactgcgtgatgcccgaggacgtgaagaacttctacctgatgaccaacggcttccacatgacctggagcgtgaagctggacgccagcgacgaccagcccgagaagccccacttcgacagcagaagcgtgatcttcgagctggacagctgcaacggcagcggcaaggtgtgcctggtgtacaagagcggcaagcccgccctggccgaggacaccgagatctggttcctggacagagccctgtactggcacttcctgaccgacaccttcaccgcctactacagactgctgatcacccacctgggcctgccccagtggcagtacgccttcaccagctacggcatcagcccccaggccaagcagtggttcagcatgtacaagcccatcacctacaacaccaacctgctgaccgaggagaccgacagcttcgtgaacaagctggaccccagcaaggtgttcaagagcaagaacaagatcgtgatccccaagaagaagggccccgtgcagcccgccggcggccagaagggccccagcggccccagcggccccagcaccagcagcaccagcaagagcagcagcggcagcggcaaccccaccagaaagtag

SEQ ID NO: 11213 - DNA, 792 bp, synthetic construct; identical to SEQ ID NO: 9911
  source 1..792: mol_type = other DNA; note = Synthetic coding sequence

SEQ ID NO: 11214 - DNA, 390 bp, synthetic construct; identical to SEQ ID NO: 10956
  source 1..390: mol_type = other DNA; note = Synthetic coding sequence

SEQ ID NO: 11215 - DNA, 1626 bp, synthetic construct
  source 1..1626: mol_type = other DNA; note = Synthetic coding sequence
atggaggccctgctggagggcatccagaacagaggccacggcggcggcttcctgaccagctgcgaggccgagctgcaggagctgatgaagcagatcgacatcatggtggcccacaagaagagcgagtgggagggcagaacccacgccctggagacctgcctgaagatcagagagcaggagctgaagagcctgagaagccagctggacgtgacccacaaggaggtgggcatgctgcaccagcaggtggaggagcacgagaagatcaagcaggagatgaccatggagtacaagcaggagctgaagaagctgcacgaggagctgtgcatcctgaagagaagctacgagaagctgcagaagaagcagatgagagagttcagaggcaacaccaagaaccacagagaggacagaagcgagatcgagagactgaccgccaagatcgaggagttcagacagaagagcctggactgggagaagcagagactgatctaccagcagcaggtgagcagcctggaggcccagagaaaggccctggccgagcagagcgagatcatccaggcccagctggtgaacagaaagcagaagctggagagcgtggagctgagcagccagagcgagatccagcacctgagcagcaagctggagagagccaacgacaccatctgcgccaacgagctggagatcgagagactgaccatgagagtgaacgacctggtgggcaccagcatgaccgtgctgcaggagcagcagcagaaggaggagaagctgagagagagcgagaagctgctggaggccctgcaggaggagaagagagagctgaaggccgccctgcagagccaggagaacctgatccacgaggccagaatccagaaggagaagctgcaggagaaggtgaaggccaccaacacccagcacgccgtggaggccatcagacccagagaggagagcctggccgagaagaagtacaccagccagggccagggcgacctggacagcgtgctgagccagctgaacttcacccacaccagcgaggacctgctgcaggccgaggtgacctgcctggagggcagcctggagagcgtgagcgccacctgcaagcagctgagccaggagctgatggagaagtacgaggagctgaagagaatggaggcccacaacaacgagtacaaggccgagatcaagaagctgaaggagcagatcctgcagggcgagcagagctacagcagcgccctggagggcatgaagatggagatcagccacctgacccaggagctgcaccagagagacatcaccatcgccagcaccaagggcagcagcagcgacatggagaagagactgagagccgagatgcagaaggccgaggacaaggccgtggagcacaaggagatcctggaccagctggagagcctgaagctggagaacagacacctgagcgagatggtgatgaagctggagctgggcctgcacgagtgcagcctgcccgtgagccccctgggcagcatcgccaccagattcctggaggaggaggagctgagaagccaccacatcctggagagactggacgcccacatcgaggagctgaagagagagagcgagaagaccgtgagacagttcaccgccctgaagtag

SEQ ID NO: 11216 - DNA, 483 bp, synthetic construct; identical to SEQ ID NO: 10977
  source 1..483: mol_type = other DNA; note = Synthetic coding sequence

SEQ ID NO: 11217 - DNA, 483 bp, synthetic construct; identical to SEQ ID NO: 10977
  source 1..483: mol_type = other DNA; note = Synthetic coding sequence

SEQ ID NO: 11218 - DNA, 3192 bp, synthetic construct
  source 1..3192: mol_type = other DNA; note = Synthetic coding sequence
atgccccacctgcccctggccagcttcagaccccccttctggggcctgagacacagcagaggcctgcccagattccacagcgtgagcacccagagcgagccccacggcagccccatcagcagaagaaacagagaggccaagcagaagagactgagagagaagcaggccaccctggaggccgagatcgccggcgagagcaagagccccgccgagagcatcaaggcctggagacccaaggagctggtgctgtacgagatccccaccaagcccggcgagaagaaggacgtgagcggccccctgccccccgcctacagccccagatacgtggaggccgcctggtacccctggtgggtgagagagggcttcttcaagcccgagtaccaggccagactgccccaggccaccggcgagaccttcagcatgtgcatccccccccccaacgtgaccggcagcctgcacatcggccacgccctgaccgtggccatccaggacgccctggtgagatggcacagaatgagaggcgaccaggtgctgtgggtgcccggcagcgaccacgccggcatcgccacccaggccgtggtggagaagcagctgtggaaggagagaggcgtgagaagacacgagctgagcagagaggccttcctgagagaggtgtggcagtggaaggaggccaagggcggcgagatctgcgagcagctgagagccctgggcgccagcctggactgggacagagagtgcttcaccatggacgtgggcagcagcgtggccgtgaccgaggccttcgtgagactgtacaaggccggcctgctgtacagaaaccaccagctggtgaactggagctgcgccctgagaagcgccatcagcgacatcgaggtggagaacagacccctgcccggccacacccagctgagactgcccggctgccccacccccgtgagcttcggcctgctgttcagcgtggccttccccgtggacggcgagcccgacgccgaggtggtggtgggcaccaccagacccgagaccctgcccggcgacgtggccgtggccgtgcaccccgacgacagcagatacacccacctgcacggcagacagctgagacaccccctgatgggccagcccctgcccctgatcaccgactacgccgtgcagccccacgtgggcaccggcgccgtgaaggtgacccccgcccacagccccgccgacgccgagatgggcgccagacacggcctgagccccctgaacgtgatcgccgaggacggcaccatgaccagcctgtgcggcgactggctgcagggcctgcacagattcgtggccagagagaagatcatgagcgtgctgagcgagagaggcctgttcagaggcctgcagaaccaccccatggtgctgcccatctgcagcagaagcggcgacgtgatcgagtacctgctgaagaaccagtggttcgtgagatgccaggagatgggcgccagagccgccaaggccgtggagagcggcgccctggagctgagccccagcttccaccagaagaactggcagcactggttcagccacatcggcgactggtgcgtgagcagacagctgtggtggggccaccagatccccgcctacctggtggtggaggaccacgcccagggcgaggaggactgctgggtggtgggcagaagcgaggccgaggccagagaggtggccgccgagctgaccggcagacccggcgccgagctgaccctggagagagaccccgacgtgctggacacctggttcagcagcgccctgttccccttcagcgccctgggctggccccaggagacccccgacctggccagattctaccccctgagcctgctggagaccggcagcgacctgctgctgttctgggtgggcagaatggtgatgctgggcacccagctgaccggccagctgcccttcagcaaggtgctgctgcaccccatggtgagagacagacagggcagaaagatgagcaagagcctgggcaacgtgctggaccccagagacatcatcagcggcgtggagatgcagctgctgcaggagaagctgagaagcggcaacctggaccccgccgagctggccatcgtggccgccgcccagaagaaggacttcccccacggcatccccgagtgcggcaccgacgccctgagattcaccctgtgcagccacggcgtgcaggccggcgacctgcacctgagcgtgagcgaggtgcagagctgcagacacttctgcaacaagatctggaacgccctgagattcatcctgaacgccctgggcgagaagttcgtgccccagcccgccgaggagctgagccccagcagccccatggacgcctggatcctgagcagactggccctggccgcccaggagtgcgagagaggcttcctgaccagagagctgagcctggtgacccacgccctgcaccacttctggctgcacaacctgtgcgacgtgtacctggaggccgtgaagcccgtgctgtggcacagccccagacccctgggccccccccaggtgctgttcagctgcgccgacctgggcctgagactgctggcccccctgatgcccttcctggccgaggagctgtggcagagactgccccccagacccggctgcccccccgcccccagcatcagcgtggccccctaccccagcgcctgcagcctggagcactggagacagcccgagctggagagaagattcagcagagtgcaggaggtggtgcaggtgctgagagccctgagagccacctaccagctgaccaaggccagacccagagtgctgctgcagagcagcgagcccggcgaccagggcctgttcgaggccttcctggagcccctgggcaccctgggctactgcggcgccgtgggcctgctgccccccggcaccgccgcccccagcggctgggcccaggcccccctgagcgacaccgcccaggtgtacatggagctgcagggcctggtggacccccagatccagctgcccctgctggccgccagaagatacaagctgcagaagcagctggacagcctgaccgccagaacccccagcgagggcgaggccggcacccagagacagcagaagctgagcagcctgcagctggagctgagcaagctggacaaggccgccagccacctgagacagctgatggacgagccccccgcccccggcagccccgagctgtag

SEQ ID NO: 11219 - DNA, 1620 bp, synthetic construct; identical to SEQ ID NO: 10018
  source 1..1620: mol_type = other DNA; note = Synthetic coding sequence

SEQ ID NO: 11220 - DNA, 678 bp, synthetic construct
  source 1..678: mol_type = other DNA; note = Synthetic coding sequence
atggccgccggcagcgaggccaccacccccgtgatcgtggccgccggcgccggcggcgaggagggcgagcacgtgaagcccttcaagcccgagaaggccaaggagatcatcatgagcctgcagcagcccgccatcttctgcaacatggtgttcgactggcccgccagacactggaacgccaagtacctgagccaggtgctgcacggcaagcagatcagattcagaatgggcatgaagagcatgagcaccgtgccccagttcgagaccacctgcaactacgtggaggccaccctggaggagttcctgacctggaactgcgaccagagcagcatcagcggccccttcagagactacgaccacagcaagttctgggcctacgccgactacaagtacttcgtgagcctgttcgaggacaagaccgacctgttccaggacgtgaagtggagcgacttcggcttccccggcagaaacggccaggagagcaccctgtggatcggcagcctgggcgcccacaccccctgccacctggacagctacggctgcaacctggtgttccaggtgcagggcagactggagtgcaacggcatgatcatcgcccccggcccccaggccatcctgctgccccagcccctgaagtacctgggcctgcaggagaccatggccagcctgagcagctag

SEQ ID NO: 11221 - DNA, 2571 bp, synthetic construct; identical to SEQ ID NO: 9592
  source 1..2571: mol_type = other DNA; note = Synthetic coding sequence

SEQ ID NO: 11222 - DNA, 2607 bp, synthetic construct
  source 1..2607: mol_type = other DNA; note = Synthetic coding sequence
atggccagcttccccgagaccgacttccagatctgcctgctgtgcaaggagatgtgcggcagccccgcccccctgagcagcaacagcagcgccagcagcagcagcagccagaccagcaccagcagcggcggcggcggcggcggccccggcgccgccgccagaagactgcacgtgctgccctgcctgcacgccttctgcagaccctgcctggaggcccacagactgcccgccgccggcggcggcgccgccggcgagcccctgaagctgagatgccccgtgtgcgaccagaaggtggtgctggccgaggccgccggcatggacgccctgcccagcagcgccttcctgctgagcaacctgctggacgccgtggtggccaccgccgacgagcccccccccaagaacggcagagccggcgcccccgccggcgccggcggccacagcaaccacagacaccacgcccaccacgcccaccccagagccagcgccagcgccccccccctgccccaggccccccagccccccgcccccagcagaagcgcccccggcggccccgccgccagccccagcgccctgctgctgagaagaccccacggctgcagcagctgcgacgagggcaacgccgccagcagcagatgcctggactgccaggagcacctgtgcgacaactgcgtgagagcccaccagagagtgagactgaccaaggaccactacatcgagagaggcccccccggccccggcgccgccgccgccgcccagcagctgggcctgggcccccccttccccggcccccccttcagcatcctgagcgtgttccccgagagactgggcttctgccagcaccacgacgacgaggtgctgcacctgtactgcgacacctgcagcgtgcccatctgcagagagtgcaccatgggcagacacggcggccacagcttcatctacctgcaggaggccctgcaggacagcagagccctgaccatccagctgctggccgacgcccagcagggcagacaggccatccagctgagcatcgagcaggcccagaccgtggccgagcaggtggagatgaaggccaaggtggtgcagagcgaggtgaaggccgtgaccgccagacacaagaaggccctggaggagagagagtgcgagctgctgtggaaggtggagaagatcagacaggtgaaggccaagagcctgtacctgcaggtggagaagctgagacagaacctgaacaagctggagagcaccatcagcgccgtgcagcaggtgctggaggagggcagagccctggacatcctgctggccagagacagaatgctggcccaggtgcaggagctgaagaccgtgagaagcctgctgcagccccaggaggacgacagagtgatgttcaccccccccgaccaggccctgtacctggccatcaagagcttcggcttcgtgagcagcggcgccttcgcccccctgaccaaggccaccggcgacggcctgaagagagccctgcagggcaaggtggccagcttcaccgtgatcggctacgaccacgacggcgagcccagactgagcggcggcgacctgatgagcgccgtggtgctgggccccgacggcaacctgttcggcgccgaggtgagcgaccagcagaacggcacctacgtggtgagctacagaccccagctggagggcgagcacctggtgagcgtgaccctgtgcaaccagcacatcgagaacagccccttcaaggtggtggtgaagagcggcagaagctacgtgggcatcggcctgcccggcctgagcttcggcagcgagggcgacagcgacggcaagctgtgcagaccctggggcgtgagcgtggacaaggagggctacatcatcgtggccgacagaagcaacaacagaatccaggtgttcaagccctgcggcgccttccaccacaagttcggcaccctgggcagcagacccggccagttcgacagacccgccggcgtggcctgcgacgccagcagaagaatcgtggtggccgacaaggacaaccacagaatccagatcttcaccttcgagggccagttcctgctgaagttcggcgagaagggcaccaagaacggccagttcaactacccctgggacgtggccgtgaacagcgagggcaagatcctggtgagcgacaccagaaaccacagaatccagctgttcggccccgacggcgtgttcctgaacaagtacggcttcgagggcgccctgtggaagcacttcgacagccccagaggcgtggccttcaaccacgagggccacctggtggtgaccgacttcaacaaccacagactgctggtgatccaccccgactgccagagcgccagattcctgggcagcgagggcaccggcaacggccagttcctgagaccccagggcgtggccgtggaccaggagggcagaatcatcgtggccgacagcagaaaccacagagtgcagatgttcgagagcaacggcagcttcctgtgcaagttcggcgcccagggcagcggcttcggccagatggacagacccagcggcatcgccatcacccccgacggcatgatcgtggtggtggacttcggcaacaacagaatcctggtgttctag

SEQ ID NO: 11223 - DNA, 1107 bp, synthetic construct
  source 1..1107: mol_type = other DNA; note = Synthetic coding sequence
atgagagagcccgtgctgacctggtgcgtgcccctggagctgctgtgcagccaccccctgcccctgagcgccttcctgaagagccaggtgaagctgtacacctacagagcctgcgccggcaaggacgagatgggcaagatggtgagcgtgatcaacaccgtggacaccagccacgaggacatgatccacgacgcccagatggactactacggcaccagactggccacctgcagcagcgacagaagcgtgaagatcttcgacgtgagaaacggcggccagatcctgatcgccgacctgagaggccacgagggccccgtgtggcaggtggcctgggcccaccccatgtacggcaacatcctggccagctgcagctacgacagaaaggtgatcatctggagagaggagaacggcacctgggagaagagccacgagcacgccggccacgacagcagcgtgaacagcgtgtgctgggccccccacgactacggcctgatcctggcctgcggcagcagcgacggcgccatcagcctgctgacctacaccggcgagggccagtgggaggtgaagaagatcaacaacgcccacaccatcggctgcaacgccgtgagctgggcccccgccgtggtgcccggcagcctgatcgaccaccccagcggccagaagcccaactacatcaagagattcgccagcggcggctgcgacaacctgatcaagctgtggaaggaggaggaggacggccagtggaaggaggagcagaagctggaggcccacagcgactgggtgagagacgtggcctgggcccccagcatcggcctgcccaccagcaccatcgccagctgcagccaggacggcagagtgttcatctggacctgcgacgacgccagcagcaacacctggagccccaagctgctgcacaagttcaacgacgtggtgtggcacgtgagctggagcatcaccgccaacatcctggccgtgagcggcggcgacaacaaggtgaccctgtggaaggagagcgtggacggccagtgggtgtgcatcagcgacgtgaacaagggccagggcagcgtgagcgccagcgtgaccgagggccagcagaacgagcagtag

SEQ ID NO: 11224 - DNA, 1059 bp, synthetic construct
  source 1..1059: mol_type = other DNA; note = Synthetic coding sequence
atggacatcgacaaggacctggaggcccccctgtacctgacccccgagggctggagcctgttcctgcagagatactaccaggtggtgcacgagggcgccgagctgagacacctggacacccaggtgcagagatgcgaggacatcctgcagcagctgcaggccgtggtgccccagatcgacatggagggcgacagaaacatctggatcgtgaagcccggcgccaagagcagaggcagaggcatcatgtgcatggaccacctggaggagatgctgaagctggtgaacggcaaccccgtggtgatgaaggacggcaagtgggtggtgcagaagtacatcgagagacccctgctgatcttcggcaccaagttcgacctgagacagtggttcctggtgaccgactggaaccccctgaccgtgtggttctacagagacagctacatcagattcagcacccagcccttcagcctgaagaacctggacaacagcgtgcacctgtgcaacaacagcatccagaagcacctggagaacagctgccacagacaccccctgctgccccccgacaacatgtggagcagccagagattccaggcccacctgcaggagatgggcgcccccaacgcctggagcaccatcatcgtgcccggcatgaaggacgccgtgatccacgccctgcagaccagccaggacaccgtgcagtgcagaaaggccagcttcgagctgtacggcgccgacttcgtgttcggcgaggacttccagccctggctgatcgagatcaacgccagccccaccatggcccccagcaccgccgtgaccgccagactgtgcgccggcgtgcaggccgacaccctgagagtggtgatcgacagaatgctggacagaaactgcgacaccggcgccttcgagctgatctacaagcagcccgtgaccaccagccccgccagcacccccagacccagctgcctgctgcccatgtacagcgacaccagagccagaagcagcgacgacagcaccgccagctggtgggccctgagaccctgcagaccccaggccagaccctag

SEQ ID NO: 11225 - DNA, 579 bp, synthetic construct
  source 1..579: mol_type = other DNA; note = Synthetic coding sequence
atgggcaagggctgcaaggtggtggtgtgcggcctgctgagcgtgggcaagaccgccatcctggagcagctgctgtacggcaaccacaccatcggcatggaggactgcgagaccatggaggacgtgtacatggccagcgtggagaccgacagaggcgtgaaggagcagctgcacctgtacgacaccagaggcctgcaggagggcgtggagctgcccaagcactacttcagcttcgccgacggcttcgtgctggtgtacagcgtgaacaacctggagagcttccagagagtggagctgctgaagaaggagatcgacaagttcaaggacaagaaggaggtggccatcgtggtgctgggcaacaagatcgacctgagcgagcagagacaggtggacgccgaggtggcccagcagtgggccaagagcgagaaggtgagactgtgggaggtgaccgtgaccgacagaaagaccctgatcgagcccttcaccctgctggccagcaagctgagccagccccagagcaagagcagcttccccctgcccggcagaaagaacaagggcaacagcaacagcgagaactag

SEQ ID NO: 11226 - DNA, 1419 bp, synthetic construct
  source 1..1419: mol_type = other DNA; note = Synthetic coding sequence
atgagcagaagagtggtgagacagagcaagttcagacacgtgttcggccaggccgccaaggccgaccaggcctacgaggacatcagagtgagcaaggtgacctgggacagcagcttctgcgccgtgaaccccaagttcctggccatcatcgtggaggccggcggcggcggcgccttcatcgtgctgcccctggccaagaccggcagagtggacaagaactaccccctggtgaccggccacaccgcccccgtgctggacatcgactggtgcccccacaacgacaacgtgatcgccagcgccagcgacgacaccaccatcatggtgtggcagatccccgactacacccccatgagaaacatcaccgagcccatcatcaccctggagggccacagcaagagagtgggcatcctgagctggcaccccaccgccagaaacgtgctgctgagcgccggcggcgacaacgtgatcatcatctggaacgtgggcaccggcgaggtgctgctgagcctggacgacatgcaccccgacgtgatccacagcgtgtgctggaacagcaacggcagcctgctggccaccacctgcaaggacaagaccctgagaatcatcgaccccagaaagggccaggtggtggccgagagattcgccgcccacgagggcatgagacccatgagagccgtgttcaccagacagggccacatcttcaccaccggcttcaccagaatgagccagagagagctgggcctgtgggaccccaacaacttcgaggagcccgtggccctgcaggagatggacaccagcaacggcgtgctgctgcccttctacgaccccgacagcagcatcgtgtacctgtgcggcaagggcgacagcagcatcagatacttcgagatcaccgacgagccccccttcgtgcactacctgaacaccttcagcagcaaggagccccagagaggcatgggcttcatgcccaagagaggcctggacgtgagcaagtgcgagatcgccagattctacaagctgcacgagagaaagtgcgagcccatcatcatgaccgtgcccagaaagagcgacctgttccaggacgacctgtaccccgacacccccggccccgagcccgccctggaggccgacgagtggctgagcggccaggacgccgagcccgtgctgatcagcctgagagacggctacgtgccccccaagcacagagagctgagagtgaccaagagaaacatcctggacgtgagaccccccagcggccccagaagaagccagagcgccagcgacgcccccctgagccagcagcacaccctggagaccctgctggaggagatcaaggccctgagagagagagtgcaggcccaggagcagagaatcaccgccctggagaacatgctgtgcgagctggtggacggcaccgactag

SEQ ID NO: 11227 - DNA, 2628 bp, synthetic construct
  source 1..2628: mol_type = other DNA; note = Synthetic coding sequence
atgggcgacagcgacgacgagtacgacagaagaagaagagacaagttcagaagagagagaagcgactacgacagaagcagagagagagacgagagaagaagaggcgacgactggaacgacagagagtgggacagaggcagagagagaagaagcagaggcgagtacagagactacgacagaaacagaagagagagattcagcccccccagacacgagctgagccccccccagaagagaatgagaagagactgggacgagcacagcagcgacccctaccacagcggctacgagatgccctacgccggcggcggcggcggccccacctacggccccccccagccctggggccaccccgacgtgcacatcatgcagcaccacgtgctgcccatccaggccagactgggcagcatcgccgagatcgacctgggcgtgcccccccccgtgatgaagaccttcaaggagttcctgctgagcctggacgacagcgtggacgagaccgaggccgtgaagagatacaacgactacaagctggacttcagaagacagcagatgcaggacttcttcctggcccacaaggacgaggagtggttcagaagcaagtaccaccccgacgaggtgggcaagagaagacaggaggccagaggcgccctgcagaacagactgagagtgttcctgagcctgatggagaccggctggttcgacaacctgctgctggacatcgacaaggccgacgccatcgtgaagatgctggacgccgccgtgatcaagatggagggcggcaccgagaacgacctgagaatcctggagcaggaggaggaggaggagcaggccggcaagcccggcgagcccagcaagaaggaggagggcagagccggcgccggcctgggcgacggcgagagaaagaccaacgacaaggacgagaagaaggaggacggcaagcaggccgagaacgacagcagcaacgacgacaagaccaagaagagcgagggcgacggcgacaaggaggagaagaaggaggacagcgagaaggaggccaagaagagcagcaagaagagaaacagaaagcacagcggcgacgacagcttcgacgagggcagcgtgagcgagagcgagagcgagagcgagagcggccaggccgaggaggagaaggaggaggccgaggccctgaaggagaaggagaagcccaaggaggaggagtgggagaagcccaaggacgccgccggcctggagtgcaagcccagacccctgcacaagacctgcagcctgttcatgagaaacatcgcccccaacatcagcagagccgagatcatcagcctgtgcaagagataccccggcttcatgagagtggccctgagcgagccccagcccgagagaagattcttcagaagaggctgggtgaccttcgacagaagcgtgaacatcaaggagatctgctggaacctgcagaacatcagactgagagagtgcgagctgagccccggcgtgaacagagacctgaccagaagagtgagaaacatcaacggcatcacccagcacaagcagatcgtgagaaacgacatcaagctggccgccaagctgatccacaccctggacgacagaacccagctgtgggccagcgagcccggcaccccccccctgcccaccagcctgcccagccagaaccccatcctgaagaacatcaccgactacctgatcgaggaggtgagcgccgaggaggaggagctgctgggcagcagcggcggcgccccccccgaggagccccccaaggagggcaaccccgccgagatcaacgtggagagagacgagaagctgatcaaggtgctggacaagctgctgctgtacctgagaatcgtgcacagcctggactactacaacacctgcgagtaccccaacgaggacgagatgcccaacagatgcggcatcatccacgtgagaggccccatgccccccaacagaatcagccacggcgaggtgctggagtggcagaagaccttcgaggagaagctgacccccctgctgagcgtgagagagagcctgagcgaggaggaggcccagaagatgggcagaaaggaccccgagcaggaggtggagaagttcgtgaccagcaacacccaggagctgggcaaggacaagtggctgtgccccctgagcggcaagaagttcaagggccccgagttcgtgagaaagcacatcttcaacaagcacgccgagaagatcgaggaggtgaagaaggaggtggccttcttcaacaacttcctgaccgacgccaagagacccgccctgcccgagatcaagcccgcccagccccccggccccgcccagatcctgccccccggcctgacccccggcctgccctacccccaccagaccccccagggcctgatgccctacggccagcccagaccccccatcctgggctacggcgccggcgccgtgagacccgccgtgcccaccggcggccccccctacccccacgccccctacggcgccggcagaggcaactacgacgccttcagaggccagggcggctaccccggcaagcccagaaacagaatggtgagaggcgaccccagagccatcgtggagtacagagacctggacgcccccgacgacgtggacttcttctag

SEQ ID NO: 11228 - DNA, 816 bp, synthetic construct
  source 1..816: mol_type = other DNA; note = Synthetic coding sequence
atggccgccgtggagaagagaagacaggccgtgcccccccccgccggcttcaccgacagcggcagacagagcgtgagcagagccgccggcgccgccgagagcgaggaggacttcctgagacaggtgggcgtgaccgagatgctgagagccgccctgctgaaggtgctggaggccagacccgaggagcccatcgccttcctggcccactacttcgagaacatgggcctgagaagccccgtgaacggcggcgccggcgagccccccggccagctgctgctgcagcagcagagactgggcagagccctgtggcacctgagactggcccaccacagccagagagccgccttcaacaacaacgtgagcgtggcctacgagtgcctgagcgccggcggcagaagaaagagacccggcctggacggcagaacctacagcgagctgctgagaagaatctgcagagacggccaggcccccgaggaggtggtggcccccctgctgagaaaggtgcagtgcagagaccacgaggccgtgcccctgagcgtgttcagagccggcaccctgacctgcttcgtgctgctggagttcgtggccagagccggcgccctgttccagctgctggaggacagcgccgccgccgtggccgacagaagagtgggccaggccgtgctggacaccctggagggcgccctgcaggccagcgacgccgccgcccccgccagattcctggaggccggcagcagactggcccccatgaccagagaggagttcctggagagagccgccgccctgttcatcgccaaggtgaagcccgtgggctag

SEQ ID NO: 11229 - DNA, 1977 bp, synthetic construct
  source 1..1977: mol_type = other DNA; note = Synthetic coding sequence
atgggcggccacctgagcccctggcccacctacaccagcggccagaccatcctgcagaacagaaagccctgcagcgacgactacagaaagagagtgggcagctgccagcagcaccccttcagaaccgccaagccccagtacctggaggagctggagaactacctgagaaaggagctgctgctgctggacctgggcaccgacagcacccaggagctgagactgcagccctacagagagatcttcgagttcttcatcgaggacttcaagacctacaagcccctgctgagcagcatcaagaacgcctacgagggcatgctggcccaccagagagagaagatcagagccctggagcccctgaaggccaagctggtgaccgtgaacgaggactgcaacgagagaatcctggccatgagagccgaggagaagtacgagatcagcctgctgaagaaggagaagatgaacctgctgaagctgatcgacaagaagaacgaggagaagatcagcctgcagagcgaggtgaccaagctgagaaagaacctggccgaggagtacctgcactacctgagcgagagagacgcctgcaagatcctgatcgccgacctgaacgagctgagataccagagagaggacatgagcctggcccagagccccggcatctggggcgaggaccccgtgaagctgaccctggccctgaagatgaccagacaggacctgaccagaacccagatggagctgaacaacatgaaggccaacttcggcgacgtggtgcccagaagagacttcgagatgcaggagaagaccaacaaggacctgcaggagcagctggacaccctgagagccagctacgaggaggtgagaaaggagcacgagatcctgatgcagctgcacatgagcaccctgaaggagagagaccagttcttcagcgagctgcaggagatccagagaaccagcacccccagacccgactggaccaagtgcaaggacgtggtggccggcggccccgagagatggcagatgctggccgagggcaagaacagcgaccagctggtggacgtgctgctggaggagatcggcagcggcctgctgagagagaaggacttcttccccggcctgggctacggcgaggccatccccgccttcctgagattcgacggcctggtggagaacaagaagcccagcaagaaggacgtggtgaacctgctgaaggacgcctggaaggagagactggccgaggagcagaaggagaccttccccgacttcttcttcaacttcctggagcacagattcggccccagcgacgccatggcctgggcctacaccatcttcgagaacatcaagatcttccacagcaacgaggtgatgagccagttctacgccgtgctgatgggcaagagaagcgagaacgtgtacgtgacccagaaggagaccgtggcccagctgctgaaggagatgaccaacgccgacagccagaacgagggcctgctgaccatggagcagttcaacaccgtgctgaagagcaccttccccctgaagaccgaggagcagatccaggagctgatggaggccggcggctggcaccccagcagcagcaacgccgacctgctgaactacagaagcctgttcatggaggacgaggagggccagagcgagcccttcgtgcagaagctgtgggagcagtacatggacgagaaggacgagtacctgcagcagctgaagcaggagctgggcatcgagctgcacgaggaggtgaccctgcccaagctgagaggcggcctgatgaccatcgaccccagcctggacaagcagaccgtgaacacctacatgagccaggccttccagctgcccgagagcgagatgcccgaggagggcgacgagaaggaggaggccgtggtggagatcctgcagaccgccctggagagactgcaggtgatcgacatcagaagagtgggccccagagagcccgagcccgccagctag

SEQ ID NO: 11230 - DNA, 1287 bp, synthetic construct
  source 1..1287: mol_type = other DNA; note = Synthetic coding sequence
atggagcccctgaaggtggagaagttcgccaccgccaagagaggcaacggcctgagagccgtgacccccctgagacccggcgagctgctgttcagaagcgaccccctggcctacaccgtgtgcaagggcagcagaggcgtggtgtgcgacagatgcctgctgggcaaggagaagctgatgagatgcagccagtgcagagtggccaagtactgcagcgccaagtgccagaagaaggcctggcccgaccacaagagagagtgcaagtgcctgaagagctgcaagcccagatacccccccgacagcgtgagactgctgggcagagtggtgttcaagctgatggacggcgcccccagcgagagcgagaagctgtacagcttctacgacctggagagcaacatcaacaagctgaccgaggacaagaaggagggcctgagacagctggtgatgaccttccagcacttcatgagagaggagatccaggacgccagccagctgccccccgccttcgacctgttcgaggccttcgccaaggtgatctgcaacagcttcaccatctgcaacgccgagatgcaggaggtgggcgtgggcctgtaccccagcatcagcctgctgaaccacagctgcgaccccaactgcagcatcgtgttcaacggcccccacctgctgctgagagccgtgagagacatcgaggtgggcgaggagctgaccatctgctacctggacatgctgatgaccagcgaggagagaagaaagcagctgagagaccagtactgcttcgagtgcgactgcttcagatgccagacccaggacaaggacgccgacatgctgaccggcgacgagcaggtgtggaaggaggtgcaggagagcctgaagaagatcgaggagctgaaggcccactggaagtgggagcaggtgctggccatgtgccaggccatcatcagcagcaacagcgagagactgcccgacatcaacatctaccagctgaaggtgctggactgcgccatggacgcctgcatcaacctgggcctgctggaggaggccctgttctacggcaccagaaccatggagccctacagaatcttcttccccggcagccaccccgtgagaggcgtgcaggtgatgaaggtgggcaagctgcagctgcaccagggcatgttcccccaggccatgaagaacctgagactggccttcgacatcatgagagtgacccacggcagagagcacagcctgatcgaggacctgatcctgctgctggaggagtgcgacgccaacatcagagccagctag

SEQ ID NO: 11231 - DNA, 1122 bp, synthetic construct
  source 1..1122: mol_type = other DNA; note = Synthetic coding sequence
atgagcagcggcaactaccagcagagcgaggccctgagcaagcccaccttcagcgaggagcaggccagcgccctggtggagagcgtgttcggcctgaaggtgagcaaggtgagacccctgcccagctacgacgaccagaacttccacgtgtacgtgagcaagaccaaggacggccccaccgagtacgtgctgaagatcagcaacaccaaggccagcaagaaccccgacctgatcgaggtgcagaaccacatcatcatgttcctgaaggccgccggcttccccaccgccagcgtgtgccacaccaagggcgacaacaccgccagcctggtgagcgtggacagcggcagcgagatcaagagctacctggtgagactgctgacctacctgcccggcagacccatcgccgagctgcccgtgagcccccagctgctgtacgagatcggcaagctggccgccaagctggacaagaccctgcagagattccaccaccccaagctgagcagcctgcacagagagaacttcatctggaacctgaagaacgtgcccctgctggagaagtacctgtacgccctgggccagaacagaaacagagagatcgtggagcacgtgatccacctgttcaaggaggaggtgatgaccaagctgagccacttcagagagtgcatcaaccacggcgacctgaacgaccacaacatcctgatcgagagcagcaagagcgccagcggcaacgccgagtaccaggtgagcggcatcctggacttcggcgacatgagctacggctactacgtgttcgaggtggccatcaccatcatgtacatgatgatcgagagcaagagccccatccaggtgggcggccacgtgctggccggcttcgagagcatcacccccctgaccgccgtggagaagggcgccctgttcctgctggtgtgcagcagattctgccagagcctggtgatggccgcctacagctgccagctgtaccccgagaacaaggactacctgatggtgaccgccaagaccggctggaagcacctgcagcagatgttcgacatgggccagaaggccgtggaggagatctggttcgagaccgccaagagctacgagagcggcatcagcatgtag

SEQ ID NO: 11232 - DNA, 2766 bp, synthetic construct
  source 1..2766: mol_type = other DNA; note = Synthetic coding sequence
atggccctgctgtgcggcctgggccaggtgaccctgagaatctgggtgagcctgcccagccagagcgagaacggcatcggcagcggcggcatggaggccctgaccacccagctgggccccggcagagagggcagcagcagccccaacagcaagcaggagctgcagccctacagcggcagcagcgccctgaagcccaaccaggtgggcgagaccagcctgtacggcgtgcccatcgtgagcctggtgatcgacggccaggagagactgtgcctggcccagatcagcaacaccctgctgaagaactacagctacaacgagatccacaacagaagagtggccctgggcatcacctgcgtgcagtgcacccccgtgcagctggagatcctgagaagagccggcgccatgcccatcagcagcagaagatgcggcatgatcaccaagagagaggccgagagactgtgcaagagcttcctgggcgagcacaagccccccaagctgcccgagaacttcgccttcgacgtggtgcacgagtgcgcctggggcagcagaggcagcttcatccccgccagatacaacagcagcagagccaagtgcatcaagtgcggctactgcagcatgtacttcagccccaacaagttcatcttccacagccacagaacccccgacgccaagtacacccagcccgacgccgccaacttcaacagctggagaagacacctgaagctgagcgacaagagcgccaccgacgagctgagccacgcctgggaggacgtgaaggccatgttcaacggcggcaccagatgcggcgccgagatggcccccggcccccccccccacaagagcctgagatgcggcgaggacgaggccgccggcccccccggccccccccccccccacccccagagaggcctgggcctggccaccggcgccagcggccccgccggccccggcggccccggcggcggcgccggcgtgagaagctaccccgtgatccccgtgcccagcaagggcttcggcctgctgcagaagctgcccccccccctgttcccccacccctacggcttccccaccgccttcggcctgtgccccaagaaggacgaccccgtgctgggcgccggcgagcccaagggcggccccggcaccggcagcggcggcggcggcgccggcaccggcggcggcgccggcggccccggcgccagccacctgccccccggcgccggcgccggccccggcggcggcgccatgttctggggccaccagcccagcggcgccgccaaggacgccgccgccgtggccgccgccgccgccgccgccaccgtgtaccccaccttccccatgttctggcccgccgccggcagcctgcccgtgcccagctaccccgccgcccagagccaggccaaggccgtggccgccgccgtggccgccgccgccgccgccgccgccgccgccgccggcagcggcgcccccgagcccctggacggcgccgagcccgccaaggagagcggcctgggcgccgaggagagatgccccagcgccctgagcagaggccccctggacgaggacggcaccgacgaggccctgcccccccccctggcccccctgcccccccccccccccccccccgccagaaagggcagctacgtgagcgccttcagacccgtggtgaaggacaccgagagcatcgccaagctgtacggcagcgccagagaggcctacggcgccggccccgccagaggccccggccccggcgccggcagcggcggctacgtgagccccgacttcctgagcgagggcagcagcagctacaacagcgccagccccgacgtggacaccgccgacgagcccgaggtggacgtggagagcaacagattccccgacgacgaggacgcccaggaggagaccgagcccagcgcccccagcgccggcggcggccccgacggcgagcagcccaccggcccccccagcgccaccagcagcggcgccgacggccccgccaacagccccgacggcggcagccccagacccagaagaagactgggccccccccccgccggcagacccgccttcggcgacctggccgccgaggacctggtgagaagacccgagagaagcccccccagcggcggcggcggctacgagctgagagagccctgcggccccctgggcggccccgcccccgccaaggtgttcgcccccgagagagacgagcacgtgaagagcgccgccgtggccctgggccccgccgccagctacgtgtgcacccccgaggcccacgagcccgacaaggaggacaaccacagccccgccgacgacctggagaccagaaagagctaccccgaccagagaagcatcagccagcccagccccgccaacaccgacagaggcgaggacggcctgaccctggacgtgaccggcacccacctggtggagaaggacatcgagaacctggccagagaggagctgcagaagctgctgctggagcagatggagctgagaaagaagctggagagagagttccagagcctgaaggacaacttccaggaccagatgaagagagagctggcctacagagaggagatggtgcagcagctgcagatcgtgagagacaccctgtgcaacgagctggaccaggagagaaaggccagatacgccatccagcagaagctgaaggaggcccacgacgccctgcaccacttcagctgcaagatgctgacccccagacactgcaccggcaactgcagcttcaagccccccctgctgccctag

SEQ ID NO: 11233 - DNA, 1395 bp, synthetic construct
  source 1..1395: mol_type = other DNA; note = Synthetic coding sequence
atggccatgaccgccggcaccaccaccaccttccccatgagcaaccacaccagagagagagtgaccgtggccaagctgaccctggagaacttctacagcaacctgatcctgcagcacgaggagagagagaccagacagaagaagctggaggtggccatggaggaggagggcctggccgacgaggagaagaagctgagaagaagccagcacgccagaaaggagaccgagttcctgagactgaagagaaccagactgggcctggacgacttcgagagcctgaaggtgatcggcagaggcgccttcggcgaggtgagactggtgcagaagaaggacaccggccacatctacgccatgaagatcctgagaaagagcgacatgctggagaaggagcaggtggcccacatcagagccgagagagacatcctggtggaggccgacggcgcctgggtggtgaagatgttctacagcttccaggacaagagaaacctgtacctgatcatggagttcctgcccggcggcgacatgatgaccctgctgatgaagaaggacaccctgaccgaggaggagacccagttctacatcagcgagaccgtgctggccatcgacgccatccaccagctgggcttcatccacagagacatcaagcccgacaacctgctgctggacgccaagggccacgtgaagctgagcgacttcggcctgtgcaccggcctgaagaaggcccacagaaccgagttctacagaaacctgacccacaacccccccagcgacttcagcttccagaacatgaacagcaagagaaaggccgagacctggaagaagaacagaagacagctggcctacagcaccgtgggcacccccgactacatcgcccccgaggtgttcatgcagaccggctacaacaagctgtgcgactggtggagcctgggcgtgatcatgtacgagatgctgatcggctacccccccttctgcagcgagaccccccaggagacctacagaaaggtgatgaactggaaggagaccctggtgttcccccccgaggtgcccatcagcgagaaggccaaggacctgatcctgagattctgcatcgacagcgagaacagaatcggcaacagcggcgtggaggagatcaagggccaccccttcttcgagggcgtggactgggagcacatcagagagagacccgccgccatccccatcgagatcaagagcatcgacgacaccagcaacttcgacgacttccccgagagcgacatcctgcagcccgtgcccaacaccaccgagcccgactacaagagcaaggactgggtgttcctgaactacacctacaagagattcgagggcctgacccagagaggcagcatccccacctacatgaaggccggcaagctgtag

SEQ ID NO: 11234 - DNA, 3951 bp, synthetic construct
  source 1..3951: mol_type = other DNA; note = Synthetic coding sequence
atggccagcaagggcgccggcatgagcttcagcagaaagagctacagactgaccagcgacgccgagaagagcagagtgaccggcatcgtgcaggagaagctgctgaacgactacctgaacagaatcttcagcagcagcgagcacgccccccccgccgccaccagcagaaagcccctgaacttccagaacctgcccgagcacctggaccagctgctgcaggtggacaacgaggaggaggagagccagggccaggtggagggcagactgggccccagcaccgtggtgctggaccacaccggcggcttcgagggcctgctgctggtggacgacgacctgctgggcgtgatcggccacagcaacttcggcaccatcagaagcaccacctgcgtgtacaagggcaagtggctgtacgaggtgctgatcagcagccagggcctgatgcagatcggctggtgcaccatcagctgcagattcaaccaggaggagggcgtgggcgacacccacaacagctacgcctacgacggcaacagagtgagaaagtggaacgtgaccaccaccaactacggcaaggcctgggccgccggcgacatcgtgagctgcctgatcgacctggacgacggcaccctgagcttctgcctgaacggcgtgagcctgggcaccgccttcgagaacctgagcagaggcctgggcatggcctacttccccgccatcagcctgagcttcaaggagagcgtggccttcaacttcggcagcagacccctgagataccccgtggccggctacagacccctgcaggacccccccagcgccgacctggtgagagcccagagactgctgggctgcttcagagccgtgctgagcgtggagctggaccccgtggagggcagactgctggacaaggagagcagcaagtggagactgagaggccagcccaccgtgctgctgaccctggcccacatcttccaccacttcgcccccctgctgagaaaggtgtacctggtggaggccgtgctgatgagcttcctgctgggcatcgtggagaagggcacccccacccaggcccagagcgtggtgcaccaggtgctggacctgctgtggctgttcatggaggactacgaggtgcaggactgcctgaagcagctgatgatgagcctgctgagactgtacagattcagccccatcgtgcccgacctgggcctgcagatccactacctgagactgaccatcgccatcctgagacacgagaagagcagaaagttcctgctgagcaacgtgctgttcgacgtgctgagaagcgtggtgttcttctacatcaagagccccctgagagtggaggaggccggcctgcaggagctgatccccaccacctggtggccccactgcagcagcagagagggcaaggagagcaccgagatgaaggaggagaccgccgaggagagactgagaagaagagcctacgagagaggctgccagagactgagaaagagaatcgaggtggtggaggagctgcaggtgcagatcctgaagctgctgctggacaacaaggacgacaacggcggcgaggccagcagatacatcttcctgaccaagttcagaaagttcctgcaggagaacgccagcggcagaggcaacatgcccatgctgtgcccccccgagtacatggtgtgcttcctgcacagactgatcagcgccctgagatactactgggacgagtacaaggccagcaacccccacgccagcttcagcgaggaggcctacatccccccccaggtgttctacaacggcaaggtggactacttcgacctgcagagactgggcggcctgctgagccacctgagaaagaccctgaaggacgacctggccagcaaggccaacatcgtgatcgaccccctggagctgcagagcaccgccatggacgacctggacgaggacgaggagcccgcccccgccatggcccagagacccatgcaggccctggccgtgggcggccccctgcccctgcccagacccggctggctgagcagccccaccctgggcagagccaacagattcctgagcaccgccgccgtgagcctgatgacccccagaagacccctgagcaccagcgagaaggtgaaggtgagaaccctgagcgtggagcagagaaccagagaggacatcgagggcagccactggaacgagggcctgctgctgggcagaccccccgaggagcccgagcagcccctgaccgagaacagcctgctggaggtgctggacggcgccgtgatgatgtacaacctgagcgtgcaccagcagctgggcaagatggtgggcgtgagcgacgacgtgaacgagtacgccatggccctgagagacaccgaggacaagctgagaagatgccccaagagaagaaaggacatcctggccgagctgaccaagagccagaaggtgttcagcgagaagctggaccacctgagcagaagactggcctgggtgcacgccaccgtgtacagccaggagaagatgctggacatctactggctgctgagagtgtgcctgagaaccatcgagcacggcgacagaaccggcagcctgttcgccttcatgcccgagttctacctgagcgtggccatcaacagctacagcgccctgaagaactacttcggccccgtgcacagcatggaggagctgcccggctacgaggagaccctgaccagactggccgccatcctggccaagcacttcgccgacgccagaatcgtgggcaccgacatcagagacagcctgatgcaggccctggccagctacgtgtgctacccccacagcctgagagccgtggagagaatccccgaggagcagagaatcgccatggtgagaaacctgctggccccctacgagcagagaccctgggcccagaccaactggatcctggtgagactgtggagaggctgcggcttcggctacagatacaccagactgccccacctgctgaagaccaagctggaggacgccaacctgcccagcctgcagaagccctgccccagcaccctgctgcagcagcacatggccgacctgctgcagcagggccccgacgtggcccccagcttcctgaacagcgtgctgaaccagctgaactgggccttcagcgagttcatcggcatgatccaggagatccagcaggccgccgagagactggagagaaacttcgtggacagcagacagctgaaggtgtgcgccacctgcttcgacctgagcgtgagcctgctgagagtgctggagatgaccatcaccctggtgcccgagatcttcctggactggaccagacccaccagcgagatgctgctgagaagactggcccagctgctgaaccaggtgctgaacagagtgaccgccgagagaaacctgttcgacagagtggtgaccctgagactgcccggcctggagagcgtggaccactaccccatcctggtggccgtgaccggcatcctggtgcagctgctggtgagaggccccgccagcgagagagagcaggccaccagcgtgctgctggccgacccctgcttccagctgagaagcatctgctacctgctgggccagcccgagccccccgcccccggcaccgccctgcccgcccccgacagaaagagattcagcctgcagagctacgccgactacatcagcgccgacgagctggcccaggtggagcagatgctggcccacctgaccagcgccagcgcccaggccgccgccgccagcctgcccaccagcgaggaggacctgtgccccatctgctacgcccaccccatcagcgccgtgttccagccctgcggccacaagagctgcaaggcctgcatcaaccagcacctgatgaacaacaaggactgcttcttctgcaagaccaccaccagcaacctgctggcctgcctgtacccccactggtgggagcccagccacggccccaactgcgcctag

SEQ ID NO: 11235 - DNA, 2043 bp, synthetic construct
  source 1..2043: mol_type = other DNA; note = Synthetic coding sequence
atgcccagcgtgagcaaggccgccgccgccgccctgagcggcagccccccccagaccgagaagcccacccactacagatacctgaaggagttcagaaccgagcagtgccccctgttcagccagcacaagtgcgcccagcacagacccttcacctgcttccactggcacttcctgaaccagagaagaagaagacccctgagaagaagagacggcaccttcaactacagccccgacgtgtactgcagcaagtacaacgaggccaccggcgtgtgccccgacggcgacgagtgcccctacctgcacagaaccaccggcgacaccgagagaaagtaccacctgagatactacaagaccggcacctgcatccacgagaccgacgccagaggccactgcgtgaagaacggcctgcactgcgccttcgcccacggccccctggacctgagaccccccgtgtgcgacgtgagagagctgcaggcccaggaggccctgcagaacggccagctgggcggcggcgagggcgtgcccgacctgcagcccggcgtgctggccagccaggccatgatcgagaagatcctgagcgaggaccccagatggcaggacgccaacttcgtgctgggcagctacaagaccgagcagtgccccaagccccccagactgtgcagacagggctacgcctgcccccactaccacaacagcagagacagaagaagaaaccccagaagattccagtacagaagcaccccctgccccagcgtgaagcacggcgacgagtggggcgagcccagcagatgcgacggcggcgacggctgccagtactgccacagcagaaccgagcagcagttccaccccgagagcaccaagtgcaacgacatgagacagaccggctactgccccagaggccccttctgcgccttcgcccacgtggagaagagcctgggcatggtgaacgagtggggctgccacgacctgcacctgaccagccccagcagcaccggcagcggccagcccggcaacgccaagagaagagacagccccgccgagggcggccccagaggcagcgagcaggacagcaagcagaaccacctggccgtgttcgccgccgtgcacccccccgcccccagcgtgagcagcagcgtggccagcagcctggccagcagcgccggcagcggcagcagcagccccaccgccctgcccgccccccccgccagagccctgcccctgggccccgccagcagcaccgtggaggccgtgctgggcagcgccctggacctgcacctgagcaacgtgaacatcgccagcctggagaaggacctggaggagcaggacggccacgacctgggcgccgccggccccagaagcctggccggcagcgcccccgtggccatccccggcagcctgcccagagcccccagcctgcacagccccagcagcgccagcaccagccccctgggcagcctgagccagcccctgcccggccccgtgggcagcagcgccatgacccccccccagcagcccccccccctgagaagcgagcccggcaccctgggcagcgccgccagcagctacagccccctgggcctgaacggcgtgcccggcagcatctgggacttcgtgagcggcagcttcagccccagccccagccccatcctgagcgccggcccccccagcagcagcagcgccagccccaacggcgccgagctggccagagtgagaagacagctggacgaggccaagagaaagatcagacagtgggaggagagctggcagcaggtgaagcaggtgtgcgacgcctggcagagagaggcccaggaggccaaggagagagccagagtggccgacagcgacagacagctggccctgcagaagaaggaggaggtggaggcccaggtgatcttccagctgagagccaagcagtgcgtggcctgcagagagagagcccacggcgccgtgctgagaccctgccagcaccacatcctgtgcgagccctgcgccgccaccgcccccgagtgcccctactgcaagggccagcccctgcagtggtag

SEQ ID NO: 11236 - DNA, 462 bp, synthetic construct
  source 1..462: mol_type = other DNA; note = Synthetic coding sequence
atgagcagccccctggccagcctgagcaagaccagaaaggtgcccctgcccagcgagcccatgaaccccggcagaagaggcatcagaatctacggcgacgtgcccgccagccacgacagcgagctgatggccttcatgaccagaaagctgtgggacctggagcagcaggtgaaggcccagaccgacgagatcctgagcaaggaccagaagatcgccgccctggaggacctggtgcagaccctgagaccccaccccgccgaggccaccctgcagagacaggaggagctggagaccatgtgcgtgcagctgcagagacaggtgagagagatggagagattcctgagcgactacggcctgcagtgggtgggcgagcccatggaccaggaggacagcgagagcaagaccgtgagcgagcacggcgagagagactggatgaccgccaagaagttctggaagccctag

SEQ ID NO: 11237 - DNA, 2382 bp, synthetic construct
  source 1..2382: mol_type = other DNA; note = Synthetic coding sequence
atgggccagtgctacaacctggaggacgacgacctggagaccgacgtgaacaagctgagcagcaagcccggcctggacagacccgaggaggagctgatgcagtacgaggtgatgtgcctggagctgagctacagcttcgaggagctgcagagcaagctgggcgacgacctgaacagcgagaagacccagtacgccaaccaccaccacatccccgccgccgccagcagcaagcagcactgctacagcaaggaccagagcagctgcggccaggagagagagtacgccgtgcagaccagcctgctgtgcagagtgaagaccggcagaagcaccgtgcacctgggcagcaagaagaaccccggcgtgaacctgtaccagaacgtgcagagcaacagcctgagaagagacagcagcgagagcgagatccccgacatccaggccagccccaaggccgacgcctgggacgtggacgccatcttctgccccagaatgagcgccagcttcagcaacagcaccagaaccagagaggtggtgaaggtgatcgacaagctgctgcagacccacctgaagagagtgcccttccacgacccctacctgtacatggccaaggccagaagaaccagcagcgtggtggacttcaagatgatggccttccccgacgtgtggggccactgccccccccccaccacccagcccatgctggagagaaagtgcggcgtgcagagaatcagaatcttcgaggacatcagaagactgatccagcccagcgacgtgatcaacaaggtggtgttcagcctggacgagccctggcccctgcaggacaacgccagcaactgcctgagattcttcagcaagttcgagagcggcaacctgagaaaggccatccaggtgagagagttcgagtacgacctgctggtgaacgccgacgtgaacagcacccagcaccagcagtggttctacttcaaggtgagcggcatgcaggccgccatcccctaccacttcaacatcatcaactgcgagaagcccaacagccagttcaactacggcatgcagcccaccctgtacagcgtgaaggaggccctgctgggcaagcccacctggatcagaaccggccacgagatctgctactacaagaaccactacagacagagcaccgccgtggccggcggcgccagcggcaagtgctactacaccctgaccttcgccgtgaccttcccccacagcgaggacgtgtgctacctggcctaccactacccctacacctacaccgccctgatgacccacctggacatcctggagaagagcgtgaacctgaaggaggtgtacttcagacaggacgtgctgtgccagaccctgggcggcaacccctgccccctggtgaccatcaccgccatgcccgagagcaacagcgacgagcacctggagcagttcagacacagaccctaccaggtgatcaccgccagagtgcaccccggcgagagcaacgccagctgggtgatgaagggcaccctggagttcctggtgagcagcgaccccgtggccagactgctgagagagaacttcatcttcaagatcatccccatgctgaaccccgacggcgtgatcaacggcaaccacagatgcagcctgagcggcgaggacctgaacagacagtggctgagccccagcgcccacctgcagcccaccatctaccacgccaagggcctgctgtaccacctgagcagcatcggcagaagccccgtggtgttctgcgacttccacggccacagccagaagaagaacgtgttcctgtacggctgcagcatcaaggagaccctgtggcaggccgcctgcaccgtgggcaccagcaccatcctggaggaggtgaactacagaaccctgcccaagatcctggacaagctggcccccgccttcaccatgagcagctgcagcttcctggtggagaagagcagagccagcaccgccagagtggtggtgtggagagagatgggcgtgagcagaagctacaccatggagagcagctactgcggctgcaaccagggcccctaccagtgcacccagagactgctggagagaaccaagaacgagagagcccaccccgtggacggcctgcagggcctgcagttcggcaccagagagctggaggagatgggcgccatgttctgcctgggcctgctgatcctggagctgaagagcgccagctgcagccaccagctgctggcccaggccgccaccctgctgagcgccgaggaggacgccctggaccagcacctgcagagactgaagagcagcaacttcctgcccaagcacatctggttcgcctaccacttcttcgccatcaccaacttcttcaagatgaacctgctgctgcacgtgagcccctag

SEQ ID NO: 11238 - DNA, 153 bp, synthetic construct
  source 1..153: mol_type = other DNA; note = Synthetic coding sequence
atgatgcagaacgtgcacctggcccccgagaccgacgaggacgacctgtacagcggctacaacgactacaaccccatctacgacatcgaggagctggagaacgacgccgccttccagcaggccgtgagaaccagccacggcagaagaccctag

SEQ ID NO: 11239 - DNA, 1299 bp, synthetic construct
  source 1..1299: mol_type = other DNA; note = Synthetic coding sequence
atgaccgccgtgagagccgccggcttcaccaaggccgccctgagaggcagcgccttcgaccccctgagccagagcagaggccccgccagccccctggaggccaagaagaaggacagccccgaggagaagatcaagcagctggagaaggaggtgaacgagctggtggaggagagctgcatcgccaacagctgcggcgacctgaagctggccctggagaaggccaaggacgccggcagaaaggagagagtgctggtgagacagagagagcaggtgaccacccccgagaacatcaacctggacctgacctacagcgtgctgttcaacctggccagccagtacagcgtgaacgagatgtacgccgaggccctgaacacctaccaggtgatcgtgaagaacaagatgttcagcaacgccggcatcctgaagatgaacatgggcaacatctacctgaagcagagaaactacagcaaggccatcaagttctacagaatggccctggaccaggtgcccagcgtgaacaagcagatgagaatcaagatcatgcagaacatcggcgtgaccttcatccaggccgacagagagaagatgaagaaggccttccagaagctgatcaccgtgcccctggagatcgacgaggacaagtacatcagccccagcgacgacccccacaccaacctggtgaccgaggccatcaagaacgaccacctgagacagatggagagagagagaaaggccatggccgagaagtacatcatgaccagcgccaagctgatcgcccccgtgatcgagaccagcttcgccgccggctacgactggtgcgtggaggtggtgaaggccagccagtacgtggagctggccaacgacctggagatcaacaaggccgtgacctacctgagacagaaggactacaaccaggccgtggagatcctgaaggtgctggagaagaaggacagcagagtgaagagcgccgccgccaccaacctgagcgccctgtactacatgggcaaggacttcgcccaggccagcagctacgccgacatcgccgtgaacagcgacagatacaaccccgccgccctgaccaacaagggcaacaccgtgttcgccaacggcgactacgagaaggccgccgagttctacaaggaggccctgagaaacgacagcagctgcaccgaggccctgtacaacatcggcctgacctacgagaagctgaacagactggacgaggccctggactgcttcctgaagctgcacgccatcctgagaaacagcgccgaggtgctgtaccagatcgccaactag

SEQ ID NO: 11240 - DNA, 387 bp, synthetic construct
  source 1..387: mol_type = other DNA; note = Synthetic coding sequence
atggccgccgccgccgccgagcagcagcagttctacctgctgctgggcaacctgctgagccccgacaacgtggtgagaaagcaggccgaggccagacagatggccgccgtgctgctgagaagactgctgagcagcgccttcgacgaggtgtaccccgccctgcccagcgacgtgcagaccgccatcaagagcgagctgctgatgatcatccagatggagacccagagcagcatgagaaagaaggtgtgcgacatcgccgccgagctggccagaaacctgatcgacgaggacggcaacaaccagtggcccgagggcctgaagttcctgttcgacagcgtgagcagccagaacgtgggcctgagagaggccgccctgcacatcttctag

SEQ ID NO: 11241 - DNA, 2766 bp, synthetic construct
  source 1..2766: mol_type = other DNA; note = Synthetic coding sequence
atgagacccgagggcgccggcatggagctgggcggcggcgaggagagactgcccgaggagagcagaagagagcactggcagctgctgggcaacctgaagaccaccgtggagggcctggtgagcaccaacagccccaacgtgtggagcaagtacggcggcctggagagactgtgcagagacatgcagagcatcctgtaccacggcctgatcagagaccaggcctgcagaagacagaccgactactggcagttcgtgaaggacatcagatggctgagcccccacagcgccctgcacgtggagaagttcatcagcgtgcacgagaacgaccagagcagcgccgacggcgccagcgagagagccgtggccgagctgtggctgcagcacagcctgcagtaccactgcctgagcgcccagctgagacccctgctgggcgacagacagtacatcagaaagttctacaccgacgccgccttcctgctgagcgacgcccacgtgaccgccatgctgcagtgcctggaggccgtggagcagaacaaccccagactgctggcccagatcgacgccagcatgttcgccagaaagcacgagagccccctgctggtgaccaagagccagagcctgaccgccctgcccagcagcacctacaccccccccaacagctacgcccagcacagctacttcggcagcttcagcagcctgcaccagagcgtgcccaacaacggcagcgagagaagaagcaccagcttccccctgagcggcccccccagaaagccccaggagagcagaggccacgtgagccccgccgaggaccagaccatccaggccccccccgtgagcgtgagcgccctggccagagacagccccctgacccccaacgagatgagcagcagcaccctgaccagccccatcgaggccagctgggtgagcagccagaacgacagccccggcgacgccagcgagggccccgagtacctggccatcggcaacctggaccccagaggcagaaccgccagctgccagagccacagcagcaacgccgagagcagcagcagcaacctgttcagcagcagcagcagccagaagcccgacagcgccgccagcagcctgggcgaccaggagggcggcggcgagagccagctgagcagcgtgctgagaagaagcagcttcagcgagggccagaccctgaccgtgaccagcggcgccaagaagagccacatcagaagccacagcgacaccagcatcgccagcagaggcgcccccgagagctgcaacgacaaggccaagctgagaggccccctgccctacagcggccagagcagcgaggtgagcacccccagcagcctgtacatggagtacgagggcggcagatacctgtgcagcggcgagggcatgttcagaagacccagcgagggccagagcctgatcagctacctgagcgagcaggacttcggcagctgcgccgacctggagaaggagaacgcccacttcagcatcagcgagagcctgatcgccgccatcgagctgatgaagtgcaacatgatgagccagtgcctggaggaggaggaggtggaggaggaggacagcgacagagagatccaggagctgaagcagaagatcagactgagaagacagcagatcagaaccaagaacctgctgcccatgtaccaggaggccgagcacggcagcttcagagtgaccagcagcagcagccagttcagcagcagagacagcgcccagctgagcgacagcggcagcgccgacgaggtggacgagttcgagatccaggacggcagcgagggcagcaacctgacccacatcagcaagaacggcctgagcgtgagcctggccagcatgttcagcgacgccgacatcagaagaaacaccgccagcagcagcaagagcttcgtgagcagccagagcttcagccactgcttcctgcacagcaccagcgccgaggccgtggccatgggcctgctgaagcagttcgagggcatgcagctgcccgccgccagcgagctggagtggctggtgcccgagcacgacgccccccagaagctgctgcccatccccgacagcctgcccatcagccccgacgacggccagcacgccgacatctacaagctgagaatcagagtgagaggcaacctggagtgggccccccccagaccccagatcatcttcaacgtgcaccccgcccccaccagaaagatcgccgtggccaagcagaactacagatgcgccggctgcggcatcagaaccgaccccgactacatcaagagactgagatactgcgagtacctgggcaagtacttctgccagtgctgccacgagaacgcccagatggccatccccagcagagtgctgagaaagtgggacttcagcaagtactacgtgagcaacttcagcaaggacctgctgatcaagatctggaacgaccccctgttcaacgtgcaggacatcaacagcgccctgtacagaaaggtgaagctgctgaaccaggtgagactgctgagagtgcagctgtgccacatgaagaacatgttcaagacctgcagactggccaaggagctgctggacagcttcgacaccgtgcccggccacctgaccgaggacctgcacctgtacagcctgaacgacctgaccgccaccagaaagggcgagctgggccccagactggccgagctgaccagagccggcgccacccacgtggagagatgcatggtgagaaagagccactgcagcatgcagctgagcccctgcttctag

SEQ ID NO: 11242 - DNA, 1644 bp, synthetic construct
  source 1..1644: mol_type = other DNA; note = Synthetic coding sequence
atgagagccctgaccgtgcagagagtgaagttcgccatggacctgcccctgctgaagagagccggccaggacctggccgagaagaccaagaacttcgtgagcagaagcctggtgatcggcgaggtgctgagcatggccgacatggccaccggcgtgaagtgcggcatcatctactggctgttcggcggcgccatcagaaacctgggcagccccgagcacgtgaccaagtggttccagcccctgcaggagcagaagtacaccggcatgttcgccatgaccgagagaggccacggcagcaacgccagaggcatccagaccgaggccaccttcgacctgagcgcccaggagttcgtgatcgacaccccctgcgagaacgccgagaagatgtacatcggcaacgccatgtacggcaactacgccgccgtgttcgcccagctgatcatcgacggcagaagccagggcccccactgcttcatcgtgcccgtgagagacgagaacggcagcctgtaccccggcgtgaccgccatcgacatgatgtacaaggagggcctgcacggcgtggacaacggcatcctgatcttcgacaaggtgagaatccccagagagaacctgctggacaagttcggcagcgtggcccccgacggccagtaccacagccccatcagaaacaagagcgccagattcaacgccatgctggccgccctgacccccagcagactggccgtggccttccaggccatgggcgccatgaagctgggcctgaccatcgccatcagatacagccacagcagaagacagttcggccccaagaccaaggaggaggtgaagatcatcgagcaccagacccagaccctgagactgatgccccacctggccaccgccctggccctgaccttcgtgagcagatacgccggcgccctgctggacgaggacgtgttccagggcaaggagctggtgaacagcagaagcctgcaggccctggtggccggcctgaaggcctacagcacctgggagaacatcagatgcctgcaggactgcagagagtgcaccggcggcatgggctacatgatggagaacagaatcagcggcctgaagtgcgacaccgacgtgttcgccaccttcgagggcgacgacgtggtgatgctgcaggtggtgggcagagagctgctggcccagtacaccaagcagtacgaggagaagcccctgttcggcctgctgcagaactgggccgagagcgtgggcgacaagctgagaaccagcttcctggccttcaacatggacaccgtggacgacctggccttcctgctgaaggccgtgaagttcagagagagagtgctgcagagaggcctggtggccagaatctactacaaggtgaagaccaagaaggaggacttcttccacgcctggaacagctgcctgcaccacgtggccagcctgagcctggcccacacccacagagtgaccctggagcagttcagcctggccgtgaagagctgccccgaccaggaggaccagaccctgctgatgaagttctgcctgctgtacggcaccaagctggtgttccaggagagagcctggtacctggagcacaagtacctgacccccatggccagcaccagaatcagaaaccaggagagatgctag

SEQ ID NO: 11243 - DNA, 6087 bp, synthetic construct
  source 1..6087: mol_type = other DNA; note = Synthetic coding sequence
atggacgtgaccgtgagcgagctgctggagctgttcctgcagagccccctggtgacctgggtgaagaccttcggccccttcggcagcggcagccaggacaacctgaccatgtacatggacctggtggacggcatcttcctgaaccagatcatgctgcagatcgaccccagacccaccaaccagagaatcaacaagcacgtgaacaacgacgtgaacctgagaatccagaacctgaccatcctggtgagaaacatcaagacctactaccaggaggtgctgcagcagctgatcgtgatgaacctgcccaacgtgctgatgatcggcagagaccccctgagcggcaagagcatggaggagatcaagaaggtgctgctgctggtgctgggctgcgccgtgcagtgcgagagaaaggaggagttcatcgagagaatcaagcagctggacatcgagacccaggccggcatcgtggcccacatccaggaggtgacccacaaccaggagaacgtgttcgacctgcagtggctggagctgcccgacgtggcccccgaggagctggaggccctgagcagaagcatggtgctgcacctgagaagactgatcgaccagagagacgagtgcaccgagctgatcgtggacctgacccaggagagagactacctgcaggcccagcacccccccagccccatcaagagcagcagcgccgacagcacccccagccccaccagcagcctgagcagcgaggacaagcagcacctggccgtggagctggccgacaccaaggccagactgagaagagtgagacaggagctggaggacaagaccgagcagctggtggacaccagacacgaggtggaccagctggtgctggagctgcagaaggtgaagcaggagaacatccagctggccgccgacgccagaagcgccagagcctacagagacgagctggacagcctgagagagaaggccaacagagtggagagactggagctggagctgaccagatgcaaggagaagctgcacgacgtggacttctacaaggccagaatggaggagctgagagaggacaacatcatcctgatcgagaccaaggccatgctggaggagcagctgaccgccgccagagccagaggcgacaaggtgcacgagctggagaaggagaacctgcagctgaagagcaagctgcacgacctggagctggacagagacaccgacaagaagagaatcgaggagctgctggaggagaacatggtgctggagatcgcccagaagcagagcatgaacgagagcgcccacctgggctgggagctggagcagctgagcaagaacgccgacctgagcgacgccagcagaaagagcttcgtgttcgagctgaacgagtgcgccagcagcagaatcctgaagctggagaaggagaaccagagcctgcagagcaccatccagggcctgagagacgccagcctggtgctggaggagagcggcctgaagtgcggcgagctggagaaggagaaccaccagctgagcaagaagatcgagaagctgcagacccagctggagagagagaagcagagcaaccaggacctggagaccctgagcgaggagctgatcagagagaaggagcagctgcagagcgacatggagaccctgaaggccgacaaggccagacagatcaaggacctggagcaggagaaggaccacctgaacagagccatgtggagcctgagagagagaagccaggtgagcagcgaggccagaatgaaggacgtggagaaggagaacaaggccctgcaccagaccgtgaccgaggccaacggcaagctgagccagctggagttcgagaagagacagctgcacagagacctggagcaggccaaggagaagggcgagagagccgagaagctggagagagagctgcagagactgcaggaggagaacggcagactggccagaaaggtgaccagcctggagaccgccaccgagaaggtggaggccctggagcacgagagccagggcctgcagctggagaacagaaccctgagaaagagcctggacaccctgcagaacgtgagcctgcagctggagggcctggagagagacaacaagcagctggacgccgagaacctggagctgagaagactggtggagaccatgagattcaccagcaccaagctggcccagatggagagagagaaccagcagctggagagagagaaggaggagctgagaaagaacgtggacctgctgaaggccctgggcaagaagagcgagagactggagctgagctaccagagcgtgagcgccgagaacctgagactgcagcagagcctggagagcagcagccacaagacccagaccctggagagcgagctgggcgagctggaggccgagagacaggccctgagaagagacctggaggccctgagactggccaacgcccagctggagggcgccgagaaggacagaaaggccctggagcaggaggtggcccagctggagaaggacaagaagctgctggagaaggaggccaagagactgtggcagcaggtggagctgaaggacgccgtgctggacgacagcaccgccaagctgagcgccgtggagaaggagagcagagccctggacaaggagctggccagatgcagagacgccgccggcaagctgaaggagctggagaaggacaacagagacctgaccaagcaggtgaccgtgcacgccagaaccctgaccaccctgagagaggacctggtgctggagaagctgaagagccagcagctgagcagcgagctggacaagctgagccaggagctggagaaggtgggcctgaacagagagctgctgctgcaggaggacgacagcggcagcgacaccaagtacaagatcctggagggcagaaacgagagcgccctgaagaccaccctggccatgaaggaggagaagatcgtgctgctggaggcccagatggaggagaaggccagcctgaacagacagctggagagcgagctgcagatgctgaagaaggagtgcgagaccctgagacagaaccagggcgagggccagcacctgcagaacagcttcaagcaccccgccggcaagaccgccgccagccaccagggcaaggaggcctggggccccggccacaaggaggccaccatggagctgctgagagtgaaggacagagccatcgagctggagagaaacaacgccgccctgcaggccgagaagcagctgctgaaggagcagctgcagcacctggagacccagaacgtgaccttcagcagccagatcctgaccctgcagaagcagagcgccttcctgcaggagcacaacaccaccctgcagacccagaccgccaagctgcaggtggagaacagcaccctgagcagccagagcgccgccctgaccgcccagtacaccctgctgcagaaccaccacaccgccaaggagaccgagaacgagagcctgcagagacagcaggagcagctgaccgccgcctacgaggccctgctgcaggaccacgagcacctgggcaccctgcacgagagacagagcgccgagtacgaggccctgatcagacagcacagctgcctgaagaccctgcacagaaacctggagctggagcacaaggagctgggcgagagacacggcgacatgctgaagagaaaggccgagctggaggagagagagaaggtgctgaccaccgagagagaggccctgcagcaggagcagagaaccaacgccctggccatgggcgagaaccagagactgagaggcgagctggacagagtgaacttcctgcaccaccagctgaagggcgagtacgaggagctgcacgcccacaccaaggagctgaagaccagcctgaacaacgcccagctggagctgaacagatggcaggccagattcgacgagctgaaggagcagcaccagaccatggacatcagcctgaccaagctggacaaccactgcgagctgctgagcagactgaagggcaacctggaggaggagaaccaccacctgctgagccagatccagctgctgagccagcagaaccagatgctgctggagcagaacatggagaacaaggagcagtaccacgaggagcagaagcagtacatcgacaagctgaacgccctgagaagacacaaggagaagctggaggagaagatcatggaccagtacaagttctacgaccccccccccaagaagaagaaccactggatcggcgccaaggccctggtgaagctgatcaagcccaagaaggagggcagcagagagagactgaagagcaccgtggacagccccccctggcagctggagagcagcgaccccgccagccccgccgccagccagcccctgagaagccaggccgagaaccccgacacccccgccctgggcagcaactgcgccgaggagagagacgcccacaacggcagcgtgggcaagggccccggcgacctgaagcccaagagaggcagcccccacagaggcagcctggacagaaccgacgccagcaccgacctggccatgagaagctggcccagcgagctgggcagcagaacctgcagcaccagcgccaccaccaccgcccccagcaacagcacccccatcgccagacaccccggcagaaccaagggctacaacagcgacgacaacctgtgcgagcccagcctggagttcgaggtgcccaaccacagacagtacgtgagcagacccagcagcctggagagcagcagaaacaccagcagcaacagcagccccctgaacctgaagggcagcagcgagcagctgcacggcagaagcgagagcttcagcagcgaggacctgatccccagcagagacctggccaccctgcccagagaggccagcacccccggcagaaacgccctgggcagacacgagtaccccctgcccagaaacggccccctgccccaggagggcgcccagaagagaggcaccgcccccccctacgtgggcgtgagaccctgcagcgccagccccagcagcgagatggtgaccctggaggagttcctggaggagagcaacagaagcagccccacccacgacacccccagctgcagagacgacctgctgagcgactacttcagaaaggccagcgacccccccgccatcggcggccagcccggcccccccgccaagaaggagggcgccaagatgcccaccaacttcgtggcccccaccgtgaagatggccgcccccaccagcgagggcagacccctgaagcccggccagtacgtgaagcccaacttcagactgaccgaggccgaggccccccccagcgtggcccccagacaggcccagcccccccagagcctgagcctgggcagacccagacaggcccccgtgccccccgccagccacgcccccgccagcagaagcgccagcctgagcagagccttcagcctggccagcgccgacctgctgagagccagcggccccgaggcctgcaagcaggagagcccccagaagctgggcgcccccgaggccctgggcggcagagagaccggcagccacaccctgcagagccccgccccccccagcagccacagcctggccagagagagaacccccctggtgggcaaggccggcagcagctgccagggccccggccccagaagcagacccctggacaccagaagattcagcctggccccccccaaggaggagagactggcccccctgcaccagagcgccaccgcccccgccatcgccaccgccggcgccggcgccgccgccgccggcagcggcagcaacagccagctgctgcacttcagccccgccgccgcccccgccgccagaaccaagcccaaggccccccccagaagcggcgaggtggccaccatcacccccgtgagagccggcctgagcctgagcgagggcgacggcgtgcccggccagggctgcagcgagggcctgcccgccaagagccccggcagaagccccgacctggccccccacctgggcagagccctggaggactgcagcagaggcagcgtgagcaagagcagccccgccagccccgagcccggcggcgacccccagaccgtgtggtacgagtacggctgcgtgtag

SEQ ID NO: 11244 - DNA, 3831 bp, synthetic construct
  source 1..3831: mol_type = other DNA; note = Synthetic coding sequence
atggacgaggtggagcaggaccagcacgaggccagactgaaggagctgttcgacagcttcgacaccaccggcaccggcagcctgggccaggaggagctgaccgacctgtgccacatgctgagcctggaggaggtggcccccgtgctgcagcagaccctgctgcaggacaacctgctgggcagagtgcacttcgaccagttcaaggaggccctgatcctgatcctgagcagaaccctgagcaacgaggagcacttccaggagcccgactgcagcctggaggcccagcccaagtacgtgagaggcggcaagagatacggcagaagaagcctgcccgagttccaggagagcgtggaggagttccccgaggtgaccgtgatcgagcccctggacgaggaggccagacccagccacatccccgccggcgactgcagcgagcactggaagacccagagaagcgaggagtacgaggccgagggccagctgagattctggaaccccgacgacctgaacgccagccagagcggcagcagccccccccaggactggatcgaggagaagctgcaggaggtgtgcgaggacctgggcatcaccagagacggccacctgaacagaaagaagctggtgagcatctgcgagcagtacggcctgcagaacgtggacggcgagatgctggaggaggtgttccacaacctggaccccgacggcaccatgagcgtggaggacttcttctacggcctgttcaagaacggcaagagcctgacccccagcgccagcaccccctacagacagctgaagagacacctgagcatgcagagcttcgacgagagcggcagaagaaccaccaccagcagcgccatgaccagcaccatcggcttcagagtgttcagctgcctggacgacggcatgggccacgccagcgtggagagaatcctggacacctggcaggaggagggcatcgagaacagccaggagatcctgaaggccctggacttcagcctggacggcaacatcaacctgaccgagctgaccctggccctggagaacgagctgctggtgaccaagaacagcatccaccaggccgccctggccagcttcaaggccgagatcagacacctgctggagagagtggaccaggtggtgagagagaaggagaagctgagaagcgacctggacaaggccgagaagctgaagagcctgatggccagcgaggtggacgaccaccacgccgccatcgagagaagaaacgagtacaacctgagaaagctggacgaggagtacaaggagagaatcgccgccctgaagaacgagctgagaaaggagagagagcagatcctgcagcaggccggcaagcagagactggagctggagcaggagatcgagaaggccaagaccgaggagaactacatcagagacagactggccctgagcctgaaggagaacagcagactggagaacgagctgctggagaacgccgagaagctggccgagtacgagaacctgaccaacaagctgcagagaaacctggagaacgtgctggccgagaagttcggcgacctggaccccagcagcgccgagttcttcctgcaggaggagagactgacccagatgagaaacgagtacgagagacagtgcagagtgctgcaggaccaggtggacgagctgcagagcgagctggaggagtacagagcccagggcagagtgctgagactgcccctgaagaacagccccagcgaggaggtggaggccaacagcggcggcatcgagcccgagcacggcctgggcagcgaggagtgcaaccccctgaacatgagcatcgaggccgagctggtgatcgagcagatgaaggagcagcaccacagagacatctgctgcctgagactggagctggaggacaaggtgagacactacgagaagcagctggacgagaccgtggtgagctgcaagaaggcccaggagaacatgaagcagagacacgagaacgagacccacaccctggagaagcagatcagcgacctgaagaacgagatcgccgagctgcagggccaggccgccgtgctgaaggaggcccaccacgaggccacctgcagacacgaggaggagaagaagcagctgcaggtgaagctggaggaggagaagacccacctgcaggagaagctgagactgcagcacgagatggagctgaaggccagactgacccaggcccaggccagcttcgagagagagagagagggcctgcagagcagcgcctggaccgaggagaaggtgagaggcctgacccaggagctggagcagttccaccaggagcagctgaccagcctggtggagaagcacaccctggagaaggaggagctgagaaaggagctgctggagaagcaccagagagagctgcaggagggcagatacgagagcgagaagctgcagcaggagaacagcatcctgagaaacgagatcaccaccctgaacgaggaggacagcatcagcaacctgaagctgggcaccctgaacggcagccaggaggagatgtggcagaagaccgagaccgtgaagcaggagaacgccgccgtgcagaagatggtggagaacctgaagaagcagatcagcgagctgaagatcaagaaccagcagctggacctggagaacaccgagctgagccagaagaacagccagaaccaggagaagctgcaggagctgaaccagagactgaccgagatgctgtgccagaaggagaaggagcccggcaacagcgccctggaggagagagagcaggagaagttcaacctgaaggaggagctggagagatgcaaggtgcagagcagcaccctggtgagcagcctggaggccgagctgagcgaggtgaagatccagacccacatcgtgcagcaggagaaccacctgctgaaggacgagctggagaagatgaagcagctgcacagatgccccgacctgagcgacttccagcagaagatcagcagcgtgctgagctacaacgagaagctgctgaaggagaaggaggccctgagcgaggagctgaacagctgcgtggacaagctggccaagagcagcctgctggagcacagaatcgccaccatgaagcaggagcagaagagctgggagcaccagagcgccagcctgaagagccagctggtggccagccaggagaaggtgcagaacctggaggacaccgtgcagaacgtgaacctgcagatgagcagaatgaagagcgacctgagagtgacccagcaggagaaggaggccctgaagcaggaggtgatgagcctgcacaagcagctgcagaacgccggcggcaagagctgggcccccgagatcgccacccaccccagcggcctgcacaaccagcagaagagactgagctgggacaagctggaccacctgatgaacgaggagcagcagctgctgtggcaggagaacgagagactgcagaccatggtgcagaacaccaaggccgagctgacccacagcagagagaaggtgagacagctggagagcaacctgctgcccaagcaccagaagcacctgaaccccagcggcaccatgaaccccaccgagcaggagaagctgagcctgaagagagagtgcgaccagttccagaaggagcagagccccgccaacagaaaggtgagccagatgaacagcctggagcaggagctggagaccatccacctggagaacgagggcctgaagaagaagcaggtgaagctggacgagcagctgatggagaacagcgtggtgggcagcagcagagagggctgcagcagcctgcccgagatcgtgtgcgaggacgccgcccccgaggtgcactgcgacgcctag

SEQ ID NO: 11245 - DNA, 2997 bp, synthetic construct
  source 1..2997: mol_type = other DNA; note = Synthetic coding sequence
atgaaggacagcggcgacagcaaggaccagcagctgatggtggccctgagagtgagacccatcagcgtggccgagctggaggagggcgccaccctgatcgcccacaaggtggacgagcagatggtggtgctgatggaccccatggaggaccccgacgacatcctgagagcccacagaagcagagagaagagctacctgttcgacgtggccttcgacttcaccgccacccaggagatggtgtaccaggccaccaccaagagcctgatcgagggcgtgatcagcggctacaacgccaccgtgttcgcctacggccccaccggctgcggcaagacctacaccatgctgggcaccgaccaggagcccggcatctacgtgcagaccctgaacgacctgttcagagccatcgaggagaccagcaacgacatggagtacgaggtgagcatgagctacctggagatctacaacgagatgatcagagacctgctgaaccccagcctgggctacctggagctgagagaggacagcaagggcgtgatccaggtggccggcatcaccgaggtgagcaccatcaacgccaaggagatcatgcagctgctgatgaagggcaacagacagagaacccaggagcccaccgccgccaaccagaccagcagcagaagccacgccgtgctgcaggtgaccgtgagacagagaagcagagtgaagaacatcctgcaggaggtgagacagggcagactgttcatgatcgacctggccggcagcgagagagccagccagacccagaacagaggccagagaatgaaggagggcgcccacatcaacagaagcctgctggccctgggcaactgcatcaacgccctgagcgacaagggcagcaacaagtacatcaactacagagacagcaagctgaccagactgctgaaggacagcctgggcggcaacagcagaaccgtgatgatcgcccacatcagccccgccagcagcgccttcgaggagagcagaaacaccctgacctacgccggcagagccaagaacatcaagaccagagtgaagcagaacctgctgaacgtgagctaccacatcgcccagtacaccagcatcatcgccgacctgagaggcgagatccagagactgaagagaaagatcgacgagcagaccggcagaggccaggccagaggcagacaggacagaggcgacatcagacacatccaggccgaggtgcagctgcacagcggccagggcgagaaggccggcatgggccagctgagagagcagctggccagcgccttccaggagcagatggacgtgagaagaagactgctggagctggagaacagagccatggaggtgcagatcgacaccagcagacacctgctgaccatcgccggctggaagcacgagaagagcagaagagccctgaagtggagagaggagcagagaaaggagtgctacgccaaggacgacagcgagaaggacagcgacaccggcgacgaccagcccgacatcctggagccccccgaggtggccgccgccagagagagcatcgccgccctggtggacgagcagaagcagctgagaaagcagaagctggccctggagcagagatgcagagagctgagagccagaggcagaagactggaggagaccctgcccagaagaatcggcagcgaggagcagagagaggtgctgagcctgctgtgcagagtgcacgagctggaggtggagaacaccgagatgcagagccacgccctgctgagagacggcgccctgagacacagacacgaggccgtgagaagactggagcagcacagaagcctgtgcgacgagatcatccagggccagagacagatcatcgacgactacaacctggccgtgccccagagactggaggagctgtacgaggtgtacctgagagagctggaggagggcagcctggagcaggccaccatcatggaccaggtggccagcagagccctgcaggacagcagcctgcccaagatcacccccgccggcaccagcctgacccccgacagcgacctggagagcgtgaagaccctgagcagcgacgcccagcacctgcagaacagcgccctgccccccctgagcaccgagagcgagggccaccacgtgttcaaggccggcaccggcgcctggcaggccaagagcagcagcgtgcccacccccccccccatccagctgggcagcctggtgacccaggaggcccccgcccaggacagcctgggcagctggatcaacagcagccccgacagcagcgagaacctgagcgagatccccctgagccacaaggagagaaaggagatcctgaccggcaccaagtgcatctgggtgaaggccgccagaagaagaagcagagccctgggcaccgagggcagacacctgctggcccccgccaccgagagaagcagcctgagcctgcacagcctgagcgagggcgacgacgccagaccccccggccccctggcctgcaagagaccccccagccccaccctgcagcacgccgccagcgaggacaacctgagcagcagcaccggcgaggcccccagcagagccgtgggccaccacggcgacggccccagaccctggctgagaggccagaagaagagcctgggcaagaagagagaggagagcctggaggccaagagaagaaagagaagaagcagaagcttcgaggtgaccggccagggcctgagccaccccaagacccacctgctgggcccccaccaggccgagagaatcagcgaccacagaatgcccgtgtgcagacaccccgcccccggcatcagacacctgggcaaggtgaccctgcccctggccaaggtgaagctgccccccagccagaacaccggccccggcgacagcagccccctggccgtgccccccaaccccggcggcggcagcagaagagccaccagaggccccagactgccccacggcaccagcacccacggcaaggacggctgcagcagacacaactag

SEQ ID NO: 11246 - DNA, 1194 bp, synthetic construct
  source 1..1194: mol_type = other DNA; note = Synthetic coding sequence
atgaccgccgaggagggcgtgcagctgagccagcagaacgccaaggacttcttcagagtgctgaacctgaacaagaagtgcgacaccagcaagcacaaggtgctggtggtgagcgtgtgcccccagagcctgccctacttcgccgccaagttcaacctgagcgtgaccgacgccagcagaagactgtgcggcttcctgaagagcctgggcgtgcactacgtgttcgacaccaccatcgccgccgacttcagcatcctggagagccagaaggagttcgtgagaagatacagacagcacagcgaggaggagagaaccctgcccatgctgaccagcgcctgccccggctgggtgagatacgccgagagagtgctgggcagacccatcaccgcccacctgtgcaccgccaagagcccccagcaggtgatgggcagcctggtgaaggactacttcgccagacagcagaacctgagccccgagaagatcttccacgtgatcgtggccccctgctacgacaagaagctggaggccctgcaggagagcctgccccccgccctgcacggcagcagaggcgccgactgcgtgctgaccagcggcgagatcgcccagatcatggagcagggcgacctgagcgtgagagacgccgccgtggacaccctgttcggcgacctgaaggaggacaaggtgaccagacacgacggcgccagcagcgacggccacctggcccacatcttcagacacgccgccaaggagctgttcaacgaggacgtggaggaggtgacctacagagccctgagaaacaaggacttccaggaggtgaccctggagaagaacggcgaggtggtgctgagattcgccgccgcctacggcttcagaaacatccagaacatgatcctgaagctgaagaagggcaagttccccttccacttcgtggaggtgctggcctgcgccggcggctgcctgaacggcagaggccaggcccagacccccgacggccacgccgacaaggccctgctgagacagatggagggcatctacgccgacatccccgtgagaagacccgagagcagcgcccacgtgcaggagctgtaccaggagtggctggagggcatcaacagccccaaggccagagaggtgctgcacaccacctaccagagccaggagagaggcacccacagcctggacatcaagtggtag

SEQ ID NO: 11247 - DNA, 3603 bp, synthetic construct
  source 1..3603: mol_type = other DNA; note = Synthetic coding sequence
atgaaggtggccggcggcctggagctgggcgccgccgccctgctgagcgccagccccagagccctggtgaccctgagcaccggccccacctgcagcatcctgcccaagaaccccctgttcccccagaacctgagcagccagccctgcatcaagatggagggcgacaagagcctgaccttcagcagctacggcctgcagtggtgcctgtacgagctggacaaggaggagttccagaccttcaaggagctgctgaagaagaagagcagcgagagcaccacctgcagcatcccccagttcgagatcgagaacgccaacgtggagtgcctggccctgctgctgcacgagtactacggcgccagcctggcctgggccaccagcatcagcatcttcgagaacatgaacctgagaaccctgagcgagaaggccagagacgacatgaagagacacagccccgaggaccccgaggccaccatgaccgaccagggccccagcaaggagaaggtgcccggcatcagccaggccgtgcagcaggacagcgccaccgccgccgagaccaaggagcaggagatcagccaggccatggagcaggagggcgccaccgccgccgagaccgaggagcaggagatcagccaggccatggagcaggagggcgccaccgccgccgagaccgaggagcagggccacggcggcgacacctgggactacaagagccacgtgatgaccaagttcgccgaggaggaggacgtgagaagaagcttcgagaacaccgccgccgactggcccgagatgcagaccctggccggcgccttcgacagcgacagatggggcttcagacccagaaccgtggtgctgcacggcaagagcggcatcggcaagagcgccctggccagaagaatcgtgctgtgctgggcccagggcggcctgtaccagggcatgttcagctacgtgttcttcctgcccgtgagagagatgcagagaaagaaggagagcagcgtgaccgagttcatcagcagagagtggcccgacagccaggcccccgtgaccgagatcatgagcagacccgagagactgctgttcatcatcgacggcttcgacgacctgggcagcgtgctgaacaacgacaccaagctgtgcaaggactgggccgagaagcagccccccttcaccctgatcagaagcctgctgagaaaggtgctgctgcccgagagcttcctgatcgtgaccgtgagagacgtgggcaccgagaagctgaagagcgaggtggtgagccccagatacctgctggtgagaggcatcagcggcgagcagagaatccacctgctgctggagagaggcatcggcgagcaccagaagacccagggcctgagagccatcatgaacaacagagagctgctggaccagtgccaggtgcccgccgtgggcagcctgatctgcgtggccctgcagctgcaggacgtggtgggcgagagcgtggcccccttcaaccagaccctgaccggcctgcacgccgccttcgtgttccaccagctgacccccagaggcgtggtgagaagatgcctgaacctggaggagagagtggtgctgaagagattctgcagaatggccgtggagggcgtgtggaacagaaagagcgtgttcgacggcgacgacctgatggtgcagggcctgggcgagagcgagctgagagccctgttccacatgaacatcctgctgcccgacagccactgcgaggagtactacaccttcttccacctgagcctgcaggacttctgcgccgccctgtactacgtgctggagggcctggagatcgagcccgccctgtgccccctgtacgtggagaagaccaagagaagcatggagctgaagcaggccggcttccacatccacagcctgtggatgaagagattcctgttcggcctggtgagcgaggacgtgagaagacccctggaggtgctgctgggctgccccgtgcccctgggcgtgaagcagaagctgctgcactgggtgagcctgctgggccagcagcccaacgccaccacccccggcgacaccctggacgccttccactgcctgttcgagacccaggacaaggagttcgtgagactggccctgaacagcttccaggaggtgtggctgcccatcaaccagaacctggacctgatcgccagcagcttctgcctgcagcactgcccctacctgagaaagatcagagtggacgtgaagggcatcttccccagagacgagagcgccgaggcctgccccgtggtgcccctgtggatgagagacaagaccctgatcgaggagcagtgggaggacttctgcagcatgctgggcacccacccccacctgagacagctggacctgggcagcagcatcctgaccgagagagccatgaagaccctgtgcgccaagctgagacaccccacctgcaagatccagaccctgatgttcagaaacgcccagatcacccccggcgtgcagcacctgtggagaatcgtgatggccaacagaaacctgagaagcctgaacctgggcggcacccacctgaaggaggaggacgtgagaatggcctgcgaggccctgaagcaccccaagtgcctgctggagagcctgagactggactgctgcggcctgacccacgcctgctacctgaagatcagccagatcctgaccaccagccccagcctgaagagcctgagcctggccggcaacaaggtgaccgaccagggcgtgatgcccctgagcgacgccctgagagtgagccagtgcgccctgcagaagctgatcctggaggactgcggcatcaccgccaccggctgccagagcctggccagcgccctggtgagcaacagaagcctgacccacctgtgcctgagcaacaacagcctgggcaacgagggcgtgaacctgctgtgcagaagcatgagactgccccactgcagcctgcagagactgatgctgaaccagtgccacctggacaccgccggctgcggcttcctggccctggccctgatgggcaacagctggctgacccacctgagcctgagcatgaaccccgtggaggacaacggcgtgaagctgctgtgcgaggtgatgagagagcccagctgccacctgcaggacctggagctggtgaagtgccacctgaccgccgcctgctgcgagagcctgagctgcgtgatcagcagaagcagacacctgaagagcctggacctgaccgacaacgccctgggcgacggcggcgtggccgccctgtgcgagggcctgaagcagaagaacagcgtgctggccagactgggcctgaaggcctgcggcctgaccagcgactgctgcgaggccctgagcctggccctgagctgcaacagacacctgaccagcctgaacctggtgcagaacaacttcagccccaagggcatgatgaagctgtgcagcgccttcgcctgccccaccagcaacctgcagatcatcggcctgtggaagtggcagtaccccgtgcagatcagaaagctgctggaggaggtgcagctgctgaagcccagagtggtgatcgacggcagctggcacagcttcgacgaggacgacagatactggtggaagaactag

SEQ ID NO: 11248 - DNA, 2787 bp, synthetic construct
  source 1..2787: mol_type = other DNA; note = Synthetic coding sequence
atgaacgaggccatggccaccgacagccccagaagacccagcagatgcaccggcggcgtggtggtgagaccccaggccgtgaccgagcagagctacatggagagcgtggtgaccttcctgcaggacgtggtgccccaggcctacagcggcacccccctgaccgaggagaaggagaagatcgtgtgggtgagattcgagaacgccgacctgaacgacaccagcagaaacctggagttccacgagatccacagcaccggcaacgagccccccctgctgatcatgatcggctacagcgacggcatgcaggtgtggagcatccccatcagcggcgaggcccaggagctgttcagcgtgagacacggccccatcagagccgccagaatcctgcccgccccccagttcggcgcccagaagtgcgacaacttcgccgagaagagacccctgctgggcgtgtgcaagagcatcggcagcagcggcaccagccccccctactgctgcgtggacctgtacagcctgagaaccggcgagatggtgaagagcatccagttcaagacccccatctacgacctgcactgcaacaagagaatcctggtggtggtgctgcaggagaagatcgccgccttcgacagctgcaccttcaccaagaagttcttcgtgaccagctgctacccctgccccggccccaacatgaaccccatcgccctgggcagcagatggctggcctacgccgagaacaagctgatcagatgccaccagagcagaggcggcgcctgcggcgacaacatccagagctacaccgccaccgtgatcagcgccgccaagaccctgaagagcggcctgaccatggtgggcaaggtggtgacccagctgaccggcaccctgcccagcggcgtgaccgaggacgacgtggccatccacagcaacagcagaagaagccccctggtgcccggcatcatcaccgtgatcgacaccgagaccgtgggcgagggccaggtgctggtgagcgaggacagcgacagcgacggcatcgtggcccacttccccgcccacgagaagcccgtgtgctgcatggccttcaacaccagcggcatgctgctggtgaccaccgacaccctgggccacgacttccacgtgttccagatcctgacccacccctggagcagcagccagtgcgccgtgcaccacctgtacaccctgcacagaggcgagaccgaggccaaggtgcaggacatctgcttcagccacgactgcagatgggtggtggtgagcaccctgagaggcaccagccacgtgttccccatcaacccctacggcggccagccctgcgtgagaacccacatgagccccagagtggtgaacagaatgagcagattccagaagagcgccggcctggaggagatcgagcaggagctgaccagcaagcagggcggcagatgcagccccgtgcccggcctgagcagcagccccagcggcagccccctgcacggcaagctgaacagccaggacagctacaacaacttcaccaacaacaaccccggcaaccccagactgagccccctgcccagcctgatggtggtgatgcccctggcccagatcaagcagcccatgaccctgggcaccatcaccaagagaaccggcccctacctgttcggcgccggctgcttcagcatcaaggccccctgcaaggtgaagccccccccccagatcagccccagcaagagcatgggcggcgagttctgcgtggccgccatcttcggcaccagcagaagctggttcgccaacaacgccggcctgaagagagagaaggaccagagcaagcaggtggtggtggagagcctgtacatcatcagctgctacggcaccctggtggagcacatgatggagcccagacccctgagcaccgcccccaagatcagcgacgacacccccctggagatgatgaccagccccagagccagctggaccctggtgagaaccccccagtggaacgagctgcagccccccttcaacgccaaccaccccctgctgctggccgccgacgccgtgcagtactaccagttcctgctggccggcctggtgccccccggcagccccggccccatcaccagacacggcagctacgacagcctggccagcgaccacagcggccaggaggacgaggagtggctgagccaggtggagatcgtgacccacaccggcccccacagaagactgtggatgggcccccagttccagttcaagaccatccaccccagcggccagaccaccgtgatcagcagcagcagcagcgtgctgcagagccacggccccagcgacaccccccagcccctgctggacttcgacaccgacgacctggacctgaacagcctgagaatccagcccgtgagaagcgaccccgtgagcatgcccggcagcagcagacccgtgagcgacagaagaggcgtgagcaccgtgatcgacgccgccagcggcaccttcgacagaagcgtgaccctgctggaggtgtgcggcagctggcccgagggcttcggcctgagacacatgagcagcatggagcacaccgaggagggcctgagagagagactggccgacgccatggccgagagccccagcagagacgtggtgggcagcggcaccgagctgcagagagagggcagcatcgagaccctgagcaacagcagcggcagcaccagcggcagcatccccagaaacttcgacggctacagaagccccctgcccaccaacgagagccagcccctgagcctgttccccaccggcttcccctag

SEQ ID NO: 11249 - DNA, 501 bp, synthetic construct
  source 1..501: mol_type = other DNA; note = Synthetic coding sequence
atggtgaacagctgctgcggcagcgtgtgcagcgaccagggctgcggcctggagaactgctgcagacccagctactgccagaccacctgctgcagaaccacctgctgcagacccagctgctgcgtgagcagctgctgcagaccccagtgctgccagaccacctgctgcagaaccacctgctgccaccccagctgctgcgtgagcagctgctgcagaccccagtgctgccagagcgtgtgctgccagcccacctgctgcagaccccagtgctgccagaccacctgctgcagaaccacctgctgcagacccagctgctgcagaccccagtgctgccagagcgtgtgctgccagcccacctgctgctgccccagctactgcgtgagcagctgctgcagaccccagtgctgccagaccacctgctgcagaaccacctgctgcagacccagctgctgcgtgagcagatgctacagaccccactgcggccagagcctgtgctgctag

SEQ ID NO: 11250 - DNA, 1104 bp, synthetic construct
  source 1..1104: mol_type = other DNA; note = Synthetic coding sequence
atggacgacgccgccgtgctgaagagaagaggctacctgctgggcatcaacctgggcgagggcagctacgccaaggtgaagagcgcctacagcgagagactgaagttcaacgtggccatcaagatcatcgacagaaagaaggcccccgccgacttcctggagaagttcctgcccagagagatcgagatcctggccatgctgaaccactgcagcatcatcaagacctacgagatcttcgagaccagccacggcaaggtgtacatcgtgatggagctggccgtgcagggcgacctgctggagctgatcaagaccagaggcgccctgcacgaggacgaggccagaaagaagttccaccagctgagcctggccatcaagtactgccacgacctggacgtggtgcacagagacctgaagtgcgacaacctgctgctggacaaggacttcaacatcaagctgagcgacttcagcttcagcaagagatgcctgagagacgacagcggcagaatggccctgagcaagaccttctgcggcagccccgcctacgccgcccccgaggtgctgcagggcatcccctaccagcccaaggtgtacgacatctggagcctgggcgtgatcctgtacatcatggtgtgcggcagcatgccctacgacgacagcaacatcaagaagatgctgagaatccagaaggagcacagagtgaacttccccagaagcaagcacctgaccggcgagtgcaaggacctgatctaccacatgctgcagcccgacgtgaacagaagactgcacatcgacgagatcctgagccactgctggatgcagcccaaggccagaggcagccccagcgtggccatcaacaaggagggcgagagcagcagaggcaccgagcccctgtggacccccgagcccggcagcgacaagaagagcgccaccaagctggagcccgagggcgaggcccagccccaggcccagcccgagaccaagcccgagggcaccgccatgcagatgagcagacagagcgagatcctgggcttccccagcaagcccagcaccatggagaccgaggagggccccccccagcagccccccgagaccagagcccagtag

SEQ ID NO: 11251 - DNA, 273 bp, synthetic construct
  source 1..273: mol_type = other DNA; note = Synthetic coding sequence
atgagccactacggcagctactacggcggcctgggctacagctgcggcggcttcggcggcctgggctacggctacggctgcggctgcggcagcttctgcagaagaggcagcggctgcggctacggcggctacggctacggcagcggcttcggcagctacggctacggcagcggcttcggcggctacggctacggcagcggcttcggcggctacggctacggctgctgcagacccagctacaacggcggctacggcttcagcggcttctactag

SEQ ID NO: 11252 - DNA, 519 bp, synthetic construct
  source 1..519: mol_type = other DNA; note = Synthetic coding sequence
atgagctacaactgctgcagcagaaacttcagcagctgcagccacggcggctacctgcactaccccggcagcagctgcggcagcagctaccccagcaacctggtgtacagcaccgacctgtgcagccccagcacctgccagctgggcagcagcctgtacagaggctgccaggagacctgctggagacccaacagctgccagaccctgtgcgtggagagcagcccctgccacaccagctgctactaccccagaacccacatgctgtgcaacagctgcctgaccatgcacgtgggcagcagaggcttcggcagcaacagctgctgcagcctgagctgcggcagcagaagctgcagcagcctgggctgcggcagcaacggcttcagatacctgaactacagaatccacaccagccccagccagagctacagaagcagattctgccaccccatctacttcccccccagaagatggttccacagcagctgctaccagcccttctgcagaagcggcttctactag

SEQ ID NO: 11253 - DNA, 1554 bp, synthetic construct
  source 1..1554: mol_type = other DNA; note = Synthetic coding sequence
atgagcggcagctgcagcagcagaaagtgcttcagcgtgcccgccaccagcctgtgcagcaccgaggtgagctgcggcggccccatctgcctgcccagcagctgccagagccagacctggcagctggtgacctgccaggacagctgcggcagcagcagctgcggcccccagtgcagacagcccagctgccccgtgagcagctgcgcccagcccctgtgctgcgaccccgtgatctgcgagcccagctgcagcgtgagcagcggctgccagcccgtgtgctgcgaggccaccacctgcgagcccagctgcagcgtgagcaactgctaccagcccgtgtgcttcgaggccaccatctgcgagcccagctgcagcgtgagcaactgctgccagcccgtgtgcttcgaggccaccgtgtgcgagcccagctgcagcgtgagcagctgcgcccagcccgtgtgctgcgagcccgccatctgcgagcccagctgcagcgtgagcagctgctgccagcccgtgggcagcgaggccaccagctgccagcccgtgctgtgcgtgcccaccagctgccagcccgtgctgtgcaagagcagctgctgccagcccgtggtgtgcgagcccagctgctgcagcgccgtgtgcaccctgcccagcagctgccagcccgtggtgtgcgagcccagctgctgccagcccgtgtgccccacccccacctgcagcgtgaccagcagctgccaggccgtgtgctgcgaccccagcccctgcgagcccagctgcagcgagagcagcatctgccagcccgccacctgcgtggccctggtgtgcgagcccgtgtgcctgagacccgtgtgctgcgtgcagagcagctgcgagccccccagcgtgcccagcacctgccaggagcccagctgctgcgtgagcagcatctgccagcccatctgcagcgagcccagcccctgcagccccgccgtgtgcgtgagcagcccctgccagcccacctgctacgtggtgaagagatgccccagcgtgtgccccgagcccgtgagctgccccagcaccagctgcagacccctgagctgcagccccggcagcagcgccagcgccatctgcagacccacctgccccagaaccttctacatccccagcagcagcaagagaccctgcagcgccaccatcagctacagacccgtgagcagacccatctgcagacccatctgcagcggcctgctgacctacagacagccctacatgaccagcatcagctacagacccgcctgctacagaccctgctacagcatcctgagaagacccgcctgcgtgaccagctacagctgcagacccgtgtacttcagacccagctgcaccgagagcgacagctgcaagagagactgcaagaagagcaccagcagccagctggactgcgtggacaccaccccctgcaaggtggacgtgagcgaggaggccccctgccagcccaccgaggccaagcccatcagccccaccaccagagaggccgccgccgcccagcccgccgccagcaagcccgccaactgctag

SEQ ID NO: 11254 - DNA, 1026 bp, synthetic construct
  source 1..1026: mol_type = other DNA; note = Synthetic coding sequence
atggccgacggctgctgccccggcaacaccaccgccatccccgccgtgcccaccatcaccacctaccccgtgaagggcggcttcagacacgccctgtgcctgcccagcagctgccacagcagaatgtggcagctggtgacctgccaggagagctgccagcccagcatcggcgcccccagcggctgcgaccccgccagctgccagcccaccagactgcccgccaccagctgcgtgggcttcgtgtgccagcccatgtgcagccacgccgcctgctaccagagcggcaccggccagagcccctgcctggtgagcagctgccagcccagctgcagcgagagcacctgctgccaggagaagtgctgcgacgccagcccctgccagcagagcagctgccaggagagcgtgtgcatgagcggcagctgccaggccgcctgcggccagagcgtgtgctgcgacgccggcagctgccagcccagctgcagcgaggtgaccagctgccccgagaccagctgcctgcccaccatctgcaccgccagcccctgccagcccacctggtgccagggcagcagctgccagcccgtgagcggcgagggccagccctgcaagagcacctactaccagcccatctgctacatcttcaagccctgccagagcgccctgtacatgcccgtgccctgccagcccagcacctgcgtgttcagcagctgcaacaccacctgctgcgtgcccagccactgccagcccccccactgccagctggtgcccagcacctgcttcatctaccagcccgtggccaactgccaggccccctgcagcaccaagaactgctgcaagcccgccagctgcgacaccgtgatcagcggccagcccacctgcgacggcccccccagctacaaccagagcggctgcaagagcgcctgctgcgtgaccggcctgggcaccagccccagcagcggcagcaactgcctgcccaccagctgccagcccagctgcgagagcagcttctgcaaggccaccctgtgctag

SEQ ID NO: 11255 - DNA, 588 bp, synthetic construct
  source 1..588: mol_type = other DNA; note = Synthetic coding sequence
atggtgagcagctgctgcggcagcgtgtgcagcgaccagagctgcggccagggcctgggccaggagagctgctgcagacccagctgctgccagaccacctgctgcagaaccacctgctgcagacccagctgctgcatcagcagctgctgcagacccagctgctgcatcagcagctgctgcaagcccagctgctgcagaaccacctgctgcagacccagctgctgcatcagcagctgctgcagacccagctgctgcatcagcagctgctgcaagcccagctgctgcagaaccacctgctgcagacccagctgctgcatcagcagctgctgcagacccagctgctgcatcagcagctgctgcaagcccagctgctgccagaccacctgctgcagacccagctgctgcatcagcagctgctacagaccccagtgctgccagcccagctgctgcagacccgcctgctgcatcagcagctgctgccaccccagctgctgcgtgagcagctgcagatgccccttcagctgccccaccacctgctgcagaaccacctgcttccaccccatctgctgcggcagcagctgctgctag

SEQ ID NO: 11256 - DNA, 588 bp, synthetic construct
  source 1..588: mol_type = other DNA; note = Synthetic coding sequence
atggtgaacagctgctgcggcagcgtgtgcagccaccagggctgcggcagagacctgtgccaggagacctgctgcagacccagctgctgcgagaccacctgctgcagaaccacctactgcagacccagctgctgcgtgagcagctgctgcagaccccagtgctgccagagcgtgtgctgccagcccacctgctgcagacccagatgctgcatcagcagctgctgcagacccagctgctgcgtgagcagctgctgcaagccccagtgctgccagagcatgtgctgccagcccacctgctgcagacccagatgctgcatcagcagctgctgcagacccagctgctgcgtgagcagctgctgcagaccccagtgctgccagagcgtgtgctgccagcccacctgctgccaccccagctgcagcatcagcagctgctgcagacccagctgctgcgagagcagctgctgcagaccctgctgctgcctgagacccgtgtgcggcagagtgagctgccacaccacctgctacagacccacctgcgtgatcagcagctgccccagacccctgtgctgcgccagcagctgctgctag

SEQ ID NO: 11257 - DNA, 633 bp, synthetic construct
  source 1..633: mol_type = other DNA; note = Synthetic coding sequence
atggtgagcagctgctgcggcagcgtgtgcagcgaccagggctgcggccaggacctgtgccaggagacctgctgcagacccagctgctgcgagaccacctgctgcagaaccacctgctgcagacccagctgctgcgtgagcagctgctgcagaccccagtgctgccagagcgtgtgctgccagcccacctgcagcagacccagctgctgccagaccacctgctgcagaaccacctgctacagacccagctgctgcgtgagcagctgctgcagaccccagtgctgccagcccgcctgctgccagcccacctgctgcagacccagctgctgcgagaccacctgctgccaccccagatgctgcatcagcagctgctgcagacccagctgctgcgtgagcagctgctgcaagccccagtgctgccagagcgtgtgctgccagcccaactgctgcagacccagctgcagcatcagcagctgctgcagacccagctgctgcgagagcagctgctgcagaccctgctgctgcgtgagacccgtgtgcggcagagtgagctgccacaccacctgctacagacccacctgcgtgatcagcagctgccccagacccctgtgctgcgccagcagctgctgctag

SEQ ID NO: 11258 - DNA, 387 bp, synthetic construct
  source 1..387: mol_type = other DNA; note = Synthetic coding sequence
atgaccggcagctgctgcggcagcaccctgagcagcctgagctacggcggcggctgctgccagccctgctgctgcagagacccctgctgctgcagacccgtgacctgccagaccaccgtgtgcagacccgtgacctgcgtgcccagatgcaccagacccatctgcgagccctgcagaagacccgtgtgctgcgacccctgcagcctgcaggagggctgctgcagacccatcacctgctgccccagcagctgcaccgccgtggtgtgcagaccctgctgctgggccaccacctgctgccagcccgtgagcgtgcagagcccctgctgcagacccccctgcggccagcccaccccctgcagcaccacctgcagaaccagcagctgctag

SEQ ID NO: 11259 - DNA, 387 bp, synthetic construct
  source 1..387: mol_type = other DNA; note = Synthetic coding sequence
atgaccggcagctgctgcggcagcaccttcagcagcctgagctacggcggcggctgctgccagccctgctgctgcagagacccctgctgctgcagacccgtgacctgccagaccaccgtgtgcagacccgtgacctgcgtgcccagatgcaccagacccatctgcgagccctgcagaagacccgtgtgctgcgacccctgcagcctgcaggagggctgctgcagacccatcacctgctgccccagcagctgcaccgccgtggtgtgcagaccctgctgctgggccaccacctgctgccagcccgtgagcgtgcagagcccctgctgcagacccccctgcggccagcccaccccctgcagcaccacctgcagaaccagcagctgctag

SEQ ID NO: 11260 - DNA, 297 bp, synthetic construct
  source 1..297: mol_type = other DNA; note = Synthetic coding sequence
atggactgctgcgccagcagaggctgcagcgtgcccaccggccccgccaccaccatctgcagcagcgacaagagctgcagatgcggcgtgtgcctgcccagcacctgcccccacaccgtgtggctgctggagcccacctgctgcgacaactgcccccccccctgccacatcccccagccctgcgtgcccacctgcttcctgctgaacagctgccagcccacccccggcctggagaccctgaacctgaccaccttcacccagccctgctgcgagccctgcctgcccagaggctgctag

SEQ ID NO: 11261 - DNA, 297 bp, synthetic construct
  source 1..297: mol_type = other DNA; note = Synthetic coding sequence
atggactgctgcgccagcagaagctgcagcgtgcccaccggccccgccaccaccatctgcagcagcgacaagagctgcagatgcggcgtgtgcctgcccagcacctgcccccacaccgtgtggctgctggagcccatctgctgcgacaactgcccccccccctgccacatcccccagccctgcgtgcccacctgcttcctgctgaacagctgccagcccacccccggcctggagaccctgaacctgaccaccttcacccagccctgctgcgagccctgcctgcccagaggctgctag

SEQ ID NO: 11262 - DNA, 297 bp, synthetic construct
  source 1..297: mol_type = other DNA; note = Synthetic coding sequence
atgtactgctgcgccctgagaagctgcagcgtgcccaccggccccgccaccaccttctgcagcttcgacaagagctgcagatgcggcgtgtgcctgcccagcacctgcccccacgagatcagcctgctgcagcccatctgctgcgacacctgcccccccccctgctgcaagcccgacacctacgtgcccacctgctggctgctgaacaactgccaccccacccccggcctgagcggcatcaacctgaccacctacgtgcagcccggctgcgagagcccctgcgagcccagatgctag

SEQ ID NO: 11263 - DNA, 291 bp, synthetic construct
  source 1..291: mol_type = other DNA; note = Synthetic coding sequence
atgtgccacaccagctgcagcagcggctgccagcccgcctgctgcgcccccagcccctgccaggccagctgctacatccccgtgggctgccagagcagcgtgtgcgtgcccgtgagcttcaagcccgccgtgtgcgtgcccgtgagatgccagagcagcgtgtgcgtgcccgtgagctgcagacccgtggtgtacgccgcccccagctgccagagcagcggctgctgccagcccagctgcaccagcgtgctgtgcagacccatcagctgcagcacccccagctgctgctag

SEQ ID NO: 11264 - DNA, 339 bp, synthetic construct
  source 1..339: mol_type = other DNA; note = Synthetic coding sequence
atgtgccacaccagccacagcagcggctgccccatggcctgccccggcagcccctgctgcgtgcccagcacctgctacccccccgagggctacggcaccagctgctgctgcagcgccccctgcgtggccctgctgtgcagacccctgtgcggcgtgagcacctgctgccagcccgcctgctgcgtgcccagcccctgccaggtggcctgctgcgtgcccgtgagctgcaagcccgtgctgtgcgtggccagcttctgccccaccagcggctgctgccagcccttctgccccaccctggtgtacagacccgtgacctggagcacccccaccggctgctag

SEQ ID NO: 11265 - DNA, 666 bp, synthetic construct
  source 1..666: mol_type = other DNA; note = Synthetic coding sequence
atggccaccagcaccatgagcgtgtgcagcagcgcctacagcgacagctggcaggtggacgcctgccccgagagctgctgcgagcccccctgctgcgccaccagctgctgcgcccccgccccctgcctgaccctggtgtgcacccccgtgagctgcgtgagcagcccctgctgccaggccgcctgcgagcccagcccctgccagagcggctgcaccagcagctgcacccccagctgctgccagcagagcagctgccagcccgcctgctgcaccagcagcccctgccagcaggcctgctgcgtgcccgtgtgctgcaagcccgtgtgctgcgtgcccgtgtgctgcaagcccgtgtgctgcaagcccatctgctgcgtgcccgtgtgcagcggcgccagcagcagctgctgccagcagagcagcagacagcccgcctgctgcaccaccagctgctgcagacccagcagcagcgtgagcctgctgtgcagacccgtgtgcagaagcacctgctgcgtgcccatccccagctgctgcgcccccgccagcacctgccagcccagctgctgcagacccgccagctgcgtgagcctgctgtgcagacccacctgcagcagactgagcagcgcctgctgcggcctgagcagcggccagaagagcagctgctag

SEQ ID NO: 11266 - DNA, 768 bp, synthetic construct
  source 1..768: mol_type = other DNA; note = Synthetic coding sequence
atggccgccagcaccatgagcatctgcagcagcgcctgcaccaacagctggcaggtggacgactgccccgagagctgctgcgagctgccctgcggcacccccagctgctgcgcccccgccccctgcctgaccctggtgtgcacccccgtgagctgcgtgagcagcccctgctgccaggccgcctgcgagcccagcgcctgccagagcggctgcaccagcagctgcacccccagctgctgccagcagagcagctgccagcccgcctgctgcaccagcagcccctgccagcaggcctgctgcgtgcccgtgtgctgcaagcccgtgtgctgcgtgcccgtgtgctgcggcgccagcagctgctgccagcagagcagctgccagcccgcctgctgcgccagcagcagctgccagcagagctgcagagtgcccgtgtgctgcaaggccgtgtgctgcgtgcccacctgcagcgagagcagcagcagctgctgccagcagagcagctgccagcccgcctgctgcaccagcagcccctgccagcagagctgctgcgtgagcgtgtgctgcaagcccgtgtgctgcaagagcatctgctgcgtgcccgtgtgcagcggcgccagcagcccctgctgccagcagagcagctgccagcccgcctgctgcaccagcagctgctgcagacccagcagcagcgtgagcctgctgtgcagacccgtgtgcagcagacccgccagctgcagcttcagcagcggccagaagagcagctgctag

SEQ ID NO: 11267 - DNA, 312 bp, synthetic construct
  source 1..312: mol_type = other DNA; note = Synthetic coding sequence
atgtgcggcagctactacagaaactacaacggcggccacggctacggctgctgcggctacggcggcctgggctgcggctacggcggctgcggctacggctgctgcggctacggcggcctgggcttcggctacggcggcctggactgcggctacggcggcctgggctgcggctacggcagcttctgcggctgcggctacagaggcctggactgcggctacggctgcggctacggctacgtgagccacagcttctgcggctgcggctacagatgcggcagcggctacggcagcagcttcggctactactactag

SEQ ID NO: 11268 - DNA, 3117 bp, synthetic construct
  source 1..3117: mol_type = other DNA; note = Synthetic coding sequence
atggtgagcagcgcccagatgggcttcaacctgcaggccctgctggagcagctgagccaggacgagctgagcaagttcaagtacctgatcaccaccttcagcctggcccacgagctgcagaagatcccccacaaggaggtggacaaggccgacggcaagcagctggtggagatcctgaccacccactgcgacagctactgggtggagatggccagcctgcaggtgttcgagaagatgcacagaatggacctgagcgagagagccaaggacgaggtgagagaggccgccctgaagagcttcaacaagagaaagcccctgagcctggccttcaccgagaccaagggcaacgtgatctgcctgggcaaggaggtgttcaagggcaagaagcccgacaaggacaacagatgcagatacatcctgaagaccaagttcagagagatgtggaagagctggcccggcgacagcaaggaggtgcaggtgatggccgagagatacaagatgctgatccccttcagcaaccccagagtgctgcccggccccttcagctacaccgtggtgctgtacggccccgccggcctgggcaagaccaccctggcccagaagctgatgctggactgggccgaggacaacctgatccacaagttcaagtacgccttctacctgagctgcagagagctgagcagactgggcccctgcagcttcgccgagctggtgttcagagactggcccgagctgcaggacgacatcccccacatcctggcccaggccagaaagatcctgttcgtgatcgacggcttcgacgagctgggcgccgcccccggcgccctgatcgaggacatctgcggcgactgggagaagaagaagcccgtgcccgtgctgctgggcagcctgctgaacagagtgatgctgcccaaggccgccctgctggtgaccaccagacccagagccctgagagacctgagaatcctggccgaggagcccatctacatcagagtggagggcttcctggaggaggacagaagagcctacttcctgagacacttcggcgacgaggaccaggccatgagagccttcgagctgatgagaagcaacgccgccctgttccagctgggcagcgcccccgccgtgtgctggatcgtgtgcaccaccctgaagctgcagatggagaagggcgaggaccccgtgcccacctgcctgaccagaaccggcctgttcctgagattcctgtgcagcagattcccccagggcgcccagctgagaggcgccctgagaaccctgagcctgctggccgcccagggcctgtgggcccagaccagcgtgctgcacagagaggacctggagagactgggcgtgcaggagagcgacctgagactgttcctggacggcgacatcctgagacaggacagagtgagcaagggctgctacagcttcatccacctgagcttccagcagttcctgaccgccctgttctacaccctggagaaggaggaggaggaggacagagacggccacacctgggacatcggcgacgtgcagaagctgctgagcggcgtggagagactgagaaaccccgacctgatccaggccggctactacagcttcggcctggccaacgagaagagagccaaggagctggaggccaccttcggctgcagaatgagccccgacatcaagcaggagctgctgagatgcgacatcagctgcaagggcggccacagcaccgtgaccgacctgcaggagctgctgggctgcctgtacgagagccaggaggaggagctggtgaaggaggtgatggcccagttcaaggagatcagcctgcacctgaacgccgtggacgtggtgcccagcagcttctgcgtgaagcactgcagaaacctgcagaagatgagcctgcaggtgatcaaggagaacctgcccgagaacgtgaccgccagcgagagcgacgccgaggtggagagaagccaggacgaccagcacatgctgcccttctggaccgacctgtgcagcatcttcggcagcaacaaggacctgatgggcctggccatcaacgacagcttcctgagcgccagcctggtgagaatcctgtgcgagcagatcgccagcgacacctgccacctgcagagagtggtgttcaagaacatcagccccgccgacgcccacagaaacctgtgcctggccctgagaggccacaagaccgtgacctacctgaccctgcagggcaacgaccaggacgacatgttccccgccctgtgcgaggtgctgagacaccccgagtgcaacctgagatacctgggcctggtgagctgcagcgccaccacccagcagtgggccgacctgagcctggccctggaggtgaaccagagcctgacctgcgtgaacctgagcgacaacgagctgctggacgagggcgccaagctgctgtacaccaccctgagacaccccaagtgcttcctgcagagactgagcctggagaactgccacctgaccgaggccaactgcaaggacctggccgccgtgctggtggtgagcagagagctgacccacctgtgcctggccaagaaccccatcggcaacaccggcgtgaagttcctgtgcgagggcctgagataccccgagtgcaagctgcagaccctggtgctgtggaactgcgacatcaccagcgacggctgctgcgacctgaccaagctgctgcaggagaagagcagcctgctgtgcctggacctgggcctgaaccacatcggcgtgaagggcatgaagttcctgtgcgaggccctgagaaagcccctgtgcaacctgagatgcctgtggctgtggggctgcagcatcccccccttcagctgcgaggacctgtgcagcgccctgagctgcaaccagagcctggtgaccctggacctgggccagaaccccctgggcagcagcggcgtgaagatgctgttcgagaccctgacctgcagcagcggcaccctgagaaccctgagactgaagatcgacgacttcaacgacgagctgaacaagctgctggaggagatcgaggagaagaacccccagctgatcatcgacaccgagaagcaccacccctgggccgagagacccagcagccacgacttcatgatctag

SEQ ID NO: 11269 - DNA, 762 bp, synthetic construct
  source 1..762: mol_type = other DNA; note = Synthetic coding sequence
atggagctggagcagagagagggcaccatggccgccgtgggcttcgaggagttcagcgccccccccggcagcgagctggccctgccccccctgttcggcggccacatcctggagagcgagctggagaccgaggtggagttcgtgagcggcggcctgggcggcagcggcctgagagagagagacgaggaggaggaggccgccagaggcagaagaagaagacagagagagctgaacagaagaaagtaccaggccctgggcagaagatgcagagagatcgagcaggtgaacgagagagtgctgaacagactgcaccaggtgcagagaatcaccagaagactgcagcaggagagaagattcctgatgagagtgctggacagctacggcgacgactacagagccagccagttcaccatcgtgctggaggacgagggcagccagggcaccgacgcccccacccccggcaacgccgagaacgagccccccgagaaggagaccctgagcccccccagaagaacccccgccccccccgagcccggcagccccgcccccggcgagggccccagcggcagaaagagaagaagagtgcccagagacggcagaagagccggcaacgccctgacccccgagctggcccccgtgcagatcaaggtggaggaggacttcggcttcgaggccgacgaggccctggacagcagctgggtgagcagaggccccgacaagctgctgccctaccccaccctggccagccccgccagcgactag

SEQ ID NO: 11270 - DNA, 2679 bp, synthetic construct
  source 1..2679: mol_type = other DNA; note = Synthetic coding sequence
atgctgagaaccgccggcagagacggcctgtgcagactgagcacctacctggaggagctggaggccgtggagctgaagaagttcaagctgtacctgggcaccgccaccgagctgggcgagggcaagatcccctggggcagcatggagaaggccggccccctggagatggcccagctgctgatcacccacttcggccccgaggaggcctggagactggccctgagcaccttcgagagaatcaacagaaaggacctgtgggagagaggccagagagaggacctggtgagagacaccccccccggcggccccagcagcctgggcaaccagagcacctgcctgctggaggtgagcctggtgacccccagaaaggacccccaggagacctacagagactacgtgagaagaaagttcagactgatggaggacagaaacgccagactgggcgagtgcgtgaacctgagccacagatacaccagactgctgctggtgaaggagcacagcaaccccatgcaggtgcagcagcagctgctggacaccggcagaggccacgccagaaccgtgggccaccaggccagccccatcaagatcgagaccctgttcgagcccgacgaggagagacccgagccccccagaaccgtggtgatgcagggcgccgccggcatcggcaagagcatgctggcccacaaggtgatgctggactgggccgacggcaagctgttccagggcagattcgactacctgttctacatcaactgcagagagatgaaccagagcgccaccgagtgcagcatgcaggacctgatcttcagctgctggcccgagcccagcgcccccctgcaggagctgatcagagtgcccgagagactgctgttcatcatcgacggcttcgacgagctgaagcccagcttccacgacccccagggcccctggtgcctgtgctgggaggagaagagacccaccgagctgctgctgaacagcctgatcagaaagaagctgctgcccgagctgagcctgctgatcaccaccagacccaccgccctggagaagctgcacagactgctggagcaccccagacacgtggagatcctgggcttcagcgaggccgagagaaaggagtacttctacaagtacttccacaacgccgagcaggccggccaggtgttcaactacgtgagagacaacgagcccctgttcaccatgtgcttcgtgcccctggtgtgctgggtggtgtgcacctgcctgcagcagcagctggagggcggcggcctgctgagacagaccagcagaaccaccaccgccgtgtacatgctgtacctgctgagcctgatgcagcccaagcccggcgcccccagactgcagcccccccccaaccagagaggcctgtgcagcctggccgccgacggcctgtggaaccagaagatcctgttcgaggagcaggacctgagaaagcacggcctggacggcgaggacgtgagcgccttcctgaacatgaacatcttccagaaggacatcaactgcgagagatactacagcttcatccacctgagcttccaggagttcttcgccgccatgtactacatcctggacgagggcgagggcggcgccggccccgaccaggacgtgaccagactgctgaccgagtacgccttcagcgagagaagcttcctggccctgaccagcagattcctgttcggcctgctgaacgaggagaccagaagccacctggagaagagcctgtgctggaaggtgagcccccacatcaagatggacctgctgcagtggatccagagcaaggcccagagcgacggcagcaccctgcagcagggcagcctggagttcttcagctgcctgtacgagatccaggaggaggagttcatccagcaggccctgagccacttccaggtgatcgtggtgagcaacatcgccagcaagatggagcacatggtgagcagcttctgcctgaagagatgcagaagcgcccaggtgctgcacctgtacggcgccacctacagcgccgacggcgaggacagagccagatgcagcgccggcgcccacaccctgctggtgcagctgagacccgagagaaccgtgctgctggacgcctacagcgagcacctggccgccgccctgtgcaccaaccccaacctgatcgagctgagcctgtacagaaacgccctgggcagcagaggcgtgaagctgctgtgccagggcctgagacaccccaactgcaagctgcagaacctgagactgaagagatgcagaatcagcagcagcgcctgcgaggacctgagcgccgccctgatcgccaacaagaacctgaccagaatggacctgagcggcaacggcgtgggcttccccggcatgatgctgctgtgcgagggcctgagacacccccagtgcagactgcagatgatccagctgagaaagtgccagctggagagcggcgcctgccaggagatggccagcgtgctgggcaccaacccccacctggtggagctggacctgaccggcaacgccctggaggacctgggcctgagactgctgtgccagggcctgagacaccccgtgtgcagactgagaaccctgtggtggctgttcggcatggacctgaacaagatgacccacagcagactggccgccctgagagtgaccaagccctacctggacatcggctgctag

SEQ ID NO: 11271 - DNA, 3189 bp, synthetic construct
  source 1..3189: mol_type = other DNA; note = Synthetic coding sequence
atgctgagaaccgccggcagagacggcctgtgcagactgagcacctacctggaggagctggaggccgtggagctgaagaagttcaagctgtacctgggcaccgccaccgagctgggcgagggcaagatcccctggggcagcatggagaaggccggccccctggagatggcccagctgctgatcacccacttcggccccgaggaggcctggagactggccctgagcaccttcgagagaatcaacagaaaggacctgtgggagagaggccagagagaggacctggtgagagacaccccccccggcggccccagcagcctgggcaaccagagcacctgcctgctggaggtgagcctggtgacccccagaaaggacccccaggagacctacagagactacgtgagaagaaagttcagactgatggaggacagaaacgccagactgggcgagtgcgtgaacctgagccacagatacaccagactgctgctggtgaaggagcacagcaaccccatgcaggtgcagcagcagctgctggacaccggcagaggccacgccagaaccgtgggccaccaggccagccccatcaagatcgagaccctgttcgagcccgacgaggagagacccgagccccccagaaccgtggtgatgcagggcgccgccggcatcggcaagagcatgctggcccacaaggtgatgctggactgggccgacggcaagctgttccagggcagattcgactacctgttctacatcaactgcagagagatgaaccagagcgccaccgagtgcagcatgcaggacctgatcttcagctgctggcccgagcccagcgcccccctgcaggagctgatcagagtgcccgagagactgctgttcatcatcgacggcttcgacgagctgaagcccagcttccacgacccccagggcccctggtgcctgtgctgggaggagaagagacccaccgagctgctgctgaacagcctgatcagaaagaagctgctgcccgagctgagcctgctgatcaccaccagacccaccgccctggagaagctgcacagactgctggagcaccccagacacgtggagatcctgggcttcagcgaggccgagagaaaggagtacttctacaagtacttccacaacgccgagcaggccggccaggtgttcaactacgtgagagacaacgagcccctgttcaccatgtgcttcgtgcccctggtgtgctgggtggtgtgcacctgcctgcagcagcagctggagggcggcggcctgctgagacagaccagcagaaccaccaccgccgtgtacatgctgtacctgctgagcctgatgcagcccaagcccggcgcccccagactgcagcccccccccaaccagagaggcctgtgcagcctggccgccgacggcctgtggaaccagaagatcctgttcgaggagcaggacctgagaaagcacggcctggacggcgaggacgtgagcgccttcctgaacatgaacatcttccagaaggacatcaactgcgagagatactacagcttcatccacctgagcttccaggagttcttcgccgccatgtactacatcctggacgagggcgagggcggcgccggccccgaccaggacgtgaccagactgctgaccgagtacgccttcagcgagagaagcttcctggccctgaccagcagattcctgttcggcctgctgaacgaggagaccagaagccacctggagaagagcctgtgctggaaggtgagcccccacatcaagatggacctgctgcagtggatccagagcaaggcccagagcgacggcagcaccctgcagcagggcagcctggagttcttcagctgcctgtacgagatccaggaggaggagttcatccagcaggccctgagccacttccaggtgatcgtggtgagcaacatcgccagcaagatggagcacatggtgagcagcttctgcctgaagagatgcagaagcgcccaggtgctgcacctgtacggcgccacctacagcgccgacggcgaggacagagccagatgcagcgccggcgcccacaccctgctggtgcagctgagacccgagagaaccgtgctgctggacgcctacagcgagcacctggccgccgccctgtgcaccaaccccaacctgatcgagctgagcctgtacagaaacgccctgggcagcagaggcgtgaagctgctgtgccagggcctgagacaccccaactgcaagctgcagaacctgagactgaagagatgcagaatcagcagcagcgcctgcgaggacctgagcgccgccctgatcgccaacaagaacctgaccagaatggacctgagcggcaacggcgtgggcttccccggcatgatgctgctgtgcgagggcctgagacacccccagtgcagactgcagatgatccagctgagaaagtgccagctggagagcggcgcctgccaggagatggccagcgtgctgggcaccaacccccacctggtggagctggacctgaccggcaacgccctggaggacctgggcctgagactgctgtgccagggcctgagacaccccgtgtgcagactgagaaccctgtggctgaagatctgcagactgaccgccgccgcctgcgacgagctggccagcaccctgagcgtgaaccagagcctgagagagctggacctgagcctgaacgagctgggcgacctgggcgtgctgctgctgtgcgagggcctgagacaccccacctgcaagctgcagaccctgagactgggcatctgcagactgggcagcgccgcctgcgagggcctgagcgtggtgctgcaggccaaccacaacctgagagagctggacctgagcttcaacgacctgggcgactggggcctgtggctgctggccgagggcctgcagcaccccgcctgcagactgcagaagctgtggctggacagctgcggcctgaccgccaaggcctgcgagaacctgtacttcaccctgggcatcaaccagaccctgaccgacctgtacctgaccaacaacgccctgggcgacaccggcgtgagactgctgtgcaagagactgagccaccccggctgcaagctgagagtgctgtggctgttcggcatggacctgaacaagatgacccacagcagactggccgccctgagagtgaccaagccctacctggacatcggctgctag

SEQ ID NO: 11272 - DNA, 3015 bp, synthetic construct
  source 1..3015: mol_type = other DNA; note = Synthetic coding sequence
atgctgagaaccgccggcagagacggcctgtgcagactgagcacctacctggaggagctggaggccgtggagctgaagaagttcaagctgtacctgggcaccgccaccgagctgggcgagggcaagatcccctggggcagcatggagaaggccggccccctggagatggcccagctgctgatcacccacttcggccccgaggaggcctggagactggccctgagcaccttcgagagaatcaacagaaaggacctgtgggagagaggccagagagaggacctggtgagagacaccccccccggcggccccagcagcctgggcaaccagagcacctgcctgctggaggtgagcctggtgacccccagaaaggacccccaggagacctacagagactacgtgagaagaaagttcagactgatggaggacagaaacgccagactgggcgagtgcgtgaacctgagccacagatacaccagactgctgctggtgaaggagcacagcaaccccatgcaggtgcagcagcagctgctggacaccggcagaggccacgccagaaccgtgggccaccaggccagccccatcaagatcgagaccctgttcgagcccgacgaggagagacccgagccccccagaaccgtggtgatgcagggcgccgccggcatcggcaagagcatgctggcccacaaggtgatgctggactgggccgacggcaagctgttccagggcagattcgactacctgttctacatcaactgcagagagatgaaccagagcgccaccgagtgcagcatgcaggacctgatcttcagctgctggcccgagcccagcgcccccctgcaggagctgatcagagtgcccgagagactgctgttcatcatcgacggcttcgacgagctgaagcccagcttccacgacccccagggcccctggtgcctgtgctgggaggagaagagacccaccgagctgctgctgaacagcctgatcagaaagaagctgctgcccgagctgagcctgctgatcaccaccagacccaccgccctggagaagctgcacagactgctggagcaccccagacacgtggagatcctgggcttcagcgaggccgagagaaaggagtacttctacaagtacttccacaacgccgagcaggccggccaggtgttcaactacgtgagagacaacgagcccctgttcaccatgtgcttcgtgcccctggtgtgctgggtggtgtgcacctgcctgcagcagcagctggagggcggcggcctgctgagacagaccagcagaaccaccaccgccgtgtacatgctgtacctgctgagcctgatgcagcccaagcccggcgcccccagactgcagcccccccccaaccagagaggcctgtgcagcctggccgccgacggcctgtggaaccagaagatcctgttcgaggagcaggacctgagaaagcacggcctggacggcgaggacgtgagcgccttcctgaacatgaacatcttccagaaggacatcaactgcgagagatactacagcttcatccacctgagcttccaggagttcttcgccgccatgtactacatcctggacgagggcgagggcggcgccggccccgaccaggacgtgaccagactgctgaccgagtacgccttcagcgagagaagcttcctggccctgaccagcagattcctgttcggcctgctgaacgaggagaccagaagccacctggagaagagcctgtgctggaaggtgagcccccacatcaagatggacctgctgcagtggatccagagcaaggcccagagcgacggcagcaccctgcagcagggcagcctggagttcttcagctgcctgtacgagatccaggaggaggagttcatccagcaggccctgagccacttccaggtgatcgtggtgagcaacatcgccagcaagatggagcacatggtgagcagcttctgcctgaagagatgcagaagcgcccaggtgctgcacctgtacggcgccacctacagcgccgacggcgaggacagagccagatgcagcgccggcgcccacaccctgctggtgcagctgcccgagagaaccgtgctgctggacgcctacagcgagcacctggccgccgccctgtgcaccaaccccaacctgatcgagctgagcctgtacagaaacgccctgggcagcagaggcgtgaagctgctgtgccagggcctgagacaccccaactgcaagctgcagaacctgagactgaagagatgcagaatcagcagcagcgcctgcgaggacctgagcgccgccctgatcgccaacaagaacctgaccagaatggacctgagcggcaacggcgtgggcttccccggcatgatgctgctgtgcgagggcctgagacacccccagtgcagactgcagatgatccagctgagaaagtgccagctggagagcggcgcctgccaggagatggccagcgtgctgggcaccaacccccacctggtggagctggacctgaccggcaacgccctggaggacctgggcctgagactgctgtgccagggcctgagacaccccgtgtgcagactgagaaccctgtggctgaagatctgcagactgaccgccgccgcctgcgacgagctggccagcaccctgagcgtgaaccagagcctgagagagctggacctgagcctgaacgagctgggcgacctgggcgtgctgctgctgtgcgagggcctgagacaccccacctgcaagctgcagaccctgagactggacagctgcggcctgaccgccaaggcctgcgagaacctgtacttcaccctgggcatcaaccagaccctgaccgacctgtacctgaccaacaacgccctgggcgacaccggcgtgagactgctgtgcaagagactgagccaccccggctgcaagctgagagtgctgtggctgttcggcatggacctgaacaagatgacccacagcagactggccgccctgagagtgaccaagccctacctggacatcggctgctag

SEQ ID NO: 11273 - DNA, 327 bp, synthetic construct
  source 1..327: mol_type = other DNA; note = Synthetic coding sequence
atggccagcggcagacccgaggagctgtgggaggccgtggtgggcgccgccgagagattcagagccagaaccggcaccgagctggtgctgctgaccgccgcccccccccccccccccagacccggcccctgcgcctacgccgcccacggcagaggcgccctggccgaggccgccagaagatgcctgcacgacatcgccctggcccacagagccgccaccgccgccagaccccccgcccccccccccgccccccagccccccagccccacccccagcccccccagacccaccctggccagagaggacaacgaggaggacgaggactag

SEQ ID NO: 11274 - DNA, 771 bp, synthetic construct; identical to SEQ ID NO: 10283
  source 1..771: mol_type = other DNA; note = Synthetic coding sequence

SEQ ID NO: 11275 - DNA, 771 bp, synthetic construct; identical to SEQ ID NO: 10283
  source 1..771: mol_type = other DNA; note = Synthetic coding sequence

SEQ ID NO: 11276 - DNA, 771 bp, synthetic construct; identical to SEQ ID NO: 10283
  source 1..771: mol_type = other DNA; note = Synthetic coding sequence

SEQ ID NO: 11277 - DNA, 771 bp, synthetic construct; identical to SEQ ID NO: 10283
  source 1..771: mol_type = other DNA; note = Synthetic coding sequence

SEQ ID NO: 11278 - DNA, 831 bp, synthetic construct
  source 1..831: mol_type = other DNA; note = Synthetic coding sequence
atgagcttcgagggcggcgacggcgccggccccgccatgctggccaccggcaccgccagaatggccagcggcagacccgaggagctgtgggaggccgtggtgggcgccgccgagagattcagagccagaaccggcaccgagctggtgctgctgaccgccgcccccccccccccccccagacccggcccctgcgcctacgccgcccacggcagaggcgccctggccgaggccgccagaagatgcctgcacgacatcgccctggcccacagagccgccaccgccgccagaccccccgcccccccccccgccccccagccccccagccccacccccagcccccccagacccaccctggccagagaggacaacgaggaggacgaggacgagcccaccgagaccgagaccagcggcgagcagctgggcatcagcgacaacggcggcctgttcgtgatggacgaggacgccaccctgcaggacctgccccccttctgcgagagcgaccccgagagcaccgacgacggcagcctgagcgaggagacccccgccggcccccccacctgcagcgtgccccccgccagcgccctgcccacccagcagtacgccaagagcctgcccgtgagcgtgcccgtgtggggcttcaaggagaagagaaccgaggccagaagcagcgacgaggagaacggcccccccagcagccccgacctggacagaatcgccgccagcatgagagccctggtgctgagagaggccgaggacacccaggtgttcggcgacctgcccagacccagactgaacaccagcgacttccagaagctgaagagaaagtactag

SEQ ID NO: 11279 - DNA, 906 bp, synthetic construct; identical to SEQ ID NO: 10199
  source 1..906: mol_type = other DNA; note = Synthetic coding sequence

SEQ ID NO: 11280 - DNA, 612 bp, synthetic construct
  source 1..612: mol_type = other DNA; note = Synthetic coding sequence
atggccgaggtgcaggtgctggtgctggacggcagaggccacctgctgggcagactggccgccatcgtggccaagcaggtgctgctgggcagaaaggtggtggtggtgagatgcgagggcatcaacatcagcggcaacttctacagaaacaagctgaagtacctggccttcctgagaaagagaatgaacaccaaccccagcagaggcccctaccacttcagagcccccagcagaatcttctggagaaccgtgagaggcatgctgccccacaagaccaagagaggccaggccgccctggacagactgaaggtgttcgacggcatcccccccccctacgacaagaagaagagaatggtggtgcccgccgccctgaaggtggtgagactgaagcccaccagaaagttcgcctacctgggcagactggcccacgaggtgggctggaagtaccaggccgtgaccgccaccctggaggagaagagaaaggagaaggccaagatccactacagaaagaagaagcagctgatgagactgagaaagcaggccgagaagaacgtggagaagaagatcgacaagtacaccgaggtgctgaagacccacggcctgctggtgtag

SEQ ID NO: 11281 - DNA, 690 bp, synthetic construct; identical to SEQ ID NO: 9325
  source 1..690: mol_type = other DNA; note = Synthetic coding sequence

SEQ ID NO: 11282 - DNA, 2283 bp, synthetic construct
  source 1..2283: mol_type = other DNA; note = Synthetic coding sequence
atgatggaggagagagccgccgccgccgtggccgccgccgccagcagctgcagacccctgggcagcggcgccggccccggccccaccggcgccgcccccgtgagcgcccccgcccccggccccggccccgccggcaagggcggcggcggcggcggcagccccggccccaccgccggccccgagcccctgagcctgcccggcatcctgcacttcatccagcacgagtgggccagattcgaggccgagaaggccagatgggaggccgagagagccgagctgcaggcccaggtggccttcctgcagggcgagagaaagggccaggagaacctgaagaccgacctggtgagaagaatcaagatgctggagtacgccctgaagcaggagagagccaagtaccacaagctgaagttcggcaccgacctgaaccagggcgagaagaaggccgacgtgagcgagcaggtgagcaacggccccgtggagagcgtgaccctggagaacagccccctggtgtggaaggagggcagacagctgctgagacagtacctggaggaggtgggctacaccgacaccatcctggacatgagaagcaagagagtgagaagcctgctgggcagaagcctggagctgaacggcgccgtggagcccagcgagggcgcccccagagccccccccggccccgccggcctgagcggcggcgagagcctgctggtgaagcagatcgaggagcagatcaagagaaacgccgccggcaaggacggcaaggagagactgggcggcagcgtgctgggccagatccccttcctgcagaactgcgaggacgaggacagcgacgaggacgacgagctggacagcgtgcagcacaagaagcagagagtgaagctgcccagcaaggccctggtgcccgagatggaggacgaggacgaggaggacgacagcgaggacgccatcaacgagttcgacttcctgggcagcggcgaggacggcgagggcgcccccgaccccagaagatgcaccgtggacggcagcccccacgagctggagagcagaagagtgaagctgcagggcatcctggccgacctgagagacgtggacggcctgccccccaaggtgaccggccccccccccggcaccccccagcccagaccccacgagggcagcttcggcttcagcagcgacgtgttcatcatggacaccatcggcggcggcgaggtgagcctgggcgacctggccgacctgaccgtgaccaacgacaacgacctgagctgcgacctgagcgacagcaaggacgccttcaagaagacctggaaccccaagttcaccctgagaagccactacgacggcatcagaagcctggccttccaccacagccagagcgccctgctgaccgccagcgaggacggcaccctgaagctgtggaacctgcagaaggccgtgaccgccaagaagaacgccgccctggacgtggagcccatccacgccttcagagcccacagaggccccgtgctggccgtggccatgggcagcaacagcgagtactgctacagcggcggcgccgacgcctgcatccacagctggaagatccccgacctgagcatggacccctacgacggctacgaccccagcgtgctgagccacgtgctggagggccacggcgacgccgtgtggggcctggccttcagccccaccagccagagactggccagctgcagcgccgacggcaccgtgagaatctgggaccccagcagcagcagccccgcctgcctgtgcaccttccccaccgccagcgagcacggcgtgcccaccagcgtggccttcaccagcaccgagcccgcccacatcgtggccagcttcagaagcggcgacaccgtgctgtacgacatggaggtgggcagcgccctgctgaccctggagagcagaggcagcagcggccccacccagatcaaccaggtggtgagccaccccaaccagcccctgaccatcaccgcccacgacgacagaggcatcagattcctggacaacagaaccggcaagcccgtgcacagcatggtggcccacctggacgccgtgacctgcctggccgtggaccccaacggcgccttcctgatgagcggcagccacgactgcagcctgagactgtggagcctggacaacaagacctgcgtgcaggagatcaccgcccacagaaagaagcacgaggaggccatccacgccgtggcctgccaccccagcaaggccctgatcgccagcgccggcgccgacgccctggccaaggtgttcgtgtag

SEQ ID NO: 11283 - DNA, 327 bp, synthetic construct
  source 1..327: mol_type = other DNA; note = Synthetic coding sequence
atgacccccgaggagctgcagaagagagaggaggaggagttcaacaccggccccctgagcgtgctgacccagagcgtgaagaacaacacccaggtgctgatcaactgcagaaacaacaagaagctgctgggcagagtgaaggccttcgacagacactgcaacatggtgctggagaacgtgaaggagatgtggaccgaggtgcccaagagcggcaagggcaagaagaagagcaagcccgtgaacaaggacagatacatcagcaagatgttcctgagaggcgacagcgtgatcgtggtgctgagaaaccccctgatcgccggcaagtag

SEQ ID NO: 11284 - DNA, 1275 bp, synthetic construct
  source 1..1275: mol_type = other DNA; note = Synthetic coding sequence
atggtgcagaccctgtactacagcgccgaccacaagctgctggacggcaacctgctggacggccaggccgaggtgttcggcagcgacgacgaccacatccagttcgtgcagaagaagccccccagagagaacggccacaagcagatcagcagcagcagcaccggctgcctgagcagccccaacgccaccgtgcagagccccaagcacgagtggaagatcgtggccagcgagaagaccagcaacaacacctacctgtgcctggccgtgctggacggcatcttctgcgtgatcttcctgcacggcagaaacagcccccagagcagccccaccagcacccccaagctgagcaagagcctgagcttcgagatgcagcaggacgagctgatcgagaagcccatgagccccatgcagtacgccagaagcggcctgggcaccgccgagatgaacggcaagctgatcgccgccggcggctacaacagagaggagtgcctgagaaccgtggagtgctacaacccccacaccgaccactggagcttcctggcccccatgagaacccccagagccagattccagatggccgtgctgatgggccagctgtacgtggtgggcggcagcaacggccacagcgacgacctgagctgcggcgagatgtacgacagcaacatcgacgactggatccccgtgcccgagctgagaaccaacagatgcaacgccggcgtgtgcgccctgaacggcaagctgtacatcgtgggcggcagcgacccctacggccagaagggcctgaagaactgcgacgtgttcgaccccgtgaccaagctgtggaccagctgcgcccccctgaacatcagaagacaccagagcgccgtgtgcgagctgggcggctacctgtacatcatcggcggcgccgagagctggaactgcctgaacaccgtggagagatacaaccccgagaacaacacctggaccctgatcgcccccatgaacgtggccagaagaggcgccggcgtggccgtgctgaacggcaagctgttcgtgtgcggcggcttcgacggcagccacgccatcagctgcgtggagatgtacgaccccaccagaaacgagtggaagatgatgggcaacatgaccagccccagaagcaacgccggcatcgccaccgtgggcaacaccatctacgccgtgggcggcttcgacggcaacgagttcctgaacaccgtggaggtgtacaacctggagagcaacgagtggagcccctacaccaagatcttccagttctag

SEQ ID NO: 11285 - DNA, 483 bp, synthetic construct
  source 1..483: mol_type = other DNA; note = Synthetic coding sequence
atgaacaacgccagatacctgtggaagagaatcccccccgccatcaagagcgccaacagcgagctgggcggcatctggagcgtgggccagagaatctggcagagagacttccccggcatctacaccaccatcaacgcccaccagtggagcgagaccgtgcagcccatcatggaggccctgagagacgccaccagaagaagagccttcgccctggtgagccaggcctacaccagcatcatcgccgacgacttcgccgccttcgtgggcctgcccgtggaggaggccgtgaagggcatcctggagcagggctggcaggccgacagcaccaccagaatggtgctgcccagaaagcccgtggccggcgccctggacgtgagcttcaacaagttcatccccctgagcgagcccgcccccgtgccccccatccccaacgagcagcagctggccagactgaccgactacgtggccttcctggagaactag

SEQ ID NO: 11286 - DNA, 927 bp, synthetic construct
  source 1..927: mol_type = other DNA; note = Synthetic coding sequence
atgatggaggagatcagcatcatggtggcctacgacgcccacgtgttcagccagctgcacgacgaggacttcctgaccagcctggtggccatcagcaagcccagaagcatggtgcccaccaagaagctgaagaagtacgagaaggagtaccagaccatgagagagagccagctgcagcaggaggaccccatggacagatacaagagagagaacagaagactgcaggaggccagcatgagactggagcaggagaacgacgacctggcccacgagctggtgaccagcaagatcgccctgagaaacgacctggaccaggccgaggacaaggccgacgtgctgaacaaggagctgctgctgaccaagcagagactggtggagaccgaggaggagaagagaaagcaggaggaggagaccgcccagctgaaggaggtgttcagaaagcagctggagaaggccgagtacgagatcaagaagaccaccgccatcatcgccgagtacaagcagatctgcagccagctgagcaccagactggagaagcagcaggccgccagcaaggaggagctggaggtggtgaagggcaagatgatggcctgcaagcactgcagcgacatcttcagcaaggagggcgccctgaagctggccgccaccggcagagaggaccagggcatcgagaccgacgacgagaaggacagcctgaagaagcagctgagagagatggagctggagctggcccagaccaagctgcagctggtggaggccaagtgcaagatccaggagctggagcaccagagaggcgccctgatgaacgagatccaggccgccaagaacagctggttcagcaagaccctgaacagcatcaagaccgccaccggcacccagcccctgcagcccgcccccgtgacccagccccccaaggagagcacctag

SEQ ID NO: 11287 - DNA, 3600 bp, synthetic construct; identical to SEQ ID NO: 9377
  source 1..3600: mol_type = other DNA; note = Synthetic coding sequence

SEQ ID NO: 11288 - DNA, 2337 bp, synthetic construct
  source 1..2337: mol_type = other DNA; note = Synthetic coding sequence
agaatccaggagcagctggagagcagcttcaccggcctgaccgacgagaaggtgaaggcctacctgagcctgcacccccaggtgctggacgagttcgtgagcgagagcgtgagcgccgagaccgtggagaagtggctgaagagaaagaacaacaagagcgaggacgagagcgcccccaaggaggtgagcagataccaggacaccaacatgcagggcgtggtgtacgagctgaacagctacatcgagcagagactggacaccggcggcgacaaccagctgctgctgtacgagctgagcagcatcatcaagatcgccaccaaggccgacggcttcgccctgtacttcctgggcgagtgcaacaacagcctgtgcatcttcaccccccccggcatcaaggagggcaagcccagactgatccccgccggccccatcacccagggcaccaccgtgagcgcctacgtggccaagagcagaaagaccctgctggtggaggacatcctgggcgacgagagattccccagaggcaccggcctggagagcggcaccagaatccagagcgtgctgtgcctgcccatcgtgaccgccatcggcgacctgatcggcatcctggagctgtacagacactggggcaaggaggccttctgcctgagccaccaggaggtggccaccgccaacctggcctgggccagcgtggccatccaccaggtgcaggtgtgcagaggcctggccaagcagaccgagctgaacgacttcctgctggacgtgagcaagacctacttcgacaacatcgtggccatcgacagcctgctggagcacatcatgatctacgccaagaacctggtgaacgccgacagatgcgccctgttccaggtggaccacaagaacaaggagctgtacagcgacctgttcgacatcggcgaggagaaggagggcaagcccgtgttcaagaagaccaaggagatcagattcagcatcgagaagggcatcgccggccaggtggccagaaccggcgaggtgctgaacatccccgacgcctacgccgaccccagattcaacagagaggtggacctgtacaccggctacaccaccagaaacatcctgtgcatgcccatcgtgagcagaggcagcgtgatcggcgtggtgcagatggtgaacaagatcagcggcagcgccttcagcaagaccgacgagaacaacttcaagatgttcgccgtgttctgcgccctggccctgcactgcgccaacatgtaccacagaatcagacacagcgagtgcatctacagagtgaccatggagaagctgagctaccacagcatctgcaccagcgaggagtggcagggcctgatgcagttcaccctgcccgtgagactgtgcaaggagatcgagctgttccacttcgacatcggccccttcgagaacatgtggcccggcatcttcgtgtacatggtgcacagaagctgcggcaccagctgcttcgagctggagaagctgtgcagattcatcatgagcgtgaagaagaactacagaagagtgccctaccacaactggaagcacgccgtgaccgtggcccactgcatgtacgccatcctgcagaacaaccacaccctgttcaccgacctggagagaaagggcctgctgatcgcctgcctgtgccacgacctggaccacagaggcttcagcaacagctacctgcagaagttcgaccaccccctggccgccctgtacagcaccagcaccatggagcagcaccacttcagccagaccgtgagcatcctgcagctggagggccacaacatcttcagcaccctgagcagcagcgagtacgagcaggtgctggagatcatcagaaaggccatcatcgccaccgacctggccctgtacttcggcaacagaaagcagctggaggagatgtaccagaccggcagcctgaacctgaacaaccagagccacagagacagagtgatcggcctgatgatgaccgcctgcgacctgtgcagcgtgaccaagctgtggcccgtgaccaagctgaccgccaacgacatctacgccgagttctgggccgagggcgacgagatgaagaagctgggcatccagcccatccccatgatggacagagacaagaaggacgaggtgccccagggccagctgggcttctacaacgccgtggccatcccctgctacaccaccctgacccagatcctgccccccaccgagcccctgctgaaggcctgcagagacaacctgagccagtgggagaaggtgatcagaggcgaggagaccgccacctggatcagcagccccagcgtggcccagaaggccgccgccagcgaggactag

SEQ ID NO: 11289 - DNA, 1281 bp, synthetic construct; identical to SEQ ID NO: 10654
  source 1..1281: mol_type = other DNA; note = Synthetic coding sequence

SEQ ID NO: 11290 - DNA, 1779 bp, synthetic construct
  source 1..1779: mol_type = other DNA; note = Synthetic coding sequence
atggacgtgatgctggagaactactgccacctgatcagcgtgggctgccacatgaccaagcccgacgtgatcctgaagctggagagaggcgaggagccctggaccagcttcgccggccacacctgcctggaggagaactggaaggccgaggacttcctggtgaagttcaaggagcaccaggagaagtacagcagaagcgtggtgagcatcaaccacaagaagctggtgaaggagaagagcaagatctacgagaagaccttcaccctgggcaagaaccccgtgaacagcaagaacctgccccccgagtacgacacccacggcagaatcctgaagaacgtgagcgagctgatcatcagcaacctgaaccccgccagaaagagactgagcgagtacaacggctacggcaagagcctgctgagcaccaagcaggagaccacccaccccgaggtgaagagccacaaccagagcgccagagccttcagccacaacgaggtgctgatgcagtaccagaagaccgagacccccgcccagagcttcggctacaacgactgcgagaagagcttcctgcagagaggcggcctgatcacccacagcagaccctacaagggcgagaaccccagcgtgtacaacaagaagagaagagccaccaacatcgagaagaagcacacctgcaacgagtgcggcaagagcttctgcagaaagagcgtgctgatcctgcaccagggcatccacagcgaggagaagccctaccagtgccaccagtgcggcaacgccttcagaagaaagagctacctgatcgaccaccagagaacccacaccggcgagaagcccttcgtgtgcaacgagtgcggcaagagcttcagactgaagaccgccctgaccgaccaccagagaacccacaccggcgagaagagctacgagtgcctgcagtgcagaaacgccttcagactgaagagccacctgatcagacaccagagaacccacaccggcgagaagccctacgagtgcaacgactgcggcaagagcttcagacagaagaccaccctgagcctgcaccagagaatccacaccggcgagaagccctacatctgcaaggagtgcggcaagagcttccaccagaaggccaacctgaccgtgcaccagagaacccacaccggcgagaagccctacatctgcaacgagtgcggcaagagcttcagccagaagaccaccctggccctgcacgagaagacccacaacgaggagaagccctacatctgcagcgagtgcggcaagagcttcagacagaagaccaccctggtggcccaccagagaacccacaccggcgagaagagctacgagtgcccccactgcggcaaggccttcagaatgaagagctacctgatcgaccaccacagaacccacaccggcgagaagccctacgagtgcaacgagtgcggcaagagcttcagccagaagaccaacctgaacctgcaccagagaatccacaccggcgagaagccctacgtgtgcaacgagtgcggcaagagcttcagacagaaggccaccctgaccgtgcaccagaagatccacaccggccagaagagctacgagtgcccccagtgcggcaaggccttcagcagaaagagctacctgatccaccaccagagaacccacaccggcgagaagccctacaagtgcagcgagtgcggcaagtgcttcagacagaagaccaacctgatcgtgcaccagagaacccacaccggcggcgaggacggcctgaccggctgcctgagctag

SEQ ID NO: 11291 - DNA, 645 bp, synthetic construct
  source 1..645: mol_type = other DNA; note = Synthetic coding sequence
atggaggtgaccggcgtgagcgcccccaccgtgaccgtgttcatcagcagcagcctgaacaccttcagaagcgagaagagatacagcagaagcctgaccatcgccgagttcaagtgcaagctggagctgctggtgggcagccccgccagctgcatggagctggagctgtacggcgtggacgacaagttctacagcaagctggaccaggaggacgccctgctgggcagctaccccgtggacgacggctgcagaatccacgtgatcgaccacagcggcgccagactgggcgagtacgaggacgtgagcagagtggagaagtacaccatcagccaggaggcctacgaccagagacaggacaccgtgagaagcttcctgaagagaagcaagctgggcagatacaacgaggaggagagagcccagcaggaggccgaggccgcccagagactggccgaggagaaggcccaggccagcagcatccccgtgggcagcagatgcgaggtgagagccgccggccagagccccagaagaggcaccgtgatgtacgtgggcgcctggctggccggccccgtgcccggcagcagagcccccagacccggcggcaacgtgggcggcaccgtggagcccagaagacccagaagcgcctag

SEQ ID NO: 11292 - DNA, 189 bp, synthetic construct
  source 1..189: mol_type = other DNA; note = Synthetic coding sequence
atgagcatccagtggaagaccagacagctgcagagcaagctgcacgaggccgacatcgtggtgctgggcagccccaagcccgaggagatccccctgacctggatccagcccggcaccaccgtgctgaactgcagccacgacttcctgagcgagagcctgatcatcatcagaagaatggccatcttctag

SEQ ID NO: 11293 - DNA, 1269 bp, synthetic construct
  source 1..1269: mol_type = other DNA; note = Synthetic coding sequence
atgtaccccaaccccctgatctactgcacctgctgggacccctggaacctgggccccagaaagctgatcaagaccccccagctgcccagaaagaacagcaccggcagcagcaagctgacccccctggtgcccgcccccaagaaccacaactacctgcagcccaccaagcccgtggtgagccccaagatgaagatccacagcgccagacaggaggagaccaacaagagcttctacgaggtgatcaacgtgagccccggctaccagctggtgagaaacagagagcagatcagcgtgaccctgggcgacgagatgttcgacagaaagaagagatgggagagcgagatccccgacaagggcagattcagcagaaccaacatcatcagcgacctggaggagcagatcagcgagctgaccgccatcatcgagcagatgaacagagaccaccagagcgcccagaagctgctgagcagcgagatggacctgagatgcgccgagatgaagcagaacttcgagaacaagaacagagagctgaaggaggcccacgaggccgagctgagcgagctggagaacaactacaaggccgccctgaaggccgagaagctggccgcccaggagaagctggaggagatgggcaaggagtacaagtacctgaagaacatgttcagaacctaccaggacagcatctacgacgagatggaggagaagtggagcaagcagaaggccaagtggaagaaggacgagaagttcgagagagagaacatcctgctgcagcagaagaagaagatgaccaagaagttcgagatggagagcggcgaggaggacaagaagatcaacgagagctgcagcgccgtgttcgagaacttcatccaggagaaggaggagctgctgaagcagcaccagagcgacaccctgcagctggaggagctgagaaagaccaaggaggtgatgcaggaggagctgcacgcccaggccctgatcctggagagcctgaacaccaacctgtactacacccagctggagctgcagaaggagaaggccatcgtgggcaacctggagaagatgctgcagaccaagttcgccgagaccgaggagaagtacaagcacaccatccagatcctgaccgaggagaacatccacctgaagcagaagatcatcagcaagaacgaggagatctgcgagggctgcagcggcagactggccagcatcaccgtgagcaaggacgacagcgacaccgtgcaggacggcagcaagaagggccaggagagctag

SEQ ID NO: 11294 - DNA, 1380 bp, synthetic construct
  source 1..1380: mol_type = other DNA; note = Synthetic coding sequence
atggtgcccttcggccccttcgccttcatgcccggcaagctggtgcacaccaacgaggtgaccgtgctgctgggcgacaactggttcgccaagtgcagcgccaagcaggccgtgggcctggtggagcacagaaaggagcacgtgagaaagaccatcgacgacctgaagaaggtgatgaagaacttcgagagcagagtggagttcaccgaggacctgcagaagatgagcgacgccgccggcgacatcgtggacatcagagaggagatcaagtgcgacttcgagttcaaggccaagcacagaatcgcccacaagccccacagcaagcccaagaccagcgacatcttcgaggccgacatcgccaacgacgtgaagagcaaggacctgctggccgacaaggagctgtgggccagactggaggagctggagagacaggaggagctgctgggcgagctggacagcaagcccgacaccgtgatcgccaacggcgaggacaccaccagcagcgaggaggagaaggaggacagaaacaccaacgtgaacgccatgcaccaggtgaccgacagccacaccccctgccacaaggacgtggccagcagcgagcccttcagcggccaggtgaacagccagctgaactgcagcgtgaacggcagcagcagctaccacagcgacgacgacgacgacgacgacgacgacgacgacgacgacaacatcgacgacgacgacggcgacaacgaccacgaggccctgggcgtgggcgacaacagcatccccaccatctacttcagccacaccgtggagcccaagagagtgagaatcaacaccggcaagaacaccaccctgaagttcagcgagaagaaggaggaggccaagagaaagagaaagaacagcaccggcagcggccacagcgcccaggagctgcccaccatcagaacccccgccgacatctacagagccttcgtggacgtggtgaacggcgagtacgtgcccagaaagagcatcctgaagagcagaagcagagagaacagcgtgtgcagcgacaccagcgagagcagcgccgccgagttcgacgacagaagaggcgtgctgagaagcatcagctgcgaggaggccacctgcagcgacaccagcgagagcatcctggaggaggagccccaggagaaccagaagaagctgctgcccctgagcgtgacccccgaggccttcagcggcaccgtgatcgagaaggagttcgtgagccccagcctgacccccccccccgccatcgcccaccccgccctgcccaccatccccgagagaaaggaggtgctgctggaggccagcgaggagaccggcaagagagtgagcaagttcaaggccgccagactgcagcagaaggactag

SEQ ID NO: 11295 - DNA, 1068 bp, synthetic construct
  source 1..1068: mol_type = other DNA; note = Synthetic coding sequence
atgagagagatcgtgcacatccaggccggccagtgcggcaaccagatcggcgccaagttctgggaggtgatcagcgacgagcacggcatcgaccccaccggcagctaccacggcgacagcgacctgcagctgctgacccacagcctgggcggcggcaccggcagcggcatgggcaccctgctgatcagcaagatcagagaggagtaccccgacagaatcatgaacaccttcagcgtgatgcccagccccaaggtgagcgacaccgtggtggagccctacaacgccaccctgagcgtgcaccagctggtggagaacaccgacgagacctacagcatcgacaacgaggccctgtacgacatctgcttcagaaccctgaagctgaccacccccacctacggcgacctgaaccacctggtgagcgccaccatgagcggcgtgaccacctgcctgagattccccggccagctgaacgccgacctgagaaagctggccgtgaacatggtgcccttccccagactgcacttcttcatgcccggcttcgcccccctgaccagcagaggcagccagcagtacagagccctgaccgtgcccgagctgacccagcagatgttcgacagcaagaacatgatggccgcctgcgaccccagacacggcagatacctgaccgtggccgccatcttcagaggcagaatgagcatgaaggaggtggacgagcagatgctgaacgtgcagaacaagaacagcagctacttcgtggagtggatccccaacaacgtgaagaccgccgtgtgcgacatcccccccagaggcctgaagatgagcgccaccttcatcggcaacagcaccgccatccaggagctgttcaagagaatcagcgagcagttcaccgccatgttcagaagaaaggccttcctgcactggtacaccggcgagggcatggacgagatggagttcaccgaggccgagagcaacatgaacgacctggtgagcgagtaccagcagtaccaggacgccaccgccgacgagcagggcgagttcgaggaggaggagggcgaggacgaggcctag

SEQ ID NO: 11296 - DNA, 255 bp, synthetic construct; identical to SEQ ID NO: 10297
  source 1..255: mol_type = other DNA; note = Synthetic coding sequence

SEQ ID NO: 11297 - DNA, 1416 bp, synthetic construct
  source 1..1416: mol_type = other DNA; note = Synthetic coding sequence
atgaagatgcaggtgttctgcaagagcatcgaggacatgaccgtgaaggccgagcagagccagcaggaggccgccaagaagcacgaggaggagaagaaggagctggagagaaagctgagcgacctggagaagaagatggagaccagccacaaccagtgccaggagctgaaggccagatacgagagagccaccagcgagaccaagaccaagcacgaggagatcctgcagaacctgcagaagaccctgctggacaccgaggacaagctgaagggcgccagagaggagaacagcggcctgctgcaggagctggaggagctgagaaagcaggccgacaaggccaaggccgcccagaccgccgaggacgccatgcagatcatggagcagatgaccaaggagaagaccgagaccctggccagcctggaggacaccaagcagaccaacgccaagctgcagaacgagctggacaccctgaaggagaacaacctgaagaacgtggaggagctgaacaagagcaaggagctgctgaccgtggagaaccagaagatggaggagttcagaaaggagatcgagaccctgaagcaggccgccgcccagaagagccagcagctgagcgccctgcaggaggagaacgtgaagctggccgaggagctgggcagaagcagagacgaggtgaccagccaccagaagctggaggaggagagaagcgtgctgaacaaccagctgctggagatgaagaagagagagagcaagttcatcaaggacgccgacgaggagaaggccagcctgcagaagagcatcagcatcaccagcgccctgctgaccgagaaggacgccgagctggagaagctgagaaacgaggtgaccgtgctgagaggcgagaacgccagcgccaagagcctgcacagcgtggtgcagaccctggagagcgacaaggtgaagctggagctgaaggtgaagaacctggagctgcagctgaaggagaacaagagacagctgagcagcagcagcggcaacaccgacacccaggccgacgaggacgagagagcccaggagagccaggtgatgatcgacttcctgaacagcgtgatcgtggacctgcagagaaagaaccaggacctgaagatgaaggtggagatgatgagcgaggccgccctgaacggcaacggcgacgacctgaacaactacgacagcgacgaccaggagaagcagagcaagaagaagcccagactgttctgcgacatctgcgactgcttcgacctgcacgacaccgaggactgccccacccaggcccagatgagcgaggaccccccccacagcacccaccacggcagcagaggcgaggagagaccctactgcgagatctgcgagatgttcggccactgggccaccaactgcaacgacgacgagaccttctag

SEQ ID NO: 11298 - DNA, 1602 bp, synthetic construct
  source 1..1602: mol_type = other DNA; note = Synthetic coding sequence
atgagcagctgcgtgagcagccagcccagcagcaacagagccgccccccaggacgagctgggcggcagaggcagcagcagcagcgagagccagaagccctgcgaggccctgagaggcctgagcagcctgagcatccacctgggcatggagagcttcatcgtggtgaccgagtgcgagcccggctgcgccgtggacctgggcctggccagagacagacccctggaggccgacggccaggaggtgcccctggacaccagcggcagccaggccagaccccacctgagcggcagaaagctgagcctgcaggagagaagccagggcggcctggccgccggcggcagcctggacatgaacggcagatgcatctgccccagcctgccctacagccccgtgagcagcccccagagcagccccagactgcccagaagacccaccgtggagagccaccacgtgagcatcaccggcatgcaggactgcgtgcagctgaaccagtacaccctgaaggacgagatcggcaagggcagctacggcgtggtgaagctggcctacaacgagaacgacaacacctactacgccatgaaggtgctgagcaagaagaagctgatcagacaggccggcttccccagaagacccccccccagaggcaccagacccgcccccggcggctgcatccagcccagaggccccatcgagcaggtgtaccaggagatcgccatcctgaagaagctggaccaccccaacgtggtgaagctggtggaggtgctggacgaccccaacgaggaccacctgtacatggtgttcgagctggtgaaccagggccccgtgatggaggtgcccaccctgaagcccctgagcgaggaccaggccagattctacttccaggacctgatcaagggcatcgagtacctgcactaccagaagatcatccacagagacatcaagcccagcaacctgctggtgggcgaggacggccacatcaagatcgccgacttcggcgtgagcaacgagttcaagggcagcgacgccctgctgagcaacaccgtgggcacccccgccttcatggcccccgagagcctgagcgagaccagaaagatcttcagcggcaaggccctggacgtgtgggccatgggcgtgaccctgtactgcttcgtgttcggccagtgccccttcatggacgagagaatcatgtgcctgcacagcaagatcaagagccaggccctggagttccccgaccagcccgacatcgccgaggacctgaaggacctgatcaccagaatgctggacaagaaccccgagagcagaatcgtggtgcccgagatcaagctgcacccctgggtgaccagacacggcgccgagcccctgcccagcgaggacgagaactgcaccctggtggaggtgaccgaggaggaggtggagaacagcgtgaagcacatccccagcctggccaccgtgatcctggtgaagaccatgatcagaaagagaagcttcggcaaccccttcgagggcagcagaagagaggagagaagcctgagcgcccccggcaacctgctgaccaagaagcccaccagagagtgcgagagcctgagcgagctgaagacctag

SEQ ID NO: 11299 - DNA, 1671 bp, synthetic construct
  source 1..1671: mol_type = other DNA; note = Synthetic coding sequence
atgagcagctgcgtgagcagccagcccagcagcaacagagccgccccccaggacgagctgggcggcagaggcagcagcagcagcgagagccagaagccctgcgaggccctgagaggcctgagcagcctgagcatccacctgggcatggagagcttcatcgtggtgaccgagtgcgagcccggctgcgccgtggacctgggcctggccagagacagacccctggaggccgacggccaggaggtgcccctggacaccagcggcagccaggccagaccccacctgagcggcagaaagctgagcctgcaggagagaagccagggcggcctggccgccggcggcagcctggacatgaacggcagatgcatctgccccagcctgccctacagccccgtgagcagcccccagagcagccccagactgcccagaagacccaccgtggagagccaccacgtgagcatcaccggcatgcaggactgcgtgcagctgaaccagtacaccctgaaggacgagatcggcaagggcagctacggcgtggtgaagctggcctacaacgagaacgacaacacctactacgccatgaaggtgctgagcaagaagaagctgatcagacaggccggcttccccagaagacccccccccagaggcaccagacccgcccccggcggctgcatccagcccagaggccccatcgagcaggtgtaccaggagatcgccatcctgaagaagctggaccaccccaacgtggtgaagctggtggaggtgctggacgaccccaacgaggaccacctgtacatggtgttcgagctggtgaaccagggccccgtgatggaggtgcccaccctgaagcccctgagcgaggaccaggccagattctacttccaggacctgatcaagggcatcgagtacctgcactaccagaagatcatccacagagacatcaagcccagcaacctgctggtgggcgaggacggccacatcaagatcgccgacttcggcgtgagcaacgagttcaagggcagcgacgccctgctgagcaacaccgtgggcacccccgccttcatggcccccgagagcctgagcgagaccagaaagatcttcagcggcaaggccctggacgtgtgggccatgggcgtgaccctgtactgcttcgtgttcggccagtgccccttcatggacgagagaatcatgtgcctgcacagcaagatcaagagccaggccctggagttccccgaccagcccgacatcgccgaggacctgaaggacctgatcaccagaatgctggacaagaaccccgagagcagaatcgtggtgcccgagatcaagctgcacccctgggtgaccagacacggcgccgagcccctgcccagcgaggacgagaactgcaccctggtggaggtgaccgaggaggaggtggagaacagcgtgaagcacatccccagcctggccaccgtgatcctggtgaagaccatgatcagaaagagaagcttcggcaaccccttcgagggcagcagaagagaggagagaagcctgagcgcccccggcaacctgctgaccaagaagcccaccagagagtgcgagagcctgagcgagctgaagggcaccaagaagaagaagggcctggacagcatgaccagcaccgtggccgccggctggctggacagaagagtgtag

SEQ ID NO: 11300 - DNA, 309 bp, synthetic construct
  source 1..309: mol_type = other DNA; note = Synthetic coding sequence
atgctgagcgaggaggagaaggaggagctgaaggccgagctggtgcagctggaggacgagatcaccaccctgagacaggtgctgagcgccaaggagagacacctggtggagatcaagcagaagctgggcatgaacctgatgaacgagctgaagcagaacttcagcaagagctggcacgacatgcagaccaccaccgcctacaagaagacccacgagaccctgagccacgccggccagaaggccaccgccgccttcagcaacgtgggcaccgccatcagcaagaagttcggcgacatgagaagaaagtag

SEQ ID NO: 11301 - DNA, 615 bp, synthetic construct
  source 1..615: mol_type = other DNA; note = Synthetic coding sequence
atggaggccgagcccaagggcctgctggagaccgagcccctgcagggcaccgacgaggacgccgtggccagcgccgacttcagcagcatgctgagcgaggaggagaaggaggagctgaaggccgagctggtgcagctggaggacgagatcaccaccctgagacaggtgctgagcgccaaggagagacacctggtggagatcaagcagaagctgggcatgaacctgatgaacgagctgaagcagaacttcagcaagagctggcacgacatgcagaccaccaccgcctacaagaagacccacgagaccctgagccacgccggccagaaggccaccgccgccttcagcaacgtgggcaccgccatcagcaagaagttcggcgacatgagctacagcatcagacacagcatcagcatgcccgccatgagaaacagccccaccttcaagagcttcgaggagagagtggagaccaccgtgaccagcctgaagaccaaggtgggcggcaccaaccccaacggcggcagcttcgaggaggtgctgagcagcaccgcccacgccagcgcccagagcctggccggcggcagcagaagaaccaaggaggaggagctgcagtgctag

SEQ ID NO: 11302 - DNA, 369 bp, synthetic construct
  source 1..369: mol_type = other DNA; note = Synthetic coding sequence
tgatacctggtggccctgggctgcatcaagcccctgtgcgacctgctgaccgtgatggacagcaagatcgtgcaggtggccctgaacggcctggagaacatcctgagactgggcgagcaggagagcaagcagaacggcatcggcatcaacccctactgcgccctgatcgaggaggcctacggcctggacaagatcgagttcctgcagagccacgagaaccaggagatctaccagaaggccttcgacctgatcgagcactacttcggcgtggaggaggacgaccccagcatcgtgccccaggtggacgagaaccagcagcagttcatcttccagcagcaggaggcccccatggacggcttccagctgtag

SEQ ID NO: 11303 - DNA, 1137 bp, synthetic construct
  source 1..1137: mol_type = other DNA; note = Synthetic coding sequence
atggaggtgaagcccccccccggcagaccccagcccgacagcggcagaagaagaagaagaagaggcgaggagggccacgaccccaaggagcccgagcagctgagaaagctgttcatcggcggcctgagcttcgagaccaccgacgacagcctgagagagcacttcgagaagtggggcaccctgaccgactgcgtggtgatgagagacccccagaccaagagaagcagaggcttcggcttcgtgacctacagctgcgtggaggaggtggacgccgccatgtgcgccagaccccacaaggtggacggcagagtggtggagcccaagagagccgtgagcagagaggacagcgtgaagcccggcgcccacctgaccgtgaagaagatcttcgtgggcggcatcaaggaggacaccgaggagtacaacctgagagactacttcgagaagtacggcaagatcgagaccatcgaggtgatggaggacagacagagcggcaagaagagaggcttcgccttcgtgaccttcgacgaccacgacaccgtggacaagatcgtggtgcagaagtaccacaccatcaacggccacaactgcgaggtgaagaaggccctgagcaagcaggagatgcagagcgccggcagccagagaggcagaggcggcggcagcggcaacttcatgggcagaggcggcaacttcggcggcggcggcggcaacttcggcagaggcggcaacttcggcggcagaggcggctacggcggcggcggcggcggcagcagaggcagctacggcggcggcgacggcggctacaacggcttcggcggcgacggcggcaactacggcggcggccccggctacagcagcagaggcggctacggcggcggcggccccggctacggcaaccagggcggcggctacggcggcggcggcggctacgacggctacaacgagggcggcaacttcggcggcggcaactacggcggcggcggcaactacaacgacttcggcaactacagcggccagcagcagagcaactacggccccatgaagggcggcagcttcggcggcagaagcagcggcagcccctacggcggcggctacggcagcggcggcggcagcggcggctacggcagcagaagattctag

SEQ ID NO: 11304 - DNA, 3063 bp, synthetic construct
  source 1..3063: mol_type = other DNA; note = Synthetic coding sequence
atgagaagattcctgagacccggccacgaccccgtgagagagagactgaagagagacctgttccagttcaacaagaccgtggagcacggcttcccccaccagcccagcgccctgggctacagccccagcctgagaatcctggccatcggcaccagaagcggcgccatcaagctgtacggcgcccccggcgtggagttcatgggcctgcaccaggagaacaacgccgtgacccagatccacctgctgcccggccagtgccagctggtgaccctgctggacgacaacagcctgcacctgtggagcctgaaggtgaagggcggcgccagcgagctgcaggaggacgagagcttcaccctgagaggcccccccggcgccgcccccagcgccacccagatcaccgtggtgctgccccacagcagctgcgagctgctgtacctgggcaccgagagcggcaacgtgttcgtggtgcagctgcccgccttcagagccctggaggacagaaccatcagcagcgacgccgtgctgcagagactgcccgaggaggccagacacagaagagtgttcgagatggtggaggccctgcaggagcaccccagagaccccaaccagatcctgatcggctacagcagaggcctggtggtgatctgggacctgcagggcagcagagtgctgtaccacttcctgagcagccagcagctggagaacatctggtggcagagagacggcagactgctggtgagctgccacagcgacggcagctactgccagtggcccgtgagcagcgaggcccagcagcccgagcccctgagaagcctggtgccctacggccccttcccctgcaaggccatcaccagaatcctgtggctgaccaccagacagggcctgcccttcaccatcttccagggcggcatgcccagagccagctacggcgacagacactgcatcagcgtgatccacgacggccagcagaccgccttcgacttcaccagcagagtgatcggcttcaccgtgctgaccgaggccgaccccgccgccaccttcgacgacccctacgccctggtggtgctggccgaggaggagctggtggtgatcgacctgcagaccgccggctggccccccgtgcagctgccctacctggccagcctgcactgcagcgccatcacctgcagccaccacgtgagcaacatccccctgaagctgtgggagagaatcatcgccgccggcagcagacagaacgcccacttcagcaccatggagtggcccatcgacggcggcaccagcctgacccccgcccccccccagagagacctgctgctgaccggccacgaggacggcaccgtgagattctgggacgccagcggcgtgtgcctgagactgctgtacaagctgagcaccgtgagagtgttcctgaccgacaccgaccccaacgagaacttcagcgcccagggcgaggacgagtggccccccctgagaaaggtgggcagcttcgacccctacagcgacgaccccagactgggcatccagaagatcttcctgtgcaagtacagcggctacctggccgtggccggcaccgccggccaggtgctggtgctggagctgaacgacgaggccgccgagcaggccgtggagcaggtggaggccgacctgctgcaggaccaggagggctacagatggaagggccacgagagactggccgccagaagcggccccgtgagattcgagcccggcttccagcccttcgtgctggtgcagtgccagccccccgccgtggtgaccagcctggccctgcacagcgagtggagactggtggccttcggcaccagccacggcttcggcctgttcgaccaccagcagagaagacaggtgttcgtgaagtgcaccctgcaccccagcgaccagctggccctggagggccccctgagcagagtgaagagcctgaagaagagcctgagacagagcttcagaagaatgagaagaagcagagtgagcagcagaaagagacaccccgccggcccccccggcgaggcccaggagggcagcgccaaggccgagagacccggcctgcagaacatggagctggcccccgtgcagagaaagatcgaggccagaagcgccgaggacagcttcaccggcttcgtgagaaccctgtacttcgccgacacctacctgaaggacagcagcagacactgccccagcctgtgggccggcaccaacggcggcaccatctacgccttcagcctgagagtgccccccgccgagagaagaatggacgagcccgtgagagccgagcaggccaaggagatccagctgatgcacagagcccccgtggtgggcatcctggtgctggacggccacagcgtgcccctgcccgagcccctggaggtggcccacgacctgagcaagagccccgacatgcagggcagccaccagctgctggtggtgagcgaggagcagttcaaggtgttcaccctgcccaaggtgagcgccaagctgaagctgaagctgaccgccctggagggcagcagagtgagaagagtgagcgtggcccacttcggcagcagaagagccgaggactacggcgagcaccacctggccgtgctgaccaacctgggcgacatccaggtggtgagcctgcccctgctgaagccccaggtgagatacagctgcatcagaagagaggacgtgagcggcatcgccagctgcgtgttcaccaagtacggccagggcttctacctgatcagccccagcgagttcgagagattcagcctgagcaccaagtggctggtggagcccagatgcctggtggacagcgccgagaccaagaaccacagacccggcaacggcgccggccccaagaaggcccccagcagagccagaaacagcggcacccagagcgacggcgaggagaagcagcccggcctggtgatggagagagccctgctgagcgacgagagagtgctgaaggagatccagagcaccctggagggcgacagaggcagcggcaactggagaagccacagagccgccgtgggctgcagcctgagcaacggcggcgccgagtag

SEQ ID NO: 11305 - DNA, 1458 bp, synthetic construct
  source 1..1458: mol_type = other DNA; note = Synthetic coding sequence
atggccgccgagctgtacgcccccgccagcgccgccgccgccgacctggccaacagcaacgccggcgccgccgtgggcagaaaggccggccccagaagcccccccagcgcccccgcccccgccccccccccccccgcccccgccccccccaccctgggcaacaaccaccaggagagccccggctggagatgctgcagacccaccctgagagagagaaacgccctgatgttcaacaacgagctgatggccgacgtgcacttcgtggtgggcccccccggcgccaccagaaccgtgcccgcccacaagtacgtgctggccgtgggcagcagcgtgttctacgccatgttctacggcgacctggccgaggtgaagagcgagatccacatccccgacgtggagcccgccgccttcctgatcctgctgaagtacatgtacagcgacgagatcgacctggaggccgacaccgtgctggccaccctgtacgccgccaagaagtacatcgtgcccgccctggccaaggcctgcgtgaacttcctggagaccagcctggaggccaagaacgcctgcgtgctgctgagccagagcagactgttcgaggagcccgagctgacccagagatgctgggaggtgatcgacgcccaggccgagatggccctgagaagcgagggcttctgcgagatcgacagacagaccctggagatcatcgtgaccagagaggccctgaacaccaaggaggccgtggtgttcgaggccgtgctgaactgggccgaggccgagtgcaagagacagggcctgcccatcacccccagaaacaagagacacgtgctgggcagagccctgtacctggtgagaatccccaccatgaccctggaggagttcgccaacggcgccgcccagagcgacatcctgaccctggaggagacccacagcatcttcctgtggtacaccgccaccaacaagcccagactggacttccccctgaccaagagaaagggcctggccccccagagatgccacagattccagagcagcgcctacagaagcaaccagtggagatacagaggcagatgcgacagcatccagttcgccgtggacagaagagtgttcatcgccggcctgggcctgtacggcagcagcagcggcaaggccgagtacagcgtgaagatcgagctgaagagactgggcgtggtgctggcccagaacctgaccaagttcatgagcgacggcagcagcaacaccttccccgtgtggttcgagcaccccgtgcaggtggagcaggacaccttctacaccgccagcgccgtgctggacggcagcgagctgagctacttcggccaggagggcatgaccgaggtgcagtgcggcaaggtggccttccagttccagtgcagcagcgacagcaccaacggcaccggcgtgcagggcggccagatccccgagctgatcttctacgcctag

SEQ ID NO: 11306 - DNA, 2883 bp, synthetic construct; identical to SEQ ID NO: 9420
  source 1..2883: mol_type = other DNA; note = Synthetic coding sequence

SEQ ID NO: 11307 - DNA, 669 bp, synthetic construct
  source 1..669: mol_type = other DNA; note = Synthetic coding sequence
atggagagaatcgagggcgccagcgtgggcagatgcgccgccagcccctacctgagacccctgaccctgcactacagacagaacggcgcccagaagagctgggacttcatgaagacccacgacagcgtgaccgtgctgctgttcaacagcagcagaagaagcctggtgctggtgaagcagttcagacccgccgtgtacgccggcgaggtggagagaagattccccggcagcctggccgccgtggaccaggacggccccagagagctgcagcccgccctgcccggcagcgccggcgtgaccgtggagctgtgcgccggcctggtggaccagcccggcctgagcctggaggaggtggcctgcaaggaggcctgggaggagtgcggctaccacctggcccccagcgacctgagaagagtggccacctactggagcggcgtgggcctgaccggcagcagacagaccatgttctacaccgaggtgaccgacgcccagagaagcggccccggcggcggcctggtggaggagggcgagctgatcgaggtggtgcacctgcccctggagggcgcccaggccttcgccgacgaccccgacatccccaagaccctgggcgtgatcttcggcgtgagctggttcctgagccaggtggcccccaacctggacctgcagtag

SEQ ID NO: 11308 - DNA, 876 bp, synthetic construct
  source 1..876: mol_type = other DNA; note = Synthetic coding sequence
atgaacatgatctggagaaacagcatcagctgcctgagactgggcaaggtgccccacagataccagagcggctaccaccccgtggcccccctgggcagcagaatcctgaccgaccccgccaaggtgttcgagcacaacatgtgggaccacatgcagtggagcaaggaggaggaggccgccgccagaaagaaggtgaaggagaacagcgccgtgagagtgctgctggaggagcaggtgaagtacgagagagaggccagcaagtactgggacaccttctacaagatccacaagaacaagttcttcaaggacagaaactggctgctgagagagttccccgagatcctgcccgtggaccagaagcccgaggagaaggccagagagagcagctgggaccacgtgaagaccagcgccaccaacagattcagcagaatgcactgccccaccgtgcccgacgagaagaaccactacgagaagagcagcggcagcagcgagggccagagcaagaccgagagcgacttcagcaacctggacagcgagaagcacaagaagggccccatggagaccggcctgttccccggcagcaacgccaccttcagaatcctggaggtgggctgcggcgccggcaacagcgtgttccccatcctgaacaccctggagaacagccccgagagcttcctgtactgctgcgacttcgccagcggcgccgtggagctggtgaagagccacagcagctacagagccacccagtgcttcgccttcgtgcacgacgtgtgcgacgacggcctgccctaccccttccccgacggcatcctggacgtgatcctgctggtgttcgtgctgagcagcatccaccccgacagaaccctgttcatctag

SEQ ID NO: 11309 - DNA, 630 bp, synthetic construct; identical to SEQ ID NO: 9403
  source 1..630: mol_type = other DNA; note = Synthetic coding sequence

SEQ ID NO: 11310 - DNA, 504 bp, synthetic construct
  source 1..504: mol_type = other DNA; note = Synthetic coding sequence
atgcccgcctaccacagcagcctgatggaccccgacaccaagctgatcggcaacatggccctgctgcccatcagaagccagttcaagggccccgcccccagagagaccaaggacaccgacatcgtggacgaggccatctactacttcaaggccaacgtgttcttcaagaactacgagatcaagaacgaggccgacagaaccctgatctacatcaccctgtacatcagcgagtgcctgaagaagctgcagaagtgcaacagcaagagccagggcgagaaggagatgtacaccctgggcatcaccaacttccccatccccggcgagcccggcttccccctgaacgccatctacgccaagcccgccaacaagcaggaggacgaggtgatgagagcctacctgcagcagctgagacaggagaccggcctgagactgtgcgagaaggtgatcaagggcgacctgaagttcagcgccgccctgaagctggccctgaacaagaacaagtag

SEQ ID NO: 11311 - DNA, 4074 bp, synthetic construct; identical to SEQ ID NO: 10560
  source 1..4074: mol_type = other DNA; note = Synthetic coding sequence

SEQ ID NO: 11312 - DNA, 288 bp, synthetic construct
  source 1..288: mol_type = other DNA; note = Synthetic coding sequence
atgctgaagaacaagggccacagcagcaagaaggacaacctggccgtgaacgccgtggccctgcaggaccacatcctgcacgacctgcagctgagaaacctgagcgtggccgaccacagcaagacccaggtgcagaagaaggagaacaagagcctgaagagagacaccaaggccatcatcgacaccggcctgaagaagaccacccagtgccccaagctggaggacagcgagaaggagtacgtgctggaccccaagcccccccccctgaccctgggctaccacagctag

SEQ ID NO: 11313 - DNA, 708 bp, synthetic construct
  source 1..708: mol_type = other DNA; note = Synthetic coding sequence
atgctgaagaacaagggccacagcagcaagaaggacaacctggccgtgaacgccgtggccctgcaggaccacatcctgcacgacctgcagctgagaaacctgagcgtggccgaccacagcaagacccaggtgcagaagaaggagaacaagagcctgaagagagacaccaaggccatcatcgacaccggcctgaagaagaccacccagtgccccaagctggaggacagcgagaaggagtacgtgctggaccccaagcccccccccctgaccctggcccagaagctgggcctgatcggccccccccccccccccctgagcagcgacgagtgggagaaggtgaagcagagaagcctgctgcagggcgacagcgtgcagccctgccccatctgcaaggaggagttcgagctgagaccccaggtgctgctgagctgcagccacgtgttccacaaggcctgcctgcaggccttcgagaagttcaccaacaagaagacctgccccctgtgcagaaagaaccagtaccagaccagagtgatccacgacggcgccagactgttcagaatcaagtgcgtgaccagaatccaggcctactggagaggctgcgtggtgagaaagtggtacagaaacctgagaaagaccgtgccccccaccgacgccaagctgagaaagaagttcttcgagaagaagacccaggactggaagcccgcctag

SEQ ID NO: 11314 - DNA, 1089 bp, synthetic construct; identical to SEQ ID NO: 9912
  source 1..1089: mol_type = other DNA; note = Synthetic coding sequence

SEQ ID NO: 11315 - DNA, 1278 bp, synthetic construct; identical to SEQ ID NO: 9384
  source 1..1278: mol_type = other DNA; note = Synthetic coding sequence

SEQ ID NO: 11316 - DNA, 639 bp, synthetic construct
  source 1..639: mol_type = other DNA; note = Synthetic coding sequence
atggccccctggggcaagagactggccggcgtgagaggcgtgctgctggacatcagcggcgtgctgtacgacagcggcgccggcggcggcaccgccatcgccggcagcgtggaggccgtggccagactgaagagaagcagactgaaggtgagattctgcaccaacgagagccagaagagcagagccgagctggtgggccagctgcagagactgggcttcgacatcagcgagcaggaggtgaccgcccccgcccccgccgcctgccagatcctgaaggagcagggcctgagaccctacctgctgatccacgacggcgtgagaagcgagttcgaccagatcgacaccagcaaccccaactgcgtggtgatcgccgacgccggcgagagcttcagctaccagaacatgaacaacgccttccaggtgctgatggagctggagaagcccgtgctgatcagcctgggcaagggcagatactacaaggagaccagcggcctgatgctggacgtgggcccctacatgaaggccctggagtacgcctgcggcatcaaggccgaggtggtgggcaagcccagccccgagttcttcaagagcgccctgcaggccatcggcgtggaggcccaccagctgctgagcgtgtag

SEQ ID NO: 11317 - DNA, 2868 bp, synthetic construct
  source 1..2868: mol_type = other DNA; note = Synthetic coding sequence
atggaggtgggcagcgaggaggagaagtgggagaagctggacgccgagttcgaccacttcgtggtggacatgaagcccttcgtgctgaagctgccccacagaaccgagagacagagatgcgccctgtggatcagaaagctgtgcgagcccagcggcaccggcgccggcatcatgggcagaaagaacagaaacctgtacgccaagctgctgctgcacatgctgaagagaggcgccctggagggccccttcacccacagacccgagcccggcaccctgaagatcctgcccagctacatgagcatctacttcgacgagcccaaccccgccagagccaagggcagcagccccgagggcctgcccgcctgggtgctgggcgagctggagaccagcgagcacaagctgaacgagagctggaagctgagcagcggcgaggacaacaccctggtgcagagccccaccgacgtgtacagcagagagcagtacaccggcaagctgagagtgagaagccacagcctgagccccacccacagagaggacggccagaacatcacccccaagatctgcgaggtgtacagcaagaagagccccgtgagcctggacgacagcgacatcgaggccagactgaacagctggaacctgggcatcgagaaccccagatacctgagacagaagcccatccccgtgagcctgatgacccccaagttcagcctgagaaagagcagcagcttccacgacgaccacttcctgagcagaatcagagagaaggagctggacatgaagaccaagatgatggaggccaagttccacgaggagaagctgaagctgcagcagaagcacgacgccgacgtgcagaagatcctggagagaaagaacaacgagatcgaggagctgaagaccctgtacagaagcaagcagcacgagaccgaggagaccatcagaaagctggagaagaaggtgcagaccctgatcagagactgccaggtgatcagagagaccaaggaggaccagatcgccgagctgaagaagatctgcgagcagagcaccgagagcctgaacaacgactgggagaagaagctgcacaacgccgtggccgagatggagcaggagaagttcgacctgcagaagcagcacaccgagaacatccaggagctgctggaggacaccaacgtgagactgaacaagatggagagcgagtacatggcccagacccagagcaccaaccacatgatcaaggagctggaggccagagtgcagcagctgaccggcgaggccgagaacagcaacctgcagagacagaagctgatccaggagaaggccgagctggagagatgctaccagatcacctgcagcgagctgcaggaggtgaaggccagaagaaacaccctgcacaaggagaaggaccacctggtgaacgactacgagcagaacatgaagctgctgcagaccaagtacgacgccgacatcaacctgctgaagcaggagcacgccctgagcgccagcaaggccagcagcatgatcgaggagctggagcagaacgtgtgccagctgaagcagcagctgcaggagagcgagctgcagagaaagcagcagctgagagaccaggagaacaagttccagatggagaagagccacctgaagcacatctacgagaagaaggcccacgacctgcagagcgagctggacaagggcaaggaggacacccagaagaagatccacaagttcgaggaggccctgaaggagaaggaggagcagctgaccagagtgaccgaggtgcagagactgcaggcccagcaggccgacgccgccctggaggagttcaagagacaggtggagctgaacagcgagaaggtgtacgccgagatgaaggagcagatggagaaggtggaggccgacctgaccagaagcaagagcctgagagagaagcagagcaaggagttcctgtggcagctggaggacatcagacagagatacgagcagcagatcgtggagctgaagctggagcacgagcaggagaagacccacctgctgcagcagcacaacgccgagaaggacagcctggtgagagaccacgagagagagatcgagaacctggagaagcagctgagagccgccaacatggagcacgagaaccagatccaggagttcaagaagagagacgcccaggtgatcgccgacatggaggcccaggtgcacaagctgagagaggagctgatcaacgtgaacagccagagaaagcagcagctggtggagctgggcctgctgagagaggaggagaagcagagagccaccagagagcacgagatcgtggtgaacaagctgaaggccgagagcgagaagatgaagatcgagctgaagaagacccacgccgccgagaccgagatgaccctggagaaggccaacagcaagctgaagcagatcgagaaggagtacacccagaagctggccaagagcagccagatcatcgccgagctgcagaccaccatcagcagcctgaaggaggagaacagccagcagcagctggccgccgagagaagactgcaggacgtgagacagaagttcgaggacgagaagaagcagctgatcagagacaacgaccaggccatcaaggtgctgcaggacgagctggagaacagaagcaaccaggtgagatgcgccgagaagaagctgcagcacaaggagctggagagccaggagcagatcacctacatcagacaggagtacgagaccaagctgaagggcctgatgcccgccagcctgagacaggagctggaggacaccatcagcagcctgaagagccaggtgaacttcctgcagaagagagccagcatcctgcaggaggagctgaccacctaccagggcagaagatag

SEQ ID NO: 11318 - DNA, 1269 bp, synthetic construct
  source 1..1269: mol_type = other DNA; note = Synthetic coding sequence
atgcccagaaagggcacccagcccagcaccgccagaagaagagaggagggcccccccccccccagccccgacggcgccagcagcgacgccgagcccgagccccccagcggcagaaccgagagccccgccaccgccgccgagaccgccagcgaggagctggacaacagaagcctggaggagatcctgaacagcatcccccccccccccccccccgccatgaccaacgaggccggcgcccccagactgatgatcacccacatcgtgaaccagaacttcaagagctacgccggcgagaagatcctgggccccttccacaagagattcagctgcatcatcggccccaacggcagcggcaagagcaacgtgatcgacagcatgctgttcgtgttcggctacagagcccagaagatcagaagcaagaagctgagcgtgctgatccacaacagcgacgagcacaaggacatccagagctgcaccgtggaggtgcacttccagaagatcatcgacaaggagggcgacgactacgaggtgatccccaacagcaacttctacgtgagcagaaccgcctgcagagacaacaccagcgtgtaccacatcagcggcaagaagaagaccttcaaggacgtgggcaacctgctgagaagccacggcatcgacctggaccacaacagattcctgatcctgcagggcgaggtggagcagatcgccatgatgaagcccaagggccagaccgagcacgacgagggcatgctggagtacctggaggacatcatcggctgcggcagactgaacgagcccatcaaggtgctgtgcagaagagtggagatcctgaacgagcacagaggcgagaagctgaacagagtgaagatggtggagaaggagaaggacgccctggagggcgagaagaacatcgccatcgagttcctgaccctggagaacgagatcttcagaaagaagaaccacgtgtgccagtactacatctacgagctgcagaagagaatcgccgagatggagacccagaaggagaagatccacgaggacaccaaggagatcaacgagaagagcaacatcctgagcaacgagatgaaggccaagaacaaggacgtgaaggacaccgagaagaagctgaacaagatcaccaagttcatcgaggagaacaaggagaagttcacccagctggacctggaggacgtgcaggtgagagagaagctgaagcacgccaccagcaaggccaagaccggcgagaccaccagcaagagaaagaagtag

SEQ ID NO: 11319 - DNA, 303 bp, synthetic construct
  source 1..303: mol_type = other DNA; note = Synthetic coding sequence
atgagaaagagactgagcgcccccgagctgagactgagcctgaccaagggccccggcaacgacggcgccagccccacccagagcgcccccagcagccccgacggcagcagcgacctggagatcgacgagctggagacccccagcgacagcgagcagctggacagcggccacgagttcgagtgggaggacgagctgcccagagccgagggcctgggcaccagcgagaccgccgagagactgggcagaggctgcatgtgggacgtgaccggcgaggacggccaccactggagagtgttcagatag

SEQ ID NO: 11320 - DNA, 1059 bp, synthetic construct
  source 1..1059: mol_type = other DNA; note = Synthetic coding sequence
atgggcaaggtggagaacagcaagagcgcccagggcctggccggcctgagaaacctgggcaacacctgcttcatgaacagcatcctgcagtgcctgagcaacaccagagagctgagagactactgcctgcagagactgtacatgagagacctgcaccacggcagcaacgcccacaccgccctggtggaggagttcgccaagctgatccagaccatctggaccagcagccccaacgacgtggtgagccccagcgagttcaagacccagatccagagatacgcccccagattcgtgggctacaaccagcaggacgcccaggagttcctgagattcctgctggacggcctgcacaacgaggtgaacagagtgaccctgagacccaagagcaaccccgagaacctggaccacctgcccgacgacgagaagggcagacagatgtggagaaagtacctggagagagaggacagcagaatcggcgacctgttcgtgggccagctgaagagcagcctgacctgcaccgactgcggctactgcagcaccgtgttcgaccccttctgggacctgagcctgcccatcgccaagagaggctaccccgaggtgaccctgatggactgcatgagactgttcaccaaggaggacgtgctggacggcgacgagaagcccacctgctgcagatgcagaggcagaaagagatgcatcaagaagttcagcatccagagattccccaagatcctggtgctgcacctgaagagattcagcgagagcagaatcagaaccagcaagctgaccaccttcgtgaacttccccctgagagacctggacctgagagagttcgccagcgagaacaccaaccacgccgtgtacaacctgtacgccgtgagcaaccacagcggcaccaccatgggcggccactacaccgcctactgcagaagccccggcaccggcgagtggcacaccttcaacgacagcagcgtgacccccatgagcagcagccaggtgagaaccagcgacgcctacctgctgttctacgagctggccagcccccccagcagaatgtag

SEQ ID NO: 11321 - DNA, 1497 bp, synthetic construct
  source 1..1497: mol_type = other DNA; note = Synthetic coding sequence
atggtgatcgaggaggtgaacttcatgcagaaccacctggagatcgagaagacctgcagagagagcgccgaggccctggccaccaagctgaacaaggagaacaagaccctgaagagaatcagcatgctgtacatggccaagctgggccccgacgtgatcaccgaggagatcaacatcgacgacgaggacagcaccaccgacaccgacggcgccgccgagacctgcgtgagcgtgcagtgccagaagcagatcaaggagctgagagaccagatcgtgagcgtgcaggaggagaagaagatcctggccatcgagctggagaacctgaagagcaagctggtggaggtgatcgaggaggtgaacaaggtgaagcaggagaagaccgtgctgaacagcgaggtgctggagcagagaaaggtgctggagaagtgcaacagagtgagcatgctggccgtggaggagtacgaggagatgcaggtgaacctggagctggagaaggacctgagaaagaaggccgagagcttcgcccaggagatgttcatcgagcagaacaagctgaagagacagagccacctgctgctgcagagcagcatccccgaccagcagctgctgaaggccctggacgagaacgccaagctgacccagcagctggaggaggagagaatccagcaccagcagaaggtgaaggagctggaggagcagctggagaacgagaccctgcacaaggagatccacaacctgaagcagcagctggagctgctggaggaggacaagaaggagctggagctgaagtaccagaacagcgaggagaaggccagaaacctgaagcacagcgtggacgagctgcagaagagagtgaaccagagcgagaacagcgtgcccccccccccccccccccccccccccctgcccccccccccccccaaccccatcagaagcctgatgagcatgatcagaaagagaagccaccccagcggcagcggcgccaagaaggagaaggccacccagcccgagaccaccgaggaggtgaccgacctgaagagacaggccgtggaggagatgatggacagaatcaagaagggcgtgcacctgagacccgtgaaccagaccgccagacccaagaccaagcccgagagcagcaagggctgcgagagcgccgtggacgagctgaagggcatcctgggcaccctgaacaagagcaccagcagcagaagcctgaagagcctggaccccgagaacagcgagaccgagctggagagaatcctgagaagaagaaaggtgaccgccgaggccgacagcagcagccccaccggcatcctggccaccagcgagagcaagagcatgcccgtgctgggcagcgtgagcagcgtgaccaagaccgccctgaacaagaagaccctggaggccgagttcaacagccccagcccccccacccccgagcccggcgagggccccagaaagctggagggctgcaccagcagcaaggtgaccttccagtag

SEQ ID NO: 11322 - DNA, 1950 bp, synthetic construct
  source 1..1950: mol_type = other DNA; note = Synthetic coding sequence
atgaacagcagcgacgaggagaagcagctgcagctgatcaccagcctgaaggagcaggccatcggcgagtacgaggacctgagagccgagaaccagaagaccaaggagaagtgcgacaagatcagacaggagagagacgaggccgtgaagaagctggaggagttccagaagatcagccacatggtgatcgaggaggtgaacttcatgcagaaccacctggagatcgagaagacctgcagagagagcgccgaggccctggccaccaagctgaacaaggagaacaagaccctgaagagaatcagcatgctgtacatggccaagctgggccccgacgtgatcaccgaggagatcaacatcgacgacgaggacagcaccaccgacaccgacggcgccgccgagacctgcgtgagcgtgcagtgccagaagcagatcaaggagctgagagaccagatcgtgagcgtgcaggaggagaagaagatcctggccatcgagctggagaacctgaagagcaagctggtggaggtgatcgaggaggtgaacaaggtgaagcaggagaagaccgtgctgaacagcgaggtgctggagcagagaaaggtgctggagaagtgcaacagagtgagcatgctggccgtggaggagtacgaggagatgcaggtgaacctggagctggagaaggacctgagaaagaaggccgagagcttcgcccaggagatgttcatcgagcagaacaagctgaagagacagagccacctgctgctgcagagcagcatccccgaccagcagctgctgaaggccctggacgagaacgccaagctgacccagcagctggaggaggagagaatccagcaccagcagaaggtgaaggagctggaggagcagctggagaacgagaccctgcacaaggagatccacaacctgaagcagcagctggagctgctggaggaggacaagaaggagctggagctgaagtaccagaacagcgaggagaaggccagaaacctgaagcacagcgtggacgagctgcagaagagagtgaaccagagcgagaacagcgtgcccccccccccccccccccccccccccctgcccccccccccccccaaccccatcagaagcctgatgagcatgatcagaaagagaagccaccccagcggcagcggcgccaagaaggagaaggccacccagcccgagaccaccgaggaggtgaccgacctgaagagacaggccgtggaggagatgatggacagaatcaagaagggcgtgcacctgagacccgtgaaccagaccgccagacccaagaccaagcccgagagcagcaagggctgcgagagcgccgtggacgagctgaagggcatcctgggcaccctgaacaagagcaccagcagcagaagcctgaagagcctggaccccgagaacagcgagaccgagctggagagaatcctgagaagaagaaaggtgaccgccgaggccgacagcagcagccccaccggcatcctggccaccagcgagagcaagagcatgcccgtgctgggcagcgtgagcagcgtgaccaagaccgccctgaacaagaagaccctggaggccgagttcaacagccccagcccccccacccccgagcccggcgagggccccagaaagctggagggctgcaccagcagcaaggtgaccttccagccccccagcagcatcggctgcagaaagaagtacatcgacggcgagaagcaggccgagcccgtggtggtgctggaccccgtgagcacccacgagccccagaccaaggaccaggtggccgagaaggaccccacccagcacaaggaggacgagggcgagatccagcccgagaacaaggaggacagcatcgagaacttcttccccttccacttcggcttcgagggcgtgctgcccctggccggcgtgaccctgagcaccaaggccagagaccccaagtag

SEQ ID NO: 11323 - DNA, 837 bp, synthetic construct; identical to SEQ ID NO: 9588
  source 1..837: mol_type = other DNA; note = Synthetic coding sequence

SEQ ID NO: 11324 - DNA, 1368 bp, synthetic construct
  source 1..1368: mol_type = other DNA; note = Synthetic coding sequence
atgttcaccgagggcgaggagatgtacctgcagggcagcaccgtgtggcaccccgactgcaagcagagcaccaagaccgaggagaagctgagactgcccaacatcagaagaagcagcagcgacttcttctacagcaagagcctgatcagaagaaccggcagaagccccagcctgcagcccaccagaaccagcagcgagagcatctacagcagacccggcagcagcatccccggcagccccggccacaccatctacgccaaggtggacaacgagatcctggactacaaggacctggccgccatccccaaggtgaaggccatctacgacatcgagagacccgacctgatcacctacgagcccttctacaccagcggctacgacgacaagcaggagagacagagcctgggcgagagccccagaaccctgagccccacccccagcgccgagggctaccaggacgtgagagacagaatgatccacagaagcaccagccagggcagcatcaacagccccgtgtacagcagacacagctacacccccaccaccagcagaagcccccagcacttccacagacccgaccagggcatcaacatctacagaaagccccccatctacaagcagcacgccgccctggccgcccagagcaagagcagcgaggacatcatcaagttcagcaagttccccgccgcccaggcccccgaccccagcgagacccccaagatcgagaccgaccactggcccggcccccccagcttcgccgtggtgggccccgacatgaagagaagaagcagcggcagagaggaggacgacgaggagctgctgagaagaagacagctgcaggaggagcagctgatgaagctgaacagcggcctgggccagctgatcctgaaggaggagatggagaaggagagcagagagagaagcagcctgctggccagcagatacgacagccccatcaacagcgccagccacatccccagcagcaagaccgccagcctgcccggctacggcagaaacggcctgcacagacccgtgagcaccgacttcgcccagtacaacagctacggcgacgtgagcggcggcgtgagagactaccagaccctgcccgacggccacatgcccgccatgagaatggacagaggcgtgagcatgcccaacatgctggagcccaagatcttcccctacgagatgctgatggtgaccaacagaggcagaaacaagatcctgagagaggtggacagaaccagactggagagacacctggcccccgaggtgttcagagagatcttcggcatgagcatccaggagttcgacagactgcccctgtggagaagaaacgacatgaagaagaaggccaagctgttctag

SEQ ID NO: 11325 - DNA, 1959 bp, synthetic construct
  source 1..1959: mol_type = other DNA; note = Synthetic coding sequence
tgaagccacgccttcatcagccagtgggtgtgcagacactggagagaccccgtggcccacccccaggacccccaccaccccagcgagaagcccgtgatccactgccacaagtgcggcgagccctgcaagggcgaggtgctgagagtgcagaccaagcacttccacatcaagtgcttcacctgcaaggtgtgcggctgcgacctggcccagggcggcttcttcatcaagaacggcgagtacctgtgcaccctggactaccaccccaactgcttcgcctgcaccatctgcaagagacccttcccccccggcgacagagtgaccttcaacggcagagactgcctgtgccagctgtgcgcccagcccatgagcagcagccccaaggagaccaccttcagcagcaactgcgccggctgcggcagagacatcaagaacggccaggccctgctggccctggacaagcagtggcacctgggctgcttcaagtgcaagagctgcggcaaggtgctgaccggcgagtacatcagcaaggacggcgccccctactgcgagaaggactaccagggcctgttcggcgtgaagtgcgaggcctgccaccagttcatcaccggcaaggtgctggaggccggcgacaagcactaccaccccagctgcgccagatgcagcagatgcaaccagatgttcaccgagggcgaggagatgtacctgcagggcagcaccgtgtggcaccccgactgcaagcagagcaccaagaccgaggagaagctgagacccaccagaaccagcagcgagagcatctacagcagacccggcagcagcatccccggcagccccggccacaccatctacgccaaggtggacaacgagatcctggactacaaggacctggccgccatccccaaggtgaaggccatctacgacatcgagagacccgacctgatcacctacgagcccttctacaccagcggctacgacgacaagcaggagagacagagcctgggcgagagccccagaaccctgagccccacccccagcgccgagggctaccaggacgtgagagacagaatgatccacagaagcaccagccagggcagcatcaacagccccgtgtacagcagacacagctacacccccaccaccagcagaagcccccagcacttccacagacccgaccagggcatcaacatctacagaaagccccccatctacaagcagcacgccgccctggccgcccagagcaagagcagcgaggacatcatcaagttcagcaagttccccgccgcccaggcccccgaccccagcgagacccccaagatcgagaccgaccactggcccggcccccccagcttcgccgtggtgggccccgacatgaagagaagaagcagcggcagagaggaggacgacgaggagctgctgagaagaagacagctgcaggaggagcagctgatgaagctgaacagcggcctgggccagctgatcctgaaggaggagatggagaaggagagcagagagagaagcagcctgctggccagcagatacgacagccccatcaacagcgccagccacatccccagcagcaagaccgccagcctgcccggctacggcagaaacggcctgcacagacccgtgagcaccgacttcgcccagtacaacagctacggcgacgtgagcggcggcgtgagagactaccagaccctgcccgacggccacatgcccgccatgagaatggacagaggcgtgagcatgcccaacatgctggagcccaagatcttcccctacgagatgctgatggtgaccaacagaggcagaaacaagatcctgagagaggtggacagaaccagactggagagacacctggcccccgaggtgttcagagagatcttcggcatgagcatccaggagttcgacagactgcccctgtggagaagaaacgacatgaagaagaaggccaagctgttctag

SEQ ID NO: 11326 - DNA, 837 bp, synthetic construct
  source 1..837: mol_type = other DNA; note = Synthetic coding sequence
atgacccagcagtggagagaggtgaacgaggacagagaggccgtggcccaggccagaagctggcagagcctgaacctgggcgacagagacatgggcgtgagcttcatcgagaccgccctggccctgagcgccgccagagccagaagacccctgctgaccagccacccccccagcagacccttccagccccccaagcacacccccagccccccccccgcccccagagtgaacagcagacaccccggcagaagcgtgagcctgagcctgcccagcgccagccaggccccccccgtgcccctggccagccccgagggcagaccccacaccgtgggcgccccccacgccagcacctggaagagaaccagaggcagacagagagccagaccccccaagatcgtgaaggaggccgaggtgccccaggccgccctgggcgtgcccgcccagggcaccggcgacaacggccacacccccgtggaggaggaggtgggcggcatccccgtgcccgcccccggcctgctgcaggtgaccgagagaagacagcccctgagcagcgtgagcagcctggaggtgcacttcgacctgctggacctgaccgagctgaccgacatgagcgaccaggagctggccgaggtgttcgccgacagcgacgacgagaacctgaacaccgagagccccgccggcctgcaccccctgcccagagccggctacctgagaagccccagctggaccagaaccagagccgagcagagccacgagaagcagcccctgggcgaccccgagagacaggccaccgtgctggacaccttcctgaccgtggagagaccccaggaggactag

SEQ ID NO: 11327 - DNA, 540 bp, synthetic construct
  source 1..540: mol_type = other DNA; note = Synthetic coding sequence
atgaccgacctggtggccgtgtgggacgtggccctgagcgacggcgtgcacaagatcgagttcgagcacggcaccaccagcggcaagagagtggtgtacgtggacggcaaggaggagatcagaaaggagtggatgttcaagctggtgggcaaggagaccttctacgtgggcgccgccaagaccaaggccaccatcaacatcgacgccatcagcggcttcgcctacgagtacaccctggagatcaacggcaagagcctgaagaagtacatggaggacagaagcaagaccaccaacacctgggtgctgcacatggacggcgagaacttcagaatcgtgctggagaaggacgccatggacgtgtggtgcaacggcaagaagctggagaccgccggcgagttcgtggacgacggcaccgagacccacttcagcatcggcaaccacgactgctacatcaaggccgtgagcagcggcaagagaaaggagggcatcatccacaccctgatcgtggacaacagagagatccccgagatcgccagctag

SEQ ID NO: 11328 - DNA, 540 bp, synthetic construct; identical to SEQ ID NO: 11327
  source 1..540: mol_type = other DNA; note = Synthetic coding sequence

SEQ ID NO: 11329 - DNA, 1053 bp, synthetic construct
  source 1..1053: mol_type = other DNA; note = Synthetic coding sequence
atgggcccctgcaacctgagcagcgccgccggccccaccgccgagaagagcgtgccctaccagagaaccctgaaggagggccagggcaccagcgtggtggcccagggccccagcagacccctgcccagcaccgccaacgtggtggtgatcggcggcggcagcctgggctgccagaccctgtaccacctggccaagctgggcatgagcggcgccgtgctgctggagagagagagactgaccagcggcaccacctggcacaccgccggcctgctgtggcagctgagacccagcgacgtggaggtggagctgctggcccacaccagaagagtggtgagcagagagctggaggaggagaccggcctgcacaccggctggatccagaacggcggcctgttcatcgccagcaacagacagagactggacgagtacaagagactgatgagcctgggcaaggcctacggcgtggagagccacgtgctgagccccgccgagaccaagaccctgtaccccctgatgaacgtggacgacctgtacggcaccctgtacgtgccccacgacggcaccatggaccccgccggcacctgcaccaccctggccagagccgccagcgccagaggcgcccaggtgatcgagaactgccccgtgaccggcatcagagtgtggaccgacgacttcggcgtgagaagagtggccggcgtggagacccagcacggcagcatccagaccccctgcgtggtgaactgcgccggcgtgtgggccagcgccgtgggcagaatggccggcgtgaaggtgcccctggtggccatgcaccacgcctacgtggtgaccgagagaatcgagggcatccagaacatgcccaacgtgagagaccacgacgccagcgtgtacctgagactgcagggcgacgccctgagcgtgggcggctacgaggccaaccccatcttctgggaggaggccgtgaagtacagacccagagccgccggcggcctgtgcctgaagaccagcaccgagaaggtgtgcgccgtgtggagcgacgacctgagaagagcctag

SEQ ID NO: 11330 - DNA, 2001 bp, synthetic construct
  source 1..2001: mol_type = other DNA; note = Synthetic coding sequence
atggccagagccggcagctgcggcggcgccgccgccggcgccggcagacccgagccctgggagctgagcctggaggaggtgctgaaggcctacgagcagcccctgaacgaggagcaggcctgggccgtgtgcttccagggctgcagaggcctgagaggcagccccggcagaagactgagagacaccggcgacctgctgctgagaggcgacggcagcgtgggcgccagagagcccgaggccgccgagcccgccaccatggtggtgcccctggccagcagcgaggcccagaccgtgcagagcctgggcttcgccatctacagagccctggactggggcctggacgagagcgaggagagagagctgagcccccagctggagagactgatcgacctgatggccaacaacgacagcgaggacagcggctgcggcgccgccgacgagggctacggcggccccgaggaggaggaggaggccgagggcgtgcccagaagcgtgagaaccttcgcccaggccatgagactgtgcgccgccagactgaccgaccccagaggcgcccaggcccactaccaggccgtgtgcagagccctgttcgtggagaccctggagctgagagccttcctggccagagtgagagaggccaaggagatgctgcagaagctgagagaggacgagccccacctggagacccccagagccgagctggacagcctgggccacaccgactgggccagactgtgggtgcagctgatgagagagctgagaagaggcgtgaagctgaagaaggtgcaggagcaggagttcaaccccctgcccaccgagttccagctgacccccttcgagatgctgatgcaggacatcagagccagaaactacaagctgagaaaggtgatggtggacggcgacatcccccccagagtgaagaaggacgcccacgagctgatcctggacttcatcagaagcagaccccccctgaagcaggtgagcgagagaagactgagacccctgccccccaagcagagaagcctgcacgagaagatcctggaggagatcaagcaggagagaagactgagacccgtgagaggcgagggctgggccgccagaggcttcggcagcctgccctgcatcctgaacgcctgcagcggcgacgccaagagcaccagctgcatcaacctgagcgtgaccgacgccggcggcagcgcccagagacccagacccagagtgctgctgaaggcccccaccctggccgagatggaggagatgaacaccagcgaggaggaggagagcccctgcggcgaggtgaccctgaagagagacagaagcttcagcgagcacgacctggcccagctgagaagcgaggtggccagcggcctgcagagcgccacccacccccccggcggcaccgagccccccagacccagagccggcagcgcccacgtgtggagacccggcagcagagaccagggcacctgccccgccagcgtgagcgaccccagccaccccctgctgagcaacagaggcagcagcggcgacagacccgaggccagcatgacccccgacgccaagcacctgtggctggagttcagccaccccgtggagagcctggccctgaccgtggaggaggtgatggacgtgagaagagtgctggtgaaggccgagatggagaagttcctgcagaacaaggagctgttcagcagcctgaagaagggcaagatctgctgctgctgcagagccaagttccccctgttcagctggccccccagctgcctgttctgcaagagaagcctgcagggcccccagtggcagagcgtggaggaggccttcccccacatctacagccacggctgcgtgctgaaggacgtgtgcagcgagtgcaccagcttcgtggccgacgtggtgagaagcagcagaaagagcgtggacgtgctgaacaccacccccagaagaagcagacagacccagagcctgtacatccccaacaccagaaccctggacttcaagtag

SEQ ID NO: 11331 - DNA, 474 bp, synthetic construct
  source 1..474: mol_type = other DNA; note = Synthetic coding sequence
atggagaccctgcagagcgagaccaagaccagagtgctgcccagctggctgaccgcccaggtggccaccaagaacgtggcccccatgaaggcccccaagagaatgagaatggccgccgtgcccgtggccgccgccagactgcccgccaccagaaccgtgtactgcatgaacgaggccgagatcgtggacgtggccctgggcatcctgatcgagagcagaaagcaggagaaggcctgcgagcagcccgccctggccggcgccgacaaccccgagcacagccccccctgcagcgtgagcccccacaccagcagcggcagcagcagcgaggaggaggacagcggcaagcaggccctggcccccggcctgagccccagccagagacccggcggcagcagcagcgcctgcagcagaagccccgaggaggaggaggaggaggacgtgctgaagtacgtgagagagatcttcttcagctag

SEQ ID NO: 11332 - DNA, 804 bp, synthetic construct
  source 1..804: mol_type = other DNA; note = Synthetic coding sequence
atggccaactgcgagagaaccttcatcgccatcaagcccgacggcgtgcagagaggcctggtgggcgagatcatcaagagattcgagcagaagggcttcagactggtgggcctgaagttcatgcaggccagcgaggacctgctgaaggagcactacgtggacctgaaggacagacccttcttcgccggcctggtgaagtacatgcacagcggccccgtggtggccatggtgtgggagggcctgaacgtggtgaagaccggcagagtgatgctgggcgagaccaaccccgccgacagcaagcccggcaccatcagaggcgacttctgcatccaggtgggcagaaccatggccaacctggagagaaccttcatcgccatcaagcccgacggcgtgcagagaggcctggtgggcgagatcatcaagagattcgagcagaagggcttcagactggtggccatgaagttcctgagagccagcgaggagcacctgaagcagcactacatcgacctgaaggacagacccttcttccccggcctggtgaagtacatgaacagcggccccgtggtggccatggtgtgggagggcctgaacgtggtgaagaccggcagagtgatgctgggcgagaccaaccccgccgacagcaagcccggcaccatcagaggcgacttctgcatccaggtgggcagaaacatcatccacggcagcgacagcgtgaagagcgccgagaaggagatcagcctgtggttcaagcccgaggagctggtggactacaagagctgcgcccacgactgggtgtacgagtag

SEQ ID NO: 11333 - DNA, 879 bp, synthetic construct
  source 1..879: mol_type = other DNA; note = Synthetic coding sequence
atggtgctgctgagcaccctgggcatcgtgttccagggcgagggcccccccatcagcagctgcgacaccggcaccatggccaactgcgagagaaccttcatcgccatcaagcccgacggcgtgcagagaggcctggtgggcgagatcatcaagagattcgagcagaagggcttcagactggtgggcctgaagttcatgcaggccagcgaggacctgctgaaggagcactacgtggacctgaaggacagacccttcttcgccggcctggtgaagtacatgcacagcggccccgtggtggccatggtgtgggagggcctgaacgtggtgaagaccggcagagtgatgctgggcgagaccaaccccgccgacagcaagcccggcaccatcagaggcgacttctgcatccaggtgggcagaaccatggccaacctggagagaaccttcatcgccatcaagcccgacggcgtgcagagaggcctggtgggcgagatcatcaagagattcgagcagaagggcttcagactggtggccatgaagttcctgagagccagcgaggagcacctgaagcagcactacatcgacctgaaggacagacccttcttccccggcctggtgaagtacatgaacagcggccccgtggtggccatggtgtgggagggcctgaacgtggtgaagaccggcagagtgatgctgggcgagaccaaccccgccgacagcaagcccggcaccatcagaggcgacttctgcatccaggtgggcagaaacatcatccacggcagcgacagcgtgaagagcgccgagaaggagatcagcctgtggttcaagcccgaggagctggtggactacaagagctgcgcccacgactgggtgtacgagtag

SEQ ID NO: 11334 - DNA, 492 bp, synthetic construct
  source 1..492: mol_type = other DNA; note = Synthetic coding sequence
atgaagagcagccagaccttcgaggagcagaccgagtgcatcgtgaacaccctgctgatggacttcctgagccccaccctgcaggtggccagcagaaacctgtgctgcgtggacgaggtggacagcggcgagccctgcagcttcgacgtggccatcatcgccggcagactgagaatgctgggcgaccagttcaacggcgagctggaggccagcgccaagaacgtgatcgccgagaccatcaagggccagaccggcgccatcctgcaggacaccgtggagagcctgagcaagacctggtgcgcccaggacagcagcctggcctacgagagagccttcctggccgtgagcgtgaagctgctggagtacatggcccacatcgcccccgaggtggtgggccaggtggccatccccatgaccggcatgatcaacggcaaccaggccatcagagagttcatccagggccagggcggctgggagaacctggagagctag

SEQ ID NO: 11335 - DNA, 558 bp, synthetic construct
  source 1..558: mol_type = other DNA; note = Synthetic coding sequence
atgggcaagaagcagaacaagaagaaggtggaggaggtgctggaggaggaggaggaggagtacgtggtggagaaggtgctggacagaagagtggtgaagggcaaggtggagtacctgctgaagtggaagggcttcagcgacgaggacaacacctgggagcccgaggagaacctggactgccccgacctgatcgccgagttcctgcagagccagaagaccgcccacgagaccgacaagagcgagggcggcaagagaaaggccgacagcgacagcgaggacaagggcgaggagagcaagcccaagaagaagaaggaggagagcgagaagcccagaggcttcgccagaggcctggagcccgagagaatcatcggcgccaccgacagcagcggcgagctgatgttcctgatgaagtggaagaacagcgacgaggccgacctggtgcccgccaaggaggccaacgtgaagtgcccccaggtggtgatcagcttctacgaggagagactgacctggcacagctaccccagcgaggacgacgacaagaaggacgacaagaactag

SEQ ID NO: 11336 - DNA, 1350 bp, synthetic construct; identical to SEQ ID NO: 10423
  source 1..1350: mol_type = other DNA; note = Synthetic coding sequence

SEQ ID NO: 11337 - DNA, 741 bp, synthetic construct
  source 1..741: mol_type = other DNA; note = Synthetic coding sequence
atgagcggcgccggcgaggccctggcccccggccccgtgggcccccagagagtggccgaggccggcggcggccagctgggcagcaccgcccagggcaagtgcgacaaggacaacaccgagaaggacatcacccaggccaccaacagccacttcacccacggcgagatgcaggaccagagcatctggggcaaccccagcgacggcgagctgatcagaacccagccccagagactgccccagctgcagaccagcgcccaggtgcccagcggcgaggagatcggcaagatcaagaacggccacaccggcctgagcaacggcaacggcatccaccacggcgccaagcacggcagcgccgacaacagaaagctgagcgcccccgtgagccagaagatgcacagaaagatccagagcagcctgagcgtgaacagcgacatcagcaagaagagcaaggtgaacgccgtgttcagccagaagaccggcagcagccccgaggactgctgcgtgcactgcatcctggcctgcctgttctgcgagttcctgaccctgtgcaacatcgtgctgggccaggccagctgcggcatctgcaccagcgaggcctgctgctgctgctgcggcgacgagatgggcgacgactgcaactgcccctgcgacatggactgcggcatcatggacgcctgctgcgagagcagcgactgcctggagatctgcatggagtgctgcggcatctgcttccccagctag

SEQ ID NO: 11338 - DNA, 30 bp, synthetic construct
  source 1..30: mol_type = other DNA; note = Synthetic coding sequence
atgagctactaccagagacccttcagctag

SEQ ID NO: 11339 - DNA, 2001 bp, synthetic construct
  source 1..2001: mol_type = other DNA; note = Synthetic coding sequence
atgaacaccggcagagacagccagagccccgacagcgccaagggcttcagaagcgtgagacccaacctgcaggacaagagaagccccacccagagccagatcaccgtgaacggcaacagcggcggcgccgtgagccccatgagctactaccagagacccttcagccccagcgcctacagcctgcccgccagcctgaacagcagcatcgtgatgcagcacggcaccagcctggacagcaccgacacctacccccagcacgcccagagcctggacggcaccaccagcagcagcatccccctgtacagaagcagcgaggaggagaagagagtgaccgtgatcaaggccccccactaccccggcatcggccccgtggacgagagcggcatccccaccgccatcagaaccaccgtggacagacccaaggactggtacaagaccatgttcaagcagatccacatggtgcacaagcccgacgacgacaccgacatgtacaacaccccctacacctacaacgccggcctgtacaaccccccctacagcgcccagagccaccccgccgccaagacccagacctacagacccctgagcaagagccacagcgacaacagccccaacgccttcaaggacgccagcagccccgtgccccccccccacgtgcccccccccgtgccccccctgagacccagagacagaagcagcaccgagaagcacgactgggacccccccgacagaaaggtggacaccagaaagttcagaagcgagcccagaagcatcttcgagtacgagcccggcaagagcagcatcctgcagcacgagagacccaccgacagaatcaaccccgacgacatcgacctggagaacgagccctggtacaagttcttcagcgagctggagttcggcagacccccccccaagaagcccctggactacgtgcaggaccacagcagcggcgtgttcaacgaggccagcctgtaccagagcagcatcgacagaagcctggagagacccatgagcagcgccagcatggccagcgacttcagaaagagaagaaagagcgagcccgccgtgggcccccccagaggcctgggcgaccagagcgccagcagaaccagccccggcagagtggacctgcccggcagcagcaccaccctgaccaagagcttcaccagcagcagccccagcagccccagcagagccaaggacagagagagccccagaagctacagcagcaccctgaccgacatgggcagaagcgcccccagagagagaagaggcacccccgagaaggagaagctgcccgccaaggccgtgtacgacttcaaggcccagaccagcaaggagctgagcttcaagaagggcgacaccgtgtacatcctgagaaagatcgaccagaactggtacgagggcgagcaccacggcagagtgggcatcttccccatcagctacgtggagaagctgaccccccccgagaaggcccagcccgccagaccccccccccccgcccagcccggcgagatcggcgaggccatcgccaagtacaacttcaacgccgacaccaacgtggagctgagcctgagaaagggcgacagagtgatcctgctgaagagagtggaccagaactggtacgagggcaagatccccggcaccaacagacagggcatcttccccgtgagctacgtggaggtggtgaagaagaacaccaagggcgccgaggactaccccgacccccccatcccccacagctacagcagcgacagaatccacagcctgagcagcaacaagccccagagacccgtgttcacccacgagaacatccagggcggcggcgagcccttccaggccctgtacaactacacccccagaaacgaggacgagctggagctgagagagagcgacgtgatcgacgtgatggagaagtgcgacgacggctggttcgtgggcaccagcagaagaaccaagttcttcggcaccttccccggcaactacgtgaagagactgtag

SEQ ID NO: 11340 - DNA, 2472 bp, synthetic construct
  source 1..2472: mol_type = other DNA; note = Synthetic coding sequence
atgaccctgctgagcagccagagcagcagcctggtggcccccagcggcagcgtgagcgccgagaaccccgagcagagaatgctggagaagagagccaaggtgatcgaggagctgctgcagaccgagagagactacatcagagacctggagatgtgcatcgagagaatcatggtgcccatgcagcaggcccaggtgcccaacatcgacttcgagggcctgttcggcaacatgcagatggtgatcaaggtgagcaagcagctgctggccgccctggagatcagcgacgccgtgggccccgtgttcctgggccacagagacgagctggagggcacctacaagatctactgccagaaccacgacgaggccatcgccctgctggagatctacgagaaggacgagaagatccagaagcacctgcaggacagcctggccgacctgaacagcctggtgctgaagaagggctgcaccaactacatcaacctgggcagcttcctgatcaagcccgtgcagagagtgatgagataccccctgctgctgatggagctgctgaacagcacccccgagagccaccccgacaaggtgcccctgaccaacgccgtgctggccgtgaaggagatcaacgtgaacatcaacgagtacaagagaagaaaggacctggtgctgaagtacagaaagggcgacgaggacagcctgatggagaagatcagcaagctgaacatccacagcatcatcaagaagagcaacagagtgagcagccacctgaagcacctgaccggcttcgccccccagatcaaggacgaggtgttcgaggagaccgagaagaacttcagaatgcaggagagactgatcaagagcttcatcagagacctgagcctgtacctgcagcacatcagagagagcgcctgcgtgaaggtggtggccgccgtgagcatgtgggacgtgtgcatggagagaggccacagagacctggagcagttcgagagagtgcacagatacatcagcgaccagctgttcaccaacttcaaggagagaaccgagagactggtgatcagccccctgaaccagctgctgagcatgttcaccggcccccacaagctggtgcagaagagattcgacaagctgctggacttctacaactgcaccgagagagccgagaagctgaaggacaagaagaccctggaggagctgcagagcgccagaaacaactacgaggccctgaacgcccagctgctggacgagctgcccaagttccaccagtacgcccagggcctgttcaccaactgcgtgcacggctacgccgaggcccactgcgacttcgtgcaccaggccctggagcagctgaagcccctgctgagcctgctgaaggtggccggcagagagggcaacctgatcgccatcttccacgaggagcacagcagagtgctgcagcagctgcaggtgttcaccttcttccccgagagcctgcccgccaccaagaagcccttcgagagaaagaccatcgacagacagagcgccagaaagcccctgctgggcctgcccagctacatgctgcagagcgaggagctgagagccagcctgctggccagatacccccccgagaagctgttccaggccgagagaaacttcaacgccgcccaggacctggacgtgagcctgctggagggcgacctggtgggcgtgatcaagaagaaggaccccatgggcagccagaacagatggctgatcgacaacggcgtgaccaagggcttcgtgtacagcagcttcctgaagccctacaaccccagaagaagccacagcgacgccagcgtgggcagccacagcagcaccgagagcgagcacggcagcagcagccccagattccccagacagaacagcggcagcaccctgaccttcaaccccagcagcatggccgtgagcttcaccagcggcagctgccagaagcagccccaggacgccagccccccccccaaggagtgcgaccagggcaccctgagcgccagcctgaaccccagcaacagcgagagcagccccagcagatgccccagcgaccccgacagcaccagccagcccagaagcggcgacagcgccgacgtggccagagacgtgaagcagcccaccgccacccccagaagctacagaaacttcagacaccccgagatcgtgggctacagcgtgcccggcagaaacggccagagccaggacctggtgaagggctgcgccagaaccgcccaggcccccgaggacagaagcaccgagcccgacggcagcgaggccgagggcaaccaggtgtacttcgccgtgtacaccttcaaggccagaaaccccaacgagctgagcgtgagcgccaaccagaagctgaagatcctggagttcaaggacgtgaccggcaacaccgagtggtggctggccgaggtgaacggcaagaagggctacgtgcccagcaactacatcagaaagaccgagtacacctag

SEQ ID NO: 11341 - DNA, 2964 bp, synthetic construct
  source 1..2964: mol_type = other DNA; note = Synthetic coding sequence
atggccgagagcagcagcgagagcgaccacttcagatgcagagacagactgagcccctgggccgccagaagcacccacagaggcaccagaagcctgcccaccgtggaggtgaccgagaaggtgaacaccatcaccagcaccctgcaggacaccagcagaaacctgagacaggtggaccagatgctgggcagatacagagagtacagcaacggccaggccggcgccatcgagcacctgaaggagagcctggagcagagcatcgaccagctgagaagccagagactgctgagaaacagcggcggcagaagcatcagcgtgaccagcctgagcgccagcgacctggacggcggcaccggcagcgagctgcaccacttcccccccaccagccccctgaaggactacggcgacccccagggcatcaagagaatgagaagcagaaccggcgtgagattcgtgcaggagaccgacgacatgacccagctgcacggcttccaccagagcctgagagacctgagcagcgagcagatcagactgggcgacgacttcaacagagagctgagcagaagaagcagaagcgacgccgagaccaagagagccctggaggagctgaccgagaagctgaacgaggcccagaagcaggaggtggtgagcgacagagtggagagaagactgcaggagctggagagagagatgagaaccgagagagagctggtggagagaagacaggaccagctgggcctgatgagcctgcagctgcaggaggccctgaagaagcaggaggccaaggccgacgagcacgagggcgccatcaagaacaagctgagacagaccgagaccgagaagaaccagctggagcaggagctggagctgagcagaagactgctgaaccagagcgagggcagcagagagaccctgctgcaccaggtggaggagctgagaacccagctgaccaaggccgagggcgacagaaagggcctgcagcaccaggtgagccagatcagcaagcagcagagcaactaccaggacgagcagggcgaggactggagattcagaagaggcgtggagagagagaagcaggacctggagaagcagatgagcgacctgagagtgcagctgaacttcagcgccatggccagcgagctggaggaggtgaagagatgcatggagagaaaggacaaggagaaggcccacctggccagccaggtggagaacctgaccagagagctggagaacggcgagaagcagcagctgcagatgctggacagactgaaggagatccagaaccacttcgacacctgcgaggccgagagaaagcacgccgacctgcagatcagcgagctgaccagacacgccgaggacgccaccaagcaggccgagagatacctgagcgagctgcagcagagcgaggccctgaaggaggaggccgagaagagaagagaggacctgaagctgaaggcccaggagagcatcagacagtggaagctgaagcacaagaagctggagagagccctggagaagcagagcgagaccgtggacgagctgaccggcaagaacaaccagatcctgaaggagaaggacgagctgaagacccagctgtacgccgccctgcagcagatcgagaacctgagaaaggagctgaacgacgtgctgaccaagagagccctgcaggaggaggagctgcacagcaaggaggagaagctgagagacatcaagagccaccaggccgacctggagctggaggtgaagaacagcctggacaccatccacagactggagagcgagctgaagaagcagagcaagatccagagccagatgaaggtggagaaggcccacctggaggaggagatcgccgagctgaagaagagccaggcccaggacaaggccaagctgctggagatgcaggagagcatcaaggacctgagcgccatcagagccgacctggccaacaagctggccgaggaggagagagccaagaaggccgtgctgaaggacctgagcgacctgaccgcccaggccaagagcagagacgaggagaccgccaccatcatcacccagctgaagctggagagagacgtgcaccagagagagctgaaggacctgaccagcagcctgcagagcgtgaagaccaagcacgagcagaacatccaggagctgatgaagcacttcaagaaggagaagagcgaggccgagaaccacatcagaaccctgaaggccgagagcctggaggagaagaacatggccaagatccacagaggccagctggagaagctgaagagccagtgcgacagactgaccgaggagctgacccagaacgagaacgagaacaagaagctgaagctgaagtaccagtgcctgaaggaccagctggaggagagagagaagcacatcagcatcgaggaggagcacctgagaagaatggaggaggccagactgcagctgaaggaccagctgctgtgcctggagaccgagcaggagagcatcctgggcgtgatcggcaaggagatcgacgccgcctgcaagaccttcagcaaggacagcgtggagaagctgaaggtgttcagcagcggccccgacatccactacgacccccacagatggctggccgagagcaagaccaagctgcagtggctgtgcgaggagctgaaggagagagagaacagagagaagaacctgagacaccagctgatgctgtgcagacagcagctgagaaacctgaccgagaacaaggagagcgagctgcagtgcctgttccagcagatcgagagacaggagcagctgctggacgagatccacagagagaagagagacctgctggaggagacccagagaaaggacgaggagatgggcagcctgcaggacagagtgatcgccctggagaccagcacccaggtggccctggaccacctggagagcgtgcccgagaagctgagcctgctggaggacttcaaggacttcagaagatag

SEQ ID NO: 11342 - DNA, 5157 bp, synthetic construct
  source 1..5157: mol_type = other DNA; note = Synthetic coding sequence
atgagcggcaccagcagccccgaggccgtgaagaagctgctggagaacatgcagagcgacctgagagccctgagcctggagtgcaagaagaagttcccccccgtgaaggaggccgccgagagcggcatcatcaaggtgaagaccatcgccgccagaaacaccgagatcctggccgccctgaaggagaacagcagcgaggtggtgcagcccttcctgatgggctgcggcaccaaggagcccaagatcacccagctgtgcctggccgccatccagagactgatgagccacgaggtggtgagcgagaccgccgccggcaacatcatcaacatgctgtggcagctgatggagaacagcctggaggagctgaagctgctgcagaccgtgctggtgctgctgaccaccaacaccgtggtgcacgacgaggccctgagcaaggccatcgtgctgtgcttcagactgcacttcaccaaggacaacatcaccaacaacaccgccgccgccaccgtgagacaggtggtgaccgtggtgttcgagagaatggtggccgaggacgagagacacagagacatcatcgagcagcccgtgctggtgcagggcaacagcaacagaagaagcgtgagcaccctgaagccctgcgccaaggacgcctacatgctgttccaggacctgtgccagctggtgaacgccgacgccccctactggctggtgggcatgaccgagatgaccagaaccttcggcctggagctgctggagagcgtgctgaacgacttcccccaggtgttcctgcagcaccaggagttcagcttcctgctgaaggagagagtgtgccccctggtgatcaagctgttcagccccaacatcaagttcagacagggcagcagcaccagcagcagccccgcccccgtggagaagccctacttccccatctgcatgagactgctgagagtggtgagcgtgctgatcaagcagttctacagcctgctggtgaccgagtgcgagatcttcctgagcctgctggtgaagttcctggacgccgacaagccccagtggctgagagccgtggccgtggagagcatccacagattctgcgtgcagccccagctgctgagaagcttctgccagagctacgacatgaagcagcacagcaccaaggtgttcagagacatcgtgaacgccctgggcagcttcatccagagcctgttcctggtgccccccaccggcaaccccgccaccagcaaccaggccggcaacaacaacctgggcggcagcgtgagcgcccccgccaacagcggcatggtgggcatcggcggcggcgtgaccctgctgcccgccttcgagtacagaggcacctggatccccatcctgaccatcaccgtgcagggcagcgccaaggccacctacctggagatgctggacaaggtggagccccccaccatccccgagggctacgccatgagcgtggccttccactgcctgctggacctggtgagaggcatcaccagcatgatcgagggcgagctgggcgagctggagaccgagtgccagaccaccaccgaggagggcagcagccccacccagagcaccgagcagcaggacctgcagagcaccagcgaccagatggacaaggagatcgtgagcagagccgtgtgggaggagatggtgaacgcctgctggtgcggcctgctggccgccctgagcctgctgctggacgccagcaccgacgaggccgccaccgagaacatcctgaaggccgagctgaccatggccgccctgtgcggcagactgggcctggtgaccagcagagacgccttcatcaccgccatctgcaagggcagcctgcccccccactacgccctgaccgtgctgaacaccaccaccgccgccaccctgagcaacaagagctacagcgtgcagggccagagcgtgatgatgatcagccccagcagcgagagccaccagcaggtggtggccgtgggccagcccctggccgtgcagccccagggcaccgtgatgctgaccagcaagaacatccagtgcatgagaaccctgctgaacctggcccactgccacggcgccgtgctgggcaccagctggcagctggtgctggccaccctgcagcacctggtgtggatcctgggcctgaagcccagcagcggcggcgccctgaagcccggcagagccgtggagggccccagcaccgtgctgaccaccgccgtgatgaccgacctgcccgtgatcagcaacatcctgagcagactgttcgagagcagccagtacctggacgacgtgagcctgcaccacctgatcaacgccctgtgcagcctgagcctggaggccatggacatggcctacggcaacaacaaggagcccagcctgttcgccgtggccaagctgctggagaccggcctggtgaacatgcacagaatcgagatcctgtggagacccctgaccggccacctgctggagaaggtgtgccagcaccccaacagcagaatgagagagtggggcgccgaggccctgaccagcctgatcaaggccggcctgaccttcaaccacgacccccccctgagccagaaccagagactgcagctgctgctgctgaaccccctgaaggagatgagcaacatcaaccaccccgacatcagactgaagcagctggagtgcgtgctgcagatcctgcagagccagggcgacagcctgggccccggctggcccctggtgctgggcgtgatgggcgccatcagaaacgaccagggcgagagcctgatcagaaccgccttccagtgcctgcagctggtggtgaccgacttcctgcccaccatgccctgcacctgcctgcagatcgtggtggacgtggccggcagcttcggcctgcacaaccaggagctgaacatcagcctgaccagcatcggcctgctgtggaacatcagcgactacttcttccagagaggcgagaccatcgagaaggagctgaacaaggaggaggccgcccagcagaagcaggccgaggagaagggcgtggtgctgaacagacccttccaccccgccccccccttcgactgcctgtggctgtgcctgtacgccaagctgggcgagctgtgcgtggaccccagacccgccgtgagaaagagcgccggccagaccctgttcagcaccatcggcgcccacggcaccctgctgcagcacagcacctggcacaccgtgatctggaaggtgctgttccacctgctggacagagtgagagagagcagcaccaccgccgacaaggagaagatcgagagcggcggcggcaacatcctgatccaccacagcagagacaccgccgagaagcagtgggccgagacctgggtgctgaccctggccggcgtggccagaatcttcaacaccagaagatacctgctgcagcccctgggcgacttcagcagagcctgggacgtgctgctggaccacatccagagcgccgccctgagcaagaacaacgaggtgagcctggccgccctgaagagcttccaggagatcctgcagatcgtgagccccgtgagagacagcgacaagcccgagaccccccccgtggtgaacgtgcccgtgcccgtgctgatcggccccatcagcggcatgagcagacccttcgtgagaaccgacagcatcggcgagaagctgggcagatacagcagcagcgagccccccatcgtgaccgacgagctggaggacctgaacctgtggtgggccgcctggaacacctggtacagaatcggcagcgagagcaccaagccccccatcaccttcgacaagctgaccttcatccccagccagcccttcctgaccgccctgatccagatcttccccgccctgtaccagcacatcaagaccggcttcaacatggacgacctgcagaagctgggcgtgatcctgcacagcgccatcagcgtgcccatcagcagcgacgccagccccttcatcctgcccagctacaccgaggccgtgctgaccagcctgcaggaggccgtgctgaccgccctggacgtgctgcagaaggccatctgcgtgggccccgagaacatgcagatcatgtaccccgccatcttcgaccagctgctggccttcgtggagttcagctgcaagcccccccagtacggccagctggagaccaagcacatcgccaacgccaagtacaaccagatccagctgttcgcccccgccgagtgggtggccctgaactacgtgcccttcgccgagagaagcctggaggtggtggtggacctgtaccagaagaccgcctgccacaaggccgtggtgaacgagaaggtgctgcagaacatcatcaagaccctgagagtgcccctgagcctgaagtacagctgccccagcgagagcacctggaagctggccgtgagcagcctgctgagagtgctgagcatcggcctgcccgtggccagacagcacgccagcagcggcaagttcgacagcatgtggcccgagctggccaacaccttcgaggacttcctgttcaccaagagcatcccccccgacaacctgagcatccaggagttccagagaaacgagaacatcgacgtggaggtggtgcagctgatcagcaacgagatcctgccctacgccaacttcatccccaaggagttcgtgggccagatcatgaccatgctgaacaagggcagcatccacagccagagcagcagcttcaccgaggccgagatcgacatcagactgagagaggagttcagcaagatgtgcttcgagaccctgctgcagttcagcttcagcaacaaggtgaccaccccccaggagggctacatcagcagaatggccctgagcgtgctgctgaagagaagccaggacgtgctgcacagatacatcgaggacgagagactgagcggcaagtgccccctgcccagacagcaggtgaccgagatcatcttcgtgctgaaggccgtgagcaccctgatcgacagcctgaagaagacccagcccgagaacgtggacggcaacacctgggcccaggtgatcgccctgtaccccaccctggtggagtgcatcacctgcagcagcagcgaggtgtgcagcgccctgaaggaggccctggtgcccttcaaggacttcatgcagccccccgccagcagagtgcagaacggcgagagctag

SEQ ID NO: 11343 - DNA, 2100 bp, synthetic construct
  source 1..2100: mol_type = other DNA; note = Synthetic coding sequence
atgagcagcagaaaggtgctggccatccaggccagaaagagaagacccaagagagagaagcaccccaagaagcccgagccccagcagaaggcccccctggtgcccccccccccccccccccccccccccccccccccccccctgcccgaccccaccccccccgagcccgaggaggagatcctgggcagcgacgacgaggagcaggaggaccccgccgactactgcaagggcggctaccaccccgtgaagatcggcgacctgttcaacggcagataccacgtgatcagaaagctgggctggggccacttcagcaccgtgtggctgtgctgggacatgcagggcaagagattcgtggccatgaaggtggtgaagagcgcccagcactacaccgagaccgccctggacgagatcaagctgctgaagtgcgtgagagagagcgaccccagcgaccccaacaaggacatggtggtgcagctgatcgacgacttcaagatcagcggcatgaacggcatccacgtgtgcatggtgttcgaggtgctgggccaccacctgctgaagtggatcatcaagagcaactaccagggcctgcccgtgagatgcgtgaagagcatcatcagacaggtgctgcagggcctggactacctgcacagcaagtgcaagatcatccacaccgacatcaagcccgagaacatcctgatgtgcgtggacgacgcctacgtgagaagaatggccgccgaggccaccgagtggcagaaggccggcgcccccccccccagcggcagcgccgtgagcaccgccccccagcagaagcccatcggcaagatcagcaagaacaagaagaagaagctgaagaagaagcagaagagacaggccgagctgctggagaagagactgcaggagatcgaggagctggagagagaggccgagagaaagatcatcgaggagaacatcaccagcgccgcccccagcaacgaccaggacggcgagtactgccccgaggtgaagctgaagaccaccggcctggaggaggccgccgaggccgagaccgccaaggacaacggcgaggccgaggaccaggaggagaaggaggacgccgagaaggagaacatcgagaaggacgaggacgacgtggaccaggagctggccaacatcgaccccacctggatcgagagccccaagaccaacggccacatcgagaacggccccttcagcctggagcagcagctggacgacgaggacgacgacgaggaggactgccccaaccccgaggagtacaacctggacgagcccaacgccgagagcgactacacctacagcagcagctacgagcagttcaacggcgagctgcccaacggcagacacaagatccccgagagccagttccccgagttcagcaccagcctgttcagcggcagcctggagcccgtggcctgcggcagcgtgctgagcgagggcagccccctgaccgagcaggaggagagcagccccagccacgacagaagcagaaccgtgagcgccagcagcaccggcgacctgcccaaggccaagaccagagccgccgacctgctggtgaaccccctggaccccagaaacgccgacaagatcagagtgaagatcgccgacctgggcaacgcctgctgggtgcacaagcacttcaccgaggacatccagaccagacagtacagaagcatcgaggtgctgatcggcgccggctacagcacccccgccgacatctggagcaccgcctgcatggccttcgagctggccaccggcgactacctgttcgagccccacagcggcgaggactacagcagagacgaggaccacatcgcccacatcatcgagctgctgggcagcatccccagacacttcgccctgagcggcaagtacagcagagagttcttcaacagaagaggcgagctgagacacatcaccaagctgaagccctggagcctgttcgacgtgctggtggagaagtacggctggccccacgaggacgccgcccagttcaccgacttcctgatccccatgctggagatggtgcccgagaagagagccagcgccggcgagtgcctgagacacccctggctgaacagctag

SEQ ID NO: 11344 - DNA, 1113 bp, synthetic construct
  source 1..1113: mol_type = other DNA; note = Synthetic coding sequence
atgggcttcaacagacccagcaagatccaggagaacgccctgcccctgatgctggccgagcccccccagaacctgatcgcccagagccagagcggcaccggcaagaccgccgccttcgtgctggccatgctgagccaggtggagcccgccaacaagtacccccagtgcctgtgcctgagccccacctacgagctggccctgcagaccggcaaggtgatcgagcagatgggcaagttctaccccgagctgaagctggcctacgccgtgagaggcaacaagctggagagaggccagaagatcagcgagcagatcgtgatcggcacccccggcaccgtgctggactggtgcagcaagctgaagttcatcgaccccaagaagatcaaggtgttcgtgctggacgaggccgacgtgatgatcgccacccagggccaccaggaccagagcatcagaatccagagaatgctgcccagaaactgccagatgctgctgttcagcgccaccttcgaggacagcgtgtggaagttcgcccagaaggtggtgcccgaccccaacgtgatcaagctgaagagagaggaggagaccctggacaccatcaagcagtactacgtgctgtgcagcagcagagacgagaagttccaggccctgtgcaacctgtacggcgccatcaccatcgcccaggccatgatcttctgccacaccagaaagaccgccagctggctggccgccgagctgagcaaggagggccaccaggtggccctgctgagcggcgagatgatggtggagcagagagccgccgtgatcgagagattcagagagggcaaggagaaggtgctggtgaccaccaacgtgtgcgccagaggcatcgacgtggagcaggtgagcgtggtgatcaacttcgacctgcccgtggacaaggacggcaaccccgacaacgagacctacctgcacagaatcggcagaaccggcagattcggcaagagaggcctggccgtgaacatggtggacagcaagcacagcatgaacatcctgaacagaatccaggagcacttcaacaagaagatcgagagactggacaccgacgacctggacgagatcgagaagatcgccaactag

SEQ ID NO: 11345 - DNA, 2640 bp, synthetic construct
  source 1..2640: mol_type = other DNA; note = Synthetic coding sequence
atgttctggaagttcgacctgcacagcagcagccacatcgacaccctgctggagagagaggacgtgaccctgaaggagctgatggacgaggaggacgtgctgcaggagtgcaaggcccagaacagaaagctgatcgagttcctgctgaaggccgagtgcctggaggacctggtgagcttcatcatcgaggagcccccccaggacatggacgagaagatcagatacaagtaccccaacatcagctgcgagctgctgaccagcgacgtgagccagatgaacgacagactgggcgaggacgagagcctgctgatgaagctgtacagcttcctgctgaacgacagccccctgaaccccctgctggccagcttcttcagcaaggtgctgagcatcctgatcagcagaaagcccgagcagatcgtggacttcctgaagaagaagcacgacttcgtggacctgatcatcaagcacatcggcaccagcgccatcatggacctgctgctgagactgctgacctgcatcgagcccccccagcccagacaggacgtgctgaactggctgaacgaggagaagatcatccagagactggtggagatcgtgcaccccagccaggaggaggacagacacagcaacgccagccagagcctgtgcgagatcgtgagactgagcagagaccagatgctgcagatccagaacagcaccgagcccgaccccctgctggccaccctggagaagcaggagatcatcgagcagctgctgagcaacatcttccacaaggagaagaacgagagcgccatcgtgagcgccatccagatcctgctgaccctgctggagaccagaagacccaccttcgagggccacatcgagatctgcccccccggcatgagccacagcgcctgcagcgtgaacaagagcgtgctggaggccatcagaggcagactgggcagcttccacgagctgctgctggagccccccaagaagagcgtgatgaagaccacctggggcgtgctggacccccccgtgggcaacaccagactgaacgtgatcagactgatcagcagcctgctgcagaccaacaccagcagcatcaacggcgacctgatggagctgaacagcatcggcgtgatcctgaacatgttcttcaagtacacctggaacaacttcctgcacacccaggtggagatctgcatcgccctgatcctggccagccccttcgagaacaccgagaacgccaccatcaccgaccaggacagcaccggcgacaacctgctgctgaagcacctgttccagaagtgccagctgatcgagagaatcctggaggcctgggagatgaacgagaagaagcaggccgagggcggcagaagacacggctacatgggccacctgaccagaatcgccaactgcatcgtgcacagcaccgacaagggccccaacagcgccctggtgcagcagctgatcaaggacctgcccgacgaggtgagagagagatgggagaccttctgcaccagcagcctgggcgagaccaacaagagaaacaccgtggacctggtgaccacctgccacatccacagcagcagcgacgacgagatcgacttcaaggagaccggcttcagccaggacagcagcctgcagcaggccttcagcgactaccagatgcagcagatgaccagcaacttcatcgaccagttcggcttcaacgacgagaagttcgccgaccaggacgacatcggcaacgtgagcttcgacagagtgagcgacatcaacttcaccctgaacaccaacgagagcggcaacatcgccctgttcgaggcctgctgcaaggagagaatccagcagttcgacgacggcggcagcgacgaggaggacatctgggaggagaagcacatcgccttcacccccgagagccagagaagaagcagcagcggcagcaccgacagcgaggagagcaccgacagcgaggaggaggacggcgccaagcaggacctgttcgagcccagcagcgccaacaccgaggacaagatggaggtggacctgagcgagccccccaactggagcgccaacttcgacgtgcccatggagaccacccacggcgcccccctggacagcgtgggcagcgacgtgtggagcaccgaggagcccatgcccaccaaggagaccggctgggccagcttcagcgagttcaccagcagcctgagcaccaaggacagcctgagaagcaacagccccgtggagatggagaccagcaccgagcccatggaccccctgacccccagcgccgccgccctggccgtgcagcccgaggccgccggcagcgtggccatggaggccagcagcgacggcgaggaggacgccgagagcaccgacaaggtgaccgagaccgtgatgaacggcggcatgaaggagaccctgagcctgaccgtggacgccaagaccgagaccgccgtgttcaagagactgctgggcggctgcagcgaggagggcaagctgagcaccagccaggacgccgcctgcaaggacgccgaggagtgccccgagaccgccgaggccaagtgcgccgcccccagaccccccagcagcagccccgagcagagaaccggccagcccagcgcccccggcgacaccagcgtgaacggccccgtgtag

SEQ ID NO: 11346 - DNA, 2622 bp, synthetic construct
  source 1..2622: mol_type = other DNA; note = Synthetic coding sequence
atgttctggaagttcgacctgcacagcagcagccacatcgacaccctgctggagagagaggacgtgaccctgaaggagctgatggacgaggaggacgtgctgcaggagtgcaaggcccagaacagaaagctgatcgagttcctgctgaaggccgagtgcctggaggacctggtgagcttcatcatcgaggagcccccccaggacatggacgagaagatcagatacaagtaccccaacatcagctgcgagctgctgaccagcgacgtgagccagatgaacgacagactgggcgaggacgagagcctgctgatgaagctgtacagcttcctgctgaacgacagccccctgaaccccctgctggccagcttcttcagcaaggtgctgagcatcctgatcagcagaaagcccgagcagatcgtggacttcctgaagaagaagcacgacttcgtggacctgatcatcaagcacatcggcaccagcgccatcatggacctgctgctgagactgctgacctgcatcgagcccccccagcccagacaggacgtgctgaactggctgaacgaggagaagatcatccagagactggtggagatcgtgcaccccagccaggaggaggacagacacagcaacgccagccagagcctgtgcgagatcgtgagactgagcagagaccagatgctgcagatccagaacagcaccgagcccgaccccctgctggccaccctggagaagcaggagatcatcgagcagctgctgagcaacatcttccacaaggagaagaacgagagcgccatcgtgagcgccatccagatcctgctgaccctgctggagaccagaagacccaccttcgagggccacatcgagatctgcccccccggcatgagccacagcgcctgcagcgtgaacaagagcgtgctggaggccatcagaggcagactgggcagcttccacgagctgctgctggagccccccaagaagagcgtgatgaagaccacctggggcgtgctggacccccccgtgggcaacaccagactgaacgtgatcagactgatcagcagcctgctgcagaccaacaccagcagcatcaacggcgacctgatggagctgaacagcatcggcgtgatcctgaacatgttcttcaagtacacctggaacaacttcctgcacacccaggtggagatctgcatcgccctgatcctggccagccccttcgagaacaccgagaacgccaccatcaccgaccaggacagcaccggcgacaacctgctgctgaagcacctgttccagaagtgccagctgatcgagagaatcctggaggcctgggagatgaacgagaagaagcaggccgagggcggcagaagacacggctacatgggccacctgaccagaatcgccaactgcatcgtgcacagcaccgacaagggccccaacagcgccctggtgcagcagctgatcaaggacctgcccgacgaggtgagagagagatgggagaccttctgcaccagcagcctgggcgagaccaacaagagaaacaccgtggacctggtgaccacctgccacatccacagcagcagcgacgacgagatcgacttcaaggagaccggcttcagccaggacagcagcctgcagcaggccttcagcgactaccagatgcagcagatgaccagcaacttcatcgaccagttcggcttcaacgacgagaagttcgccgaccaggacgacatcggcaacgtgagcttcgacagagtgagcgacatcaacttcaccctgaacaccaacgagagcggcaacatcgccctgttcgaggcctgctgcaaggagagaatccagcagttcgacgacggcggcagcgacgaggaggacatctgggaggagaagcacatcgccttcacccccgagagccagagaagaagcagcagcggcagcaccgacagcgaggagagcaccgacagcgaggaggaggacggcgccaagcaggacctgttcgagcccagcagcgccaacaccgaggacaagatggaggtggacctgagcgagccccccaactggagcgccaacttcgacgtgcccatggagaccacccacggcgcccccctggacagcgtgggcagcgacgtgtggagcaccgaggagcccatgcccaccaaggagaccggctgggccagcttcagcgagttcaccagcagcctgagcaccaaggacagcctgagaagcaacagccccgtggagatggagaccagcaccgagcccatggaccccctgacccccagcgccgccgccctggccgtgcagcccgaggccgccggcagcgtggccatggaggccagcagcgacggcgaggaggacgccgagagcaccgacaaggtgaccgagaccgtgatgaacggcggcatgaaggagaccctgagcctgaccgtggacgccaagaccgagaccgccgtgttcaagagcgaggagggcaagctgagcaccagccaggacgccgcctgcaaggacgccgaggagtgccccgagaccgccgaggccaagtgcgccgcccccagaccccccagcagcagccccgagcagagaaccggccagcccagcgcccccggcgacaccagcgtgaacggccccgtgtag

SEQ ID NO: 11347 - DNA, 2640 bp, synthetic construct
  source 1..2640: mol_type = other DNA; note = Synthetic coding sequence
atgttctggaagttcgacctgcacagcagcagccacatcgacaccctgctggagagagaggacgtgaccctgaaggagctgatggacgaggaggacgtgctgcaggagtgcaaggcccagaacagaaagctgatcgagttcctgctgaaggccgagtgcctggaggacctggtgagcttcatcatcgaggagcccccccaggacatggacgagaagatcagatacaagtaccccaacatcagctgcgagctgctgaccagcgacgtgagccagatgaacgacagactgggcgaggacgagagcctgctgatgaagctgtacagcttcctgctgaacgacagccccctgaaccccctgctggccagcttcttcagcaaggtgctgagcatcctgatcagcagaaagcccgagcagatcgtggacttcctgaagaagaagcacgacttcgtggacctgatcatcaagcacatcggcaccagcgccatcatggacctgctgctgagactgctgacctgcatcgagcccccccagcccagacaggacgtgctgaactggctgaacgaggagaagatcatccagagactggtggagatcgtgcaccccagccaggaggaggacagacacagcaacgccagccagagcctgtgcgagatcgtgagactgagcagagaccagatgctgcagatccagaacagcaccgagcccgaccccctgctggccaccctggagaagcaggagatcatcgagcagctgctgagcaacatcttccacaaggagaagaacgagagcgccatcgtgagcgccatccagatcctgctgaccctgctggagaccagaagacccaccttcgagggccacatcgagatctgcccccccggcatgagccacagcgcctgcagcgtgaacaagagcgtgctggaggccatcagaggcagactgggcagcttccacgagctgctgctggagccccccaagaagagcgtgatgaagaccacctggggcgtgctggacccccccgtgggcaacaccagactgaacgtgatcagactgatcagcagcctgctgcagaccaacaccagcagcatcaacggcgacctgatggagctgaacagcatcggcgtgatcctgaacatgttcttcaagtacacctggaacaacttcctgcacacccaggtggagatctgcatcgccctgatcctggccagccccttcgagaacaccgagaacgccaccatcaccgaccaggacagcaccggcgacaacctgctgctgaagcacctgttccagaagtgccagctgatcgagagaatcctggaggcctgggagatgaacgagaagaagcaggccgagggcggcagaagacacggctacatgggccacctgaccagaatcgccaactgcatcgtgcacagcaccgacaagggccccaacagcgccctggtgcagcagctgatcaaggacctgcccgacgaggtgagagagagatgggagaccttctgcaccagcagcctgggcgagaccaacaagagaaacaccgtggacctggtgaccacctgccacatccacagcagcagcgacgacgagatcgacttcaaggagaccggcttcagccaggacagcagcctgcagcaggccttcagcgactaccagatgcagcagatgaccagcaacttcatcgaccagttcggcttcaacgacgagaagttcgccgaccaggacgacatcggcaacgtgagcttcgacagagtgagcgacatcaacttcaccctgaacaccaacgagagcggcaacatcgccctgttcgaggcctgctgcaaggagagaatccagcagttcgacgacggcggcagcgacgaggaggacatctgggaggagaagcacatcgccttcacccccgagagccagagaagaagcagcagcggcagcaccgacagcgaggagagcaccgacagcgaggaggaggacggcgccaagcaggacctgttcgagcccagcagcgccaacaccgaggacaagatggaggtggacctgagcgagccccccaactggagcgccaacttcgacgtgcccatggagaccacccacggcgcccccctggacagcgtgggcagcgacgtgtggagcaccgaggagcccatgcccaccaaggagaccggctgggccagcttcagcgagttcaccagcagcctgagcaccaaggacagcctgagaagcaacagccccgtggagatggagaccagcaccgagcccatggaccccctgacccccagcgccgccgccctggccgtgcagcccgaggccgccggcagcgtggccatggaggccagcagcgacggcgaggaggacgccgagagcaccgacaaggtgaccgagaccgtgatgaacggcggcatgaaggagaccctgagcctgaccgtggacgccaagaccgagaccgccgtgttcaagagagtgctgaagagctacagagaggagggcaagctgagcaccagccaggacgccgcctgcaaggacgccgaggagtgccccgagaccgccgaggccaagtgcgccgcccccagaccccccagcagcagccccgagcagagaaccggccagcccagcgcccccggcgacaccagcgtgaacggccccgtgtag

SEQ ID NO: 11348 - DNA, 1134 bp, synthetic construct
  source 1..1134: mol_type = other DNA; note = Synthetic coding sequence
atgagcgacgaggtgttcagcaccaccctggcctacaccaagagccccaaggtgaccaagagaaccaccttccaggacgagctgatcagagccatcaccgccagaagcgccagacagagaagcagcgagtacagcgacgacttcgacagcgacgagatcgtgagcctgggcgacttcagcgacaccagcgccgacgagaacagcgtgaacaagaagatgaacgacttccacatcagcgacgacgaggagaagaaccccagcaagctgctgttcctgaagaccaacaagagcaacggcaacatcaccaaggacgagcccgtgtgcgccatcaagaacgaggaggagatggcccccgacggctgcgaggacatcgtggtgaagagcttcagcgagagccagaacaaggacgaggagttcgagaaggacaagatcaagatgaagcccaagcccagaatcctgagcatcaagagcaccagcagcgccgagaacaacagcctggacaccgacgaccacttcaagcccagccccagacccagaagcatgctgaagaagaagagccacatggaggagaaggacggcctggaggacaaggagaccgccctgagcgaggagctggagctgcacagcgcccccagcagcctgcccacccccaacggcatccagctggaggccgagaagaaggccttcagcgagaacctggaccccgaggacagctgcctgaccagcctggccagcagcagcctgaagcagatcctgggcgacagcttcagccccggcagcgagggcaacgccagcggcaaggaccccaacgaggagatcaccgagaaccacaacagcctgaagagcgacgagaacaaggagaacagcttcagcgccgaccacgtgaccaccgccgtggagaagagcaaggagagccaggtgaccgccgacgacctggaggaggagaaggccaaggccgagctgatcatggacgacgacagaaccgtggaccccctgctgagcaagagccagagcatcctgatcagcaccagcgccaccgccagcagcaagaagaccatcgaggacagaaacatcaagaacaagaagagcaccaacaacagagccagcagcgccagcgccagcaaggccagctag

SEQ ID NO: 11349 - DNA, 576 bp, synthetic construct; identical to SEQ ID NO: 9798
  source 1..576: mol_type = other DNA; note = Synthetic coding sequence

SEQ ID NO: 11350 - DNA, 576 bp, synthetic construct; identical to SEQ ID NO: 9798
  source 1..576: mol_type = other DNA; note = Synthetic coding sequence

SEQ ID NO: 11351 - DNA, 570 bp, synthetic construct
  source 1..570: mol_type = other DNA; note = Synthetic coding sequence
atgggcaagagctgcaaggtggtggtgtgcggccaggccagcgtgggcaagaccagcatcctggagcagctgctgtacggcaaccacgtggtggccatgatcgagacccaggaggacatctacgtgggcagcatcgagaccgacagaggcgtgagagagcaggtgagattctacgacaccagaggcctgagagacggcgccgagctgcccagacactgcttcagctgcaccgacggctacgtgctggtgtacagcaccgacagcagagagagcttccagagagtggagctgctgaagaaggagatcgacaagagcaaggacaagaaggaggtgaccatcgtggtgctgggcaacaagtgcgacctgcaggagcagagaagagtggaccccgacgtggcccagcactgggccaagagcgagaaggtgaagctgtgggaggtgagcgtggccgacagaagaagcctgctggagcccttcgtgtacctggccagcaagatgacccagccccagagcaagagcgccttccccctgagcagaaagaacaagggcagcggcagcctggacggctag

SEQ ID NO: 11352 - DNA, 576 bp, synthetic construct; identical to SEQ ID NO: 9798
  source 1..576: mol_type = other DNA; note = Synthetic coding sequence

SEQ ID NO: 11353 - DNA, 1005 bp, synthetic construct
  source 1..1005: mol_type = other DNA; note = Synthetic coding sequence
atggccgaggaggtgagaagagaggaggccagcggcgtgggcagagccagaacccccacccccggcgccctgagagccccccagctggtgaccgaggccccccccctgcaccccggccacaccctgatgaaggccaccgtgctgatgagacagcccggcagagtgcaggagatcgtgggcgccctgagaaagggcggcggcgacagactgcaggtgatcagcgacttcgacatgaccctgagcagattcgcctacaacggcaagagatgccccagcagctacaacatcctggacaacagcaagatcatcagcgaggagtgcagaaaggagctgaccgccctgctgcaccactactaccccatcgagatcgacccccacagaaccgtgaaggagaagctgccccacatggtggagtggtggaccaaggcccacaacctgctgtgccagcagaagatccagaagttccagatcgcccaggtggtgagagagagcaacgccatgctgagagagggctacaagaccttcttcaacaccctgtaccacaacaacatccccctgttcatcttcagcgccggcatcggcgacatcctggaggagatcatcagacagatgaaggtgttccaccccaacatccacatcgtgagcaactacatggacttcaacgaggacggcttcctgcagggcttcaagggccagctgatccacacctacaacaagaacagcagcgcctgcgagaacagcggctacttccagcagctggagggcaagaccaacgtgatcctgctgggcgacagcatcggcgacctgaccatggccgacggcgtgcccggcgtgcagaacatcctgaagatcggcttcctgaacgacaaggtggaggagagaagagagagatacatggacagctacgacatcgtgctggagaaggacgagaccctggacgtggtgaacggcctgctgcagcacatcctgtgccagggcgtgcagctggagatgcagggcccctag

SEQ ID NO: 11354 - DNA, 531 bp, synthetic construct; identical to SEQ ID NO: 9640
  source 1..531: mol_type = other DNA; note = Synthetic coding sequence

SEQ ID NO: 11355 - DNA, 912 bp, synthetic construct
  source 1..912: mol_type = other DNA; note = Synthetic coding sequence
atggacagcctgcccgacgagttcttcgtgagacaccccgccgtggaggaccagagaaaggaggagaccgagaacaagctggagaagagcagcggccagctgaacaagcaggagaacgacatccccaccgacctggtgcccgtgaacctgctgctggaggtgaagaagctgctgaacgccatcaacaccctgcccaagggcgtggtgccccacatcaagaagttcctgcaggaggacttcagcttccagaccatgcagagagaggtggccgccaacagccagaacggcgaggagatcgtgcccgccctgaccctgagattcctgatcacccagctggaggccgccctgagaaacatccaggccggcaactacaccgcccaccagatcaacatcggctactacctgaccctgctgttcctgtacggcgtggccctgaccgagagaggcaagaaggaggactacaccgaggccgagaacaagttcctggtgatgaagatgatgatccaggagaacgagatctgcgagaacttcatgagcctggtgtacttcggcagaggcctgctgagatgcgcccagaagagatacaacggcggcctgctggagttccacaagagcctgcaggagatcggcgacaagaacgaccactggttcgacatcgaccccaccgaggacgaggacctgcccaccaccttcaaggacctgctgaacaacttcatcaagaccaccgagagcaacatcatgaagcagaccatctgcagctacctggactgcgagagaagctgcgaggccgacatcctgaagaacaccagctacaagggcttcttccagctgatgtgcagcaagagctgctgcgtgtacttccacaagatctgctggaagaagttcaagaacctgaagtaccccggcttctag

SEQ ID NO: 11356 - DNA, 1869 bp, synthetic construct
  source 1..1869: mol_type = other DNA; note = Synthetic coding sequence
atggacctgctgaccagagagaacgtggccctgaaggtggagagcgcccagcagcccaagcaggtgctgaagatggaggtggccgtgctgaagaagctgcagggcaaggaccacgtgtgcagattcatcggctgcggcagaaacgagaagttcaactacgtggtgatgcagctgcagggcagaaacctggccgacctgagaagaagccagcccagaggcaccttcaccctgagcaccaccctgagactgggcaagcagatcctggagagcatcgaggccatccacagcgtgggcttcctgcacagagacatcaagcccagcaacttcgccatgggcagactgcccagcacctacagaaagtgctacatgctggacttcggcctggccagacagtacaccaacaccaccggcgacgtgagaccccccagaaacgtggccggcttcagaggcaccgtgagatacgccagcgtgaacgcccacaagaacagagagatgggcagacacgacgacctgtggagcctgttctacatgctggtggagttcgccgtgggccagctgccctggagaaagatcaaggacaaggagcaggtgggcatgatcaaggagaagtacgagcacagaatgctgctgaagcacatgcccagcgagttccacctgttcctggaccacatcgccagcctggactacttcaccaagcccgactaccagctgatcatgagcgtgttcgagaacagcatgaaggagagaggcatcgccgagaacgaggccttcgactgggagaaggccggcaccgacgccctgctgagcaccagcaccagcacccccccccagcagaacaccagacagaccgccgccatgttcggcgtggtgaacgtgacccccgtgcccggcgacctgctgagagagaacaccgaggacgtgctgcagggcgagcacctgagcgaccaggagaacgccccccccatcctgcccggcagacccagcgagggcctgggccccagcccccacctggtgccccaccccggcggccccgaggccgaggtgtgggaggagaccgacgtgaacagaaacaagctgagaatcaacatcggcaagagcccctgcgtggaggaggagcagagcagaggcatgggcgtgcccagcagccccgtgagagccccccccgacagccccaccacccccgtgagaagcctgagatacagaagagtgaacagccccgagagcgagagactgagcaccgccgacggcagagtggagctgcccgagagaagaagcagaatggacctgcccggcagccccagcagacaggcctgcagcagccagcccgcccagatgctgagcgtggacaccggccacgccgacagacaggccagcggcagaatggacgtgagcgccagcgtggagcaggaggccctgagcaacgccttcagaagcgtgcccctggccgaggaggaggacttcgacagcaaggagtgggtgatcatcgacaaggagaccgagctgaaggacttcccccccggcgccgagcccagcaccagcggcaccaccgacgaggagcccgaggagctgagacccctgcccgaggagggcgaggagagaagaagactgggcgccgagccccccttccccctgacccccgccctgggcaccccccccagcaccgagagagtgggcccccacagacccaccgagaccgtgggcggcggccagaccctgggcgccctgccccccgccgtgcagccccccgccaccaccggcgtgctgagagtgctgctgctgcacgccggcgacggcgccctgcccagccccagaagaagaagactgctgggcctgctgagattcccccacagcgcccagcccctgggctag

SEQ ID NO: 11357 - DNA, 447 bp, synthetic construct
  source 1..447: mol_type = other DNA; note = Synthetic coding sequence
atggccgccgccatggtgcccggcagaagcgagagctgggagagaggcgagcccggcagacccgccctgtacttctgcggcagcatcagaggcggcagagaggacagaaccctgtacgagagaatcgtgagcagactgagaagattcggcaccgtgctgaccgagcacgtggccgccgccgagctgggcgccagaggcgaggaggccgccggcggcgacagactgatccacgagcaggacctggagtggctgcagcaggccgacgtggtggtggccgaggtgacccagcccagcctgggcgtgggctacgagctgggcagagccgtggccttcaacaagagaatcctgtgcctgttcagaccccagagcggcagaggcgagcaccccaagccccccagctggctgagcatggaccccgccctgagcagcttccccggcggcctgtag

SEQ ID NO: 11358 - DNA, 606 bp, synthetic construct
  source 1..606: mol_type = other DNA; note = Synthetic coding sequence
atggtgaacagctgctgcggcagcgtgtgcagcgaccagggctgcggcctggagaactgctgcagacccagctgctgccagaccacctgctgcagaaccacctgctgcagacccagctgctgcgtgagcagctgctgcagaccccagtgctgccagagcgtgtgctgccagcccacctgctgcagacccagctgctgccagaccacctgctgcagaaccacctgctgcagacccagctgctgcgtgagcagctgctgcagaccccagtgctgccagagcgtgtgctgccagcccacctgctgcagacccagctgctgccagaccacctgctgcagaaccacctgctgcagacccagctgctgcgtgagcagctgctgcagaccccagtgctgccagagcgtgtgctgccagcccacctgctgcagacccagctgctgcatcagcagcagctgctgccccagctgctgcgagagcagctgctgcagaccctgctgctgcctgagacccgtgtgcggcagagtgagctgccacaccacctgctacagacccacctgcgtgatcagcacctgccccagacccctgtgctgcgccagcagctgctgctag

SEQ ID NO: 11359 - DNA, 387 bp, synthetic construct; identical to SEQ ID NO: 11258
  source 1..387: mol_type = other DNA; note = Synthetic coding sequence

SEQ ID NO: 11360 - DNA, 1140 bp, synthetic construct
  source 1..1140: mol_type = other DNA; note = Synthetic coding sequence
atgagcctgagactgagcagcgccagcagaagaagctgccccagacccaccaccggcagcctgagactgtacggcggcggcaccagcttcggcaccggcaacagctgcggcatcagcggcatcggcagcggcttcagcagcgccttcggcggcagcagcagcggcggcaacaccggcggcggcaacccctgcgccggcttcaccgtgaacgagagaggcctgctgagcggcaacgagaaggtgaccatgcagaacctgaacgacagactggccagctacctggacagcgtgcacgccctggaggaggccaacgccgacctggagcagaagatcaagggctggtacgagaagttcggccccggcagctgcagaggcctggaccacgactacagcagatacttccccatcatcgacgacctgaagaaccagatcatcgccagcaccaccagcaacgccaacgccgtgctgcagatcgacaacgccagactgaccgccgacgacttcagactgaagtacgagaacgagctggccctgcaccagagcgtggaggccgacgtgaacggcctgagaagagtgctggacgagatcaccctgtgcagaaccgacctggagatccagtacgagaccctgagcgaggagatgacctacctgaagaagaaccacaaggaggagatgcaggtgctgcagtgcgccgccggcggcaacgtgaacgtggagatcgagctgcagagcctgctggccaccaagcacagcctggagtgcagcctgaccgagaccgagagcaactactgcgcccagctggcccagatccaggcccagatcggcgccctggaggagcagctgcaccaggtgagaaccgagaccgagggccagaagctggagtacgagcagctgctggacatcaagctgcacctggagaaggagatcgagacctactgcctgctgatcggcggcgacgacggcgcctgcaagagcggcggctacaagagcaaggactacggcagcggcaacgtgggcagccaggtgaaggaccccgccaaggccatcgtggtgaagaaggtgctggaggaggtggaccagagaagcaagatcctgaccaccagactgcacagcctggaggagaagagccagagcaactag

SEQ ID NO: 11361 - DNA, 768 bp, synthetic construct
  source 1..768: mol_type = other DNA; note = Synthetic coding sequence
atggacaaggacgaggaggccctgaaggccgcccaggccgagctgaaggaggccagaagacagtggcaccacctgcaggtggagatcgagagcctgcacgccgtggagagaggcctggagaacagcctgcacgccagcgagcagcactaccagatgcagctgcaggacctggagaccgtgatcgagggcctggagaaggagctgcaggaggtgagaagaggcatcgagaagcagctgcaggagcacgagatgctgctgaacaccaagatgagactggagcaggagatcgccacctacagacacctgctggagaaggaggagatcagatactacggctgcatccagggcggcaagaaggacaagaagcccaccaccagcagagtgggcttcgtgctgcccagcgccatcatcaacgagatcagcttcaccaccaaggtgccccagaagtacgagaacgagaacgtggagaccgtgaccaagcaggccatcctgaacggcagcatcgtgaaggagagcaccgaggcccacggcaccatccagaccgagaaggtggacgaggtgatcaaggagtgggagggcagcttcttcaaggacaaccccagactgagaaagaagagcgtgagcctgagattcgacctgcacctggccgccaccgacgagggctgcctggagaccaagcaggacaacctgcccgacatcgaggtgagactgatcatgagaagaagctgcagcatccccagcatcaagccccccagcaccgccaactag

SEQ ID NO: 11362 - DNA, 888 bp, synthetic construct
  source 1..888: mol_type = other DNA; note = Synthetic coding sequence
atggagctgagccagctgctgaacgagatcagagccaactacgagaagatcctgaccagaaaccagatcgagaccgtgctgagcaccagaatccagctggaggaggacatcagcaagaagatggacaaggacgaggaggccctgaaggccgcccaggccgagctgaaggaggccagaagacagtggcaccacctgcaggtggagatcgagagcctgcacgccgtggagagaggcctggagaacagcctgcacgccagcgagcagcactaccagatgcagctgcaggacctggagaccgtgatcgagggcctggagaaggagctgcaggaggtgagaagaggcatcgagaagcagctgcaggagcacgagatgctgctgaacaccaagatgagactggagcaggagatcgccacctacagacacctgctggagaaggaggagatcagatactacggctgcatccagggcggcaagaaggacaagaagcccaccaccagcagagtgggcttcgtgctgcccagcgccatcatcaacgagatcagcttcaccaccaaggtgccccagaagtacgagaacgagaacgtggagaccgtgaccaagcaggccatcctgaacggcagcatcgtgaaggagagcaccgaggcccacggcaccatccagaccgagaaggtggacgaggtgatcaaggagtgggagggcagcttcttcaaggacaaccccagactgagaaagaagagcgtgagcctgagattcgacctgcacctggccgccaccgacgagggctgcctggagaccaagcaggacaacctgcccgacatcgaggtgagactgatcatgagaagaagctgcagcatccccagcatcaagccccccagcaccgccaactag

SEQ ID NO: 11363 - DNA, 1860 bp, synthetic construct; identical to SEQ ID NO: 10320
  source 1..1860: mol_type = other DNA; note = Synthetic coding sequence

SEQ ID NO: 11364 - DNA, 1860 bp, synthetic construct; identical to SEQ ID NO: 10320
  source 1..1860: mol_type = other DNA; note = Synthetic coding sequence

SEQ ID NO: 11365 - DNA, 1170 bp, synthetic construct
  source 1..1170: mol_type = other DNA; note = Synthetic coding sequence
atgctgagatggaccgtgcacctggagggcggccccagaagagtgaaccacgccgccgtggccgtgggccacagagtgtacagcttcggcggctactgcagcggcgaggactacgagaccctgagacagatcgacgtgcacatcttcaacgccgtgagcctgagatggaccaagctgccccccgtgaagagcgccatcagaggccaggcccccgtggtgccctacatgagatacggccacagcaccgtgctgatcgacgacaccgtgctgctgtggggcggcagaaacgacaccgagggcgcctgcaacgtgctgtacgccttcgacgtgaacacccacaagtggttcacccccagagtgagcggcaccgtgcccggcgccagagacggccacagcgcctgcgtgctgggcaagatcatgtacatcttcggcggctacgagcagcaggccgactgcttcagcaacgacatccacaagctggacaccagcaccatgacctggaccctgatctgcaccaagggcagccccgccagatggagagacttccacagcgccaccatgctgggcagccacatgtacgtgttcggcggcagagccgacagattcggccccttccacagcaacaacgagatctactgcaacagaatcagagtgttcgacaccagaaccgaggcctggctggactgcccccccacccccgtgctgcccgagggcagaagaagccacagcgccttcggctacaacggcgagctgtacatcttcggcggctacaacgccagactgaacagacacttccacgacctgtggaagttcaaccccgtgagcttcacctggaagaagatcgagcccaagggcaagggcccctgccccagaagaagacagtgctgctgcatcgtgggcgacaagatcgtgctgttcggcggcaccagccccagccccgaggagggcctgggcgacgagttcgacctgatcgaccacagcgacctgcacatcctggacttcagccccagcctgaagaccctgtgcaagctggccgtgatccagtacaacctggaccagagctgcctgccccacgacatcagatgggagctgaacgccatgaccaccaacagcaacatcagcagacccatcgtgagcagccccttcgcctaccccctgcccagcgcctag

SEQ ID NO: 11366 - DNA, 549 bp, synthetic construct
  source 1..549: mol_type = other DNA; note = Synthetic coding sequence
atgcccatcccccccccccccccccccccccccggccccccccccccccccaccttccaccaggccaacaccgagcagcccaagctgagcagagacgagcagagaggcagaggcgccctgctgcaggacatctgcaagggcaccaagctgaagaaggtgaccaacatcaacgacagaagcgcccccatcctggagaccccccccccccccccccccgtgatcagaaacggcgccagagacgcccccccccccccccccccctacagaatgcacggcagcgagccccccagcagaggcaagcccccccccccccccagcagaacccccgccggcccccccccccccccccccccccccctgagaaacggccacagagacagcatcaccaccgtgagaagcttcctggacgacttcgagagcaagtacagcttccaccccgtggaggacttccccgcccccgaggagtacaagcacttccagagaatctaccccagcaagaccaacagagccgccagaggcgccccccccctgccccccatcctgagatag

SEQ ID NO: 11367 - DNA, 831 bp, synthetic construct
  source 1..831: mol_type = other DNA; note = Synthetic coding sequence
atgaccagcttcagactggccctgatccagctgcagatcagcagcatcaagagcgacaacgtgaccagagcctgcagcttcatcagagaggccgccacccagggcgccaagatcgtgagcctgcccgagtgcttcaacagcccctacggcgccaagtacttccccgagtacgccgagaagatccccggcgagagcacccagaagctgagcgaggtggccaaggagtgcagcatctacctgatcggcggcagcatccccgaggaggacgccggcaagctgtacaacacctgcgccgtgttcggccccgacggcaccctgctggccaagtacagaaagatccacctgttcgacatcgacgtgcccggcaagatcaccttccaggagagcaagaccctgagccccggcgacagcttcagcaccttcgacaccccctactgcagagtgggcctgggcatctgctacgacatgagattcgccgagctggcccagatctacgcccagagaggctgccagctgctggtgtaccccggcgccttcaacctgaccaccggccccgcccactgggagctgctgcagagaagcagagccgtggacaaccaggtgtacgtggccaccgccagccccgccagagacgacaaggccagctacgtggcctggggccacagcaccgtggtgaacccctggggcgaggtgctggccaaggccggcaccgaggaggccatcgtgtacagcgacatcgacctgaagaagctggccgagatcagacagcagatccccgtgttcagacagaagagaagcgacctgtacgccgtggagatgaagaagccctag

SEQ ID NO: 11368 - DNA, 1476 bp, synthetic construct; identical to SEQ ID NO: 9340
  source 1..1476: mol_type = other DNA; note = Synthetic coding sequence

SEQ ID NO: 11369 - DNA, 1089 bp, synthetic construct
  source 1..1089: mol_type = other DNA; note = Synthetic coding sequence
atggcccacagcagcttcttccccgacgagtacttcacctgcagcagcctgtgcctgagctgcggcgtgggctgcaagaagagcatgaaccacggcaaggagggcgtgccccacgaggccaagagcagatgcagatacagccaccagtacgacaacagagtgtacacctgcaaggcctgctacgagagaggcgaggaggtgagcgtggtgcccaagaccagcgccagcaccgacagcccctggatgggcctggccaagtacgcctggagcggctacgtgatcgagtgccccaactgcggcgtggtgtacagaagcagacagtactggttcggcaaccaggaccccgtggacaccgtggtgagaaccgagatcgtgcacgtgtggcccggcaccgacggcttcctgaaggacaacaacaacgccgcccagagactgctggacggcatgaacttcatggcccagagcgtgagcgagctgagcctgggccccaccaaggccgtgaccagctggctgaccgaccagatcgcccccgcctactggagacccaacagccagatcctgagctgcaacaagtgcgccaccagcttcaaggacaacgacaccaagcaccactgcagagcctgcggcgagggcttctgcgacagctgcagcagcaagaccagacccgtgcccgagagaggctggggccccgcccccgtgagagtgtgcgacaactgctacgaggccagaaacgtgcagctggccgtgaccgaggcccaggtggacgacgagggcggcaccctgatcgccagaaaggtgggcgaggccgtgcagaacaccctgggcgccgtggtgaccgccatcgacatccccctgggcctggtgaaggacgccgccagacccgcctactgggtgcccgaccacgagatcctgcactgccacaactgcagaaaggagttcagcatcaagctgagcaagcaccactgcagagcctgcggccagggcttctgcgacgagtgcagccacgacagaagagccgtgcccagcagaggctgggaccaccccgtgagagtgtgcttcaactgcaacaagaagcccggcgacctgtag

SEQ ID NO: 11370 - DNA, 348 bp, synthetic construct
  source 1..348: mol_type = other DNA; note = Synthetic coding sequence
atgagcggcgagcccggccagaccagcgtggcccccccccccgaggaggtggagcccggcagcggcgtgagaatcgtggtggagtactgcgagccctgcggcttcgaggccacctacctggagctggccagcgccgtgaaggagcagtaccccggcatcgagatcgagagcagactgggcggcaccggcgccttcgagatcgagatcaacggccagctggtgttcagcaagctggagaacggcggcttcccctacgagaaggacctgatcgaggccatcagaagagccagcaacggcgagaccctggagaagatcaccaacagcagacccccctgcgtgatcctgtag

SEQ ID NO: 11371 - DNA, 507 bp, synthetic construct
  source 1..507: mol_type = other DNA; note = Synthetic coding sequence
atgctgttcagactgagcgagcacagcagccccgaggaggaggccagcccccaccagagagccagcggcgagggccaccacctgaagagcaagagacccaacccctgcgcctacaccccccccagcctgaaggccgtgcagagaatcgccgagagccacctgcagagcatcagcaacctgaacgagaaccaggccagcgaggaggaggacgagctgggcgagctgagagagctgggctaccccagagaggaggacgaggaggaggaggaggacgacgaggaggaggaggaggaggaggacagccaggccgaggtgctgaaggtgatcagacagagcgccggccagaagaccacctgcggccagggcctggagggcccctgggagagacccccccccctggacgagagcgagagagacggcggcagcgaggaccaggtggaggaccccgccctgagcgagcccggcgaggagccccagagacccagccccagcgagcccggcacctag

SEQ ID NO: 11372 - DNA, 507 bp, synthetic construct; identical to SEQ ID NO: 11371
  source 1..507: mol_type = other DNA; note = Synthetic coding sequence

SEQ ID NO: 11373 - DNA, 648 bp, synthetic construct
  source 1..648: mol_type = other DNA; note = Synthetic coding sequence
atggaccccaaggacagaaagaagatccagttcagcgtgcccgccccccccagccagctggaccccagacaggtggagatgatcagaagaagaagacccacccccgccatgctgttcagactgagcgagcacagcagccccgaggaggaggccagcccccaccaggtgacccccctgacctggcacttcccctggcagagagccagcggcgagggccaccacctgaagagcaagagacccaacccctgcgcctacaccccccccagcctgaaggccgtgcagagaatcgccgagagccacctgcagagcatcagcaacctgaacgagaaccaggccagcgaggaggaggacgagctgggcgagctgagagagctgggctaccccagagaggaggacgaggaggaggaggaggacgacgaggaggaggaggaggaggaggacagccaggccgaggtgctgaaggtgatcagacagagcgccggccagaagaccacctgcggccagggcctggagggcccctgggagagacccccccccctggacgagagcgagagagacggcggcagcgaggaccaggtggaggaccccgccctgagcgagcccggcgaggagccccagagacccagccccagcgagcccggcacctag

SEQ ID NO: 11374 - DNA, 5169 bp, synthetic construct
  source 1..5169: mol_type = other DNA; note = Synthetic coding sequence
atggagagcaacttcaaccaggagggcgtgcccagacccagctacgtgttcagcgccgaccccatcgccagacccagcgagatcaacttcgacggcatcaagctggacctgagccacgagttcagcctggtggcccccaacaccgaggccaacagcttcgagagcaaggactacctgcaggtgtgcctgagaatcagacccttcacccagagcgagaaggagctggagagcgagggctgcgtgcacatcctggacagccagaccgtggtgctgaaggagccccagtgcatcctgggcagactgagcgagaagagcagcggccagatggcccagaagttcagcttcagcaaggtgttcggccccgccaccacccagaaggagttcttccagggctgcatcatgcagcccgtgaaggacctgctgaagggccagagcagactgatcttcacctacggcctgaccaacagcggcaagacctacaccttccagggcaccgaggagaacatcggcatcctgcccagaaccctgaacgtgctgttcgacagcctgcaggagagactgtacaccaagatgaacctgaagccccacagaagcagagagtacctgagactgagcagcgagcaggagaaggaggagatcgccagcaagagcgccctgctgagacagatcaaggaggtgaccgtgcacaacgacagcgacgacaccctgtacggcagcctgaccaacagcctgaacatcagcgagttcgaggagagcatcaaggactacgagcaggccaacctgaacatggccaacagcatcaagttcagcgtgtgggtgagcttcttcgagatctacaacgagtacatctacgacctgttcgtgcccgtgagcagcaagttccagaagagaaagatgctgagactgagccaggacgtgaagggctacagcttcatcaaggacctgcagtggatccaggtgagcgacagcaaggaggcctacagactgctgaagctgggcatcaagcaccagagcgtggccttcaccaagctgaacaacgccagcagcagaagccacagcatcttcaccgtgaagatcctgcagatcgaggacagcgagatgagcagagtgatcagagtgagcgagctgagcctgtgcgacctggccggcagcgagagaaccatgaagacccagaacgagggcgagagactgagagagaccggcaacatcaacaccagcctgctgaccctgggcaagtgcatcaacgtgctgaagaacagcgagaagagcaagttccagcagcacgtgcccttcagagagagcaagctgacccactacttccagagcttcttcaacggcaagggcaagatctgcatgatcgtgaacatcagccagtgctacctggcctacgacgagaccctgaacgtgctgaagttcagcgccatcgcccagaaggtgtgcgtgcccgacaccctgaacagcagccaggagaagctgttcggccccgtgaagagcagccaggacgtgagcctggacagcaacagcaacagcaagatcctgaacgtgaagagagccaccatcagctgggagaacagcctggaggacctgatggaggacgaggacctggtggaggagctggagaacgccgaggagacccagaacgtggagaccaagctgctggacgaggacctggacaagaccctggaggagaacaaggccttcatcagccacgaggagaagagaaagctgctggacctgatcgaggacctgaagaagaagctgatcaacgagaagaaggagaagctgaccctggagttcaagatcagagaggaggtgacccaggagttcacccagtactgggcccagagagaggccgacttcaaggagaccctgctgcaggagagagagatcctggaggagaacgccgagagaagactggccatcttcaaggacctggtgggcaagtgcgacaccagagaggaggccgccaaggacatctgcgccaccaaggtggagaccgaggagacccacaactacgtgggcttcgaggacatcatcgacagcctgcaggacaacgtggccgacatcaagaagcaggccgagatcgcccacctgtacatcgccagcctgcccgacccccaggaggccaccgcctgcctggagctgaagttcaaccagatcaaggccgagctggccaagaccaagggcgagctgatcaagaccaaggaggagctgaagaagagagagaacgagagcgacagcctgatccaggagctggagaccagcaacaagaagatcatcacccagaaccagagaatcaaggagctgatcaacatcatcgaccagaaggaggacaccatcaacgagttccagaacctgaagagccacatggagaacaccttcaagtgcaacgacaaggccgacaccagcagcctgatcatcaacaacaagctgatctgcaacgagaccgtggaggtgcccaaggacagcaagagcaagatctgcagcgagagaaagagagtgaacgagaacgagctgcagcaggacgagccccccgccaagaagggcagcatccacgtgagcagcgccatcaccgaggaccagaagaagagcgaggaggtgagacccaacatcgccgagatcgaggacatcagagtgctgcaggagaacaacgagggcctgagagccttcctgctgaccatcgagaacgagctgaagaacgagaaggaggagaaggccgagctgaacaagcagatcgtgcacttccagcaggagctgagcctgagcgagaagaagaacctgaccctgagcaaggaggtgcagcagatccagagcaactacgacatcgccatcgccgagctgcacgtgcagaagagcaagaaccaggagcaggaggagaagatcatgaagctgagcaacgagatcgagaccgccaccagaagcatcaccaacaacgtgagccagatcaagctgatgcacaccaagatcgacgagctgagaaccctggacagcgtgagccagatcagcaacatcgacctgctgaacctgagagacctgagcaacggcagcgaggaggacaacctgcccaacacccagctggacctgctgggcaacgactacctggtgagcaagcaggtgaaggagtacagaatccaggagcccaacagagagaacagcttccacagcagcatcgaggccatctgggaggagtgcaaggagatcgtgaaggccagcagcaagaagagccaccagatcgaggagctggagcagcagatcgagaagctgcaggccgaggtgaagggctacaaggacgagaacaacagactgaaggagaaggagcacaagaaccaggacgacctgctgaaggagaaggagaccctgatccagcagctgaaggaggagctgcaggagaagaacgtgaccctggacgtgcagatccagcacgtggtggagggcaagagagccctgagcgagctgacccagggcgtgacctgctacaaggccaagatcaaggagctggagaccatcctggagacccagaaggtggagtgcagccacagcgccaagctggagcaggacatcctggagaaggagagcatcatcctgaagctggagagaaacctgaaggagttccaggagcacctgcaggacagcgtgaagaacaccaaggacctgaacgtgaaggagctgaagctgaaggaggagatcacccagctgaccaacaacctgcaggacatgaagcacctgctgcagctgaaggaggaggaggaggagaccaacagacaggagaccgagaagctgaaggaggagctgagcgccagcagcgccagaacccagaacctgaaggccgacctgcagagaaaggaggaggactacgccgacctgaaggagaagctgaccgacgccaagaagcagatcaagcaggtgcagaaggaggtgagcgtgatgagagacgaggacaagctgctgagaatcaagatcaacgagctggagaagaagaagaaccagtgcagccaggagctggacatgaagcagagaaccatccagcagctgaaggagcagctgaacaaccagaaggtggaggaggccatccagcagtacgagagagcctgcaaggacctgaacgtgaaggagaagatcatcgaggacatgagaatgaccctggaggagcaggagcagacccaggtggagcaggaccaggtgctggaggccaagctggaggaggtggagagactggccaccgagctggagaagtggaaggagaagtgcaacgacctggagaccaagaacaaccagagaagcaacaaggagcacgagaacaacaccgacgtgctgggcaagctgaccaacctgcaggacgagctgcaggagagcgagcagaagtacaacgccgacagaaagaagtggctggaggagaagatgatgctgatcacccaggccaaggaggccgagaacatcagaaacaaggagatgaagaagtacgccgaggacagagagagattcttcaagcagcagaacgagatggagatcctgaccgcccagctgaccgagaaggacagcgacctgcagaagtggagagaggagagagaccagctggtggccgccctggagatccagctgaaggccctgatcagcagcaacgtgcagaaggacaacgagatcgagcagctgaagagaatcatcagcgagaccagcaagatcgagacccagatcatggacatcaagcccaagagaatcagcagcgccgaccccgacaagctgcagaccgagcccctgagcaccagcttcgagatcagcagaaacaagatcgaggacggcagcgtggtgctggacagctgcgaggtgagcaccgagaacgaccagagcaccagattccccaagcccgagctggagatccagttcacccccctgcagcccaacaagatggccgtgaagcaccccggctgcaccacccccgtgaccgtgaagatccccaaggccagaaagagaaagagcaacgagatggaggagagcgccagccccccccccaaggagtgcagcagcagccccgccatggagcagagctggaaggagaacgacttcgacaagctgagagaggagggcttcagaagaagcaactacagcgagctgcaggaggagatccagaccaagggcaaggaggtggagaacttcgagaagaacctggactag

SEQ ID NO: 11375 - DNA, 1215 bp, synthetic construct
  source 1..1215: mol_type = other DNA; note = Synthetic coding sequence
atgagaagagacgtgaacggcgtgaccaagagcagattcgagatgttcagcaacagcgacgaggccgtgatcaacaagaagctgcccaaggagctgctgctgagaatcttcagcttcctggacgtggtgaccctgtgcagatgcgcccaggtgagcagagcctggaacgtgctggccctggacggcagcaactggcagagaatcgacctgttcgacttccagagagacatcgagggcagagtggtggagaacatcagcaagagatgcggcggcttcctgagaaagctgagcctgagaggctgcctgggcgtgggcgacaacgccctgagaaccttcgcccagaactgcagaaacatcgaggtgctgaacctgaacggctgcaccaagaccaccgacgccgagggctgccccctgctggagcagctgaacatcagctggtgcgaccaggtgaccaaggacggcatccaggccctggtgagaggctgcggcggcctgaaggccctgttcctgaagggctgcacccagctggaggacgaggccctgaagtacatcggcgcccactgccccgagctggtgaccctgaacctgcagacctgcctgcagatcaccgacgagggcctgatcaccatctgcagaggctgccacaagctgcagagcctgtgcgccagcggctgcagcaacatcaccgacgccatcctgaacgccctgggccagaactgccccagactgagaatcctggaggtggccagatgcagccagctgaccgacgtgggcttcaccaccctggccagaaactgccacgagctggagaagatggacctggaggagtgcgtgcagatcaccgacagcaccctgatccagctgagcatccactgccccagactgcaggtgctgagcctgagccactgcgagctgatcaccgacgacggcatcagacacctgggcaacggcgcctgcgcccacgaccagctggaggtgatcgagctggacaactgccccctgatcaccgacgccagcctggagcacctgaagagctgccacagcctggagagaatcgagctgtacgactgccagcagatcaccagagccggcatcaagagactgagaacccacctgcccaacatcaaggtgcacgcctacttcgcccccgtgacccccccccccagcgtgggcggcagcagacagagattctgcagatgctgcatcatcctgtag

SEQ ID NO: 11376 - DNA, 1251 bp, synthetic construct
  source 1..1251: mol_type = other DNA; note = Synthetic coding sequence
atggcccacagccccgtggccgtgcaggtgcccggcatgcagaacaacatcgccgaccccgaggagctgttcaccaagctggagagaatcggcaagggcagcttcggcgaggtgttcaagggcatcgacaacagaacccagcaggtggtggccatcaagatcatcgacctggaggaggccgaggacgagatcgaggacatccagcaggagatcaccgtgctgagccagtgcgacagcagctacgtgaccaagtactacggcagctacctgaagggcagcaagctgtggatcatcatggagtacctgggcggcggcagcgccctggacctgctgagagccggccccttcgacgagttccagatcgccaccatgctgaaggagatcctgaagggcctggactacctgcacagcgagaagaagatccacagagacatcaaggccgccaacgtgctgctgagcgagcagggcgacgtgaagctggccgacttcggcgtggccggccagctgaccgacacccagatcaagagaaacaccttcgtgggcacccccttctggatggcccccgaggtgatccagcagagcgcctacgacagcaaggccgacatctggagcctgggcatcaccgccatcgagctggccaagggcgagccccccaacagcgacatgcaccccatgagagtgctgttcctgatccccaagaacaacccccccaccctggtgggcgacttcaccaagagcttcaaggagttcatcgacgcctgcctgaacaaggaccccagcttcagacccaccgccaaggagctgctgaagcacaagttcatcgtgaagaacagcaagaagaccagctacctgaccgagctgatcgacagattcaagagatggaaggccgagggccacagcgacgacgagagcgacagcgagggcagcgacagcgagagcaccagcagagagaacaacacccaccccgagtggagcttcaccaccgtgagaaagaagcccgaccccaagaaggtgcagaacggcgccgagcaggacctggtgcagaccctgagctgcctgagcatgatcatcacccccgccttcgccgagctgaagcagcaggacgagaacaacgccagcagaaaccaggccatcgaggagctggagaagagcatcgccgtggccgaggccgcctgccccggcatcaccgacaagatggtgaagaagctgatcgagaagttccagaagtgcagcgccgacgagagcccctag

SEQ ID NO: 11377 - DNA, 1020 bp, synthetic construct
  source 1..1020: mol_type = other DNA; note = Synthetic coding sequence
atggcccacagccccgtggccgtgcaggtgcccggcatgcagggcagcaagctgtggatcatcatggagtacctgggcggcggcagcgccctggacctgctgagagccggccccttcgacgagttccagatcgccaccatgctgaaggagatcctgaagggcctggactacctgcacagcgagaagaagatccacagagacatcaaggccgccaacgtgctgctgagcgagcagggcgacgtgaagctggccgacttcggcgtggccggccagctgaccgacacccagatcaagagaaacaccttcgtgggcacccccttctggatggcccccgaggtgatccagcagagcgcctacgacagcaaggccgacatctggagcctgggcatcaccgccatcgagctggccaagggcgagccccccaacagcgacatgcaccccatgagagtgctgttcctgatccccaagaacaacccccccaccctggtgggcgacttcaccaagagcttcaaggagttcatcgacgcctgcctgaacaaggaccccagcttcagacccaccgccaaggagctgctgaagcacaagttcatcgtgaagaacagcaagaagaccagctacctgaccgagctgatcgacagattcaagagatggaaggccgagggccacagcgacgacgagagcgacagcgagggcagcgacagcgagagcaccagcagagagaacaacacccaccccgagtggagcttcaccaccgtgagaaagaagcccgaccccaagaaggtgcagaacggcgccgagcaggacctggtgcagaccctgagctgcctgagcatgatcatcacccccgccttcgccgagctgaagcagcaggacgagaacaacgccagcagaaaccaggccatcgaggagctggagaagagcatcgccgtggccgaggccgcctgccccggcatcaccgacaagatggtgaagaagctgatcgagaagttccagaagtgcagcgccgacgagagcccctag

SEQ ID NO: 11378 - DNA, 2625 bp, synthetic construct; identical to SEQ ID NO: 10537
  source 1..2625: mol_type = other DNA; note = Synthetic coding sequence

SEQ ID NO: 11379 - DNA, 1449 bp, synthetic construct
  source 1..1449: mol_type = other DNA; note = Synthetic coding sequence
atggagcagagcaacctggagaagctggagctgaacgtgagaaagctgcagcaggagctggaccagctgaacagagacaagctgagcctgcacaacgacatcagcgccatgcagcagcagctgcaggagaagagagaggccgtgaacagcctgcaggaggagctggccaacgtgcaggaccacctgaacctggccaagcaggacctgctgcacaccaccaagcaccaggacgtgctgctgagcgagcagaccagactgcagaaggacatcagcgagtgggccaacagattcgaggactgccagaaggaggaggagaccaagcagcagcagctgcaggtgctgcagaacgagatcgaggagaacaagctgaagctggtgcagcaggagatgatgttccagagactgcagaaggagagagagagcgagaagagcaagctggaccaggtgctgagcaaggtgctggccgccgaggagagagtgagaaccctgcaggaggaggagagatggtgcgagagcctggagaagaccctgagccagaccaagagacagctgagcgagagagagcagcagctggtggagaagagcggcgagctgctggccctgcagaaggaggccgacagcatgagagccgacttcagcctgctgagaaaccagttcctgaccgagagaaagaaggccgagaagcaggtggccagcctgaaggaggccctgaagatccagagaagccagctggagaagaacctgctggagcagaagcaggagaacagctgcatccagaaggagatggccaccatcgagctggtggcccaggacaaccacgagagagccagaagactgatgaaggagctgaaccagatgcagtacgagtacaccgagctgaagaagcagatggccaaccagaaggacctggagagaagacagatggagatcagcgacgccatgagaaccctgaagagcgaggtgaaggacgagatcagaaccagcctgaagaacctgaaccagttcctgcccgagctgcccgccgacctggaggccatcctggagagaaacgagaacctggagggcgagctggagagcctgaaggagaacctgcccttcaccatgaacgagggccccttcgaggagaagctgaacttcagccaggtgcacatcatggacgagcactggagaggcgaggccctgagagagaagctgagacacagagaggacagactgaaggcccagctgagacactgcatgagcaagcaggccgaggtgctgatcaagggcaagagacagaccgagggcaccctgcacagcctgagaagacaggtggacgccctgggcgagctggtgaccagcaccagcgccgacagcgccagcagccccagcctgagccagctggagagcagcctgaccgaggacagccagctgggccagaaccaggagaagaacgccagcgccagatag

SEQ ID NO: 11380 - DNA, 3780 bp, synthetic construct
  source 1..3780: mol_type = other DNA; note = Synthetic coding sequence
atggccctgagacccggcgccggcagcggcggcggcggcgccgccggcgccggcgccggcagcgccggcggcggcggcttcatgttccccgtggccggcggcatcagacccccccaggccggcctgatgcccatgcagcagcagggcttccccatggtgagcgtgatgcagcccaacatgcagggcatcatgggcatgaactacagcagccagatgagccagggccccatcgccatgcaggccggcatccccatgggccccatgcccgccgccggcatgccctacctgggccaggcccccttcctgggcatgagaccccccggcccccagtacacccccgacatgcagaagcagttcgccgaggagcagcagaagagattcgagcagcagcagaagctgctggaggaggagagaaagagaagacagttcgaggagcagaagcagaagctgagactgctgagcagcgtgaagcccaagaccggcgagaagagcagagacgacgccctggaggccatcaagggcaacctggacggcttcagcagagacgccaagatgcaccccacccccgccagccaccccaagaagcccggcgtgggcgtgttccccagccaggaccccgcccagcccagaatgcccccctggatctacaacgagagcctggtgcccgacgcctacaagaagatcctggagaccaccatgacccccaccggcatcgacaccgccaagctgtaccccatcctgatgagcagcggcctgcccagagagaccctgggccagatctgggccctggccaacagaaccacccccggcaagctgaccaaggaggagctgtacaccgtgctggccatgatcgccgtgacccagagaggcgtgcccgccatgagccccgacgccctgaaccagttccccgccgcccccatccccaccctgagcggcttcagcatgaccctgcccacccccgtgagccagcccaccgtgatccccagcggccccgccggcagcatgcccctgagcctgggccagcccgtgatgggcatcaacctggtgggccccgtgggcggcgccgccgcccaggccagcagcggcttcatccccacctaccccgccaaccaggtggtgaagcccgaggaggacgacttccaggacttccaggacgccagcaagagcggcagcctggacgacagcttcagcgacttccaggagctgcccgccagcagcaagaccagcaacagccagcacggcaacagcgcccccagcctgctgatgcccctgcccggcaccaaggccctgcccagcatggacaagtacgccgtgttcaagggcatcgccgccgacaagagcagcgagaacaccgtgccccccggcgaccccggcgacaagtacagcgccttcagagagctggagcagaccgccgagaacaagcccctgggcgagagcttcgccgagttcagaagcgccggcaccgacgacggcttcaccgacttcaagaccgccgacagcgtgagccccctggagccccccaccaaggacaagaccttcccccccagcttccccagcggcaccatccagcagaagcagcagacccaggtgaagaaccccctgaacctggccgacctggacatgttcagcagcgtgaactgcagcagcgagaagcccctgagcttcagcgccgtgttcagcaccagcaagagcgtgagcaccccccagagcaccggcagcgccgccaccatgaccgccctggccgccaccaagaccagcagcctggccgacgacttcggcgagttcagcctgttcggcgagtacagcggcctggcccccgtgggcgagcaggacgacttcgccgacttcatggccttcagcaacagcagcatcagcagcgagcagaagcccgacgacaagtacgacgccctgaaggaggaggccagccccgtgcccctgaccagcaacgtgggcagcaccgtgaagggcggccagaacagcaccgccgccagcaccaagtacgacgtgttcagacagctgagcctggagggcagcggcctgggcgtggaggacctgaaggacaacacccccagcggcaagagcgacgacgacttcgccgacttccacagcagcaagttcagcagcatcaacagcgacaagagcctgggcgagaaggccgtggccttcagacacaccaaggaggacagcgccagcgtgaagagcctggacctgcccagcatcggcggcagcagcgtgggcaaggaggacagcgaggacgccctgagcgtgcagttcgacatgaagctggccgacgtgggcggcgacctgaagcacgtgatgagcgacagcagcctggacctgcccaccgtgagcggccagcacccccccgccgccgacatcgaggacctgaagtacgccgccttcggcagctacagcagcaacttcgccgtgagcaccctgaccagctacgactggagcgacagagacgacgccacccagggcagaaagctgagccccttcgtgctgagcgccggcagcggcagccccagcgccaccagcatcctgcagaagaaggagaccagcttcggcagcagcgagaacatcaccatgaccagcctgagcaaggtgaccaccttcgtgagcgaggacgccctgcccgagaccaccttccccgccctggccagcttcaaggacaccatcccccagaccagcgagcagaaggagtacgagaacagagactacaaggacttcaccaagcaggacctgcccaccgccgagagaagccaggaggccacctgccccagccccgccagcagcggcgccagccaggagacccccaacgagtgcagcgacgacttcggcgagttccagagcgagaagcccaagatcagcaagttcgacttcctggtggccaccagccagagcaagatgaagagcagcgaggagatgatcaagagcgagctggccaccttcgacctgagcgtgcagggcagccacaagagaagcctgagcctgggcgacaaggagatcagcagaagcagccccagccccgccctggagcagcccttcagagacagaagcaacaccctgaacgagaagcccgccctgcccgtgatcagagacaagtacaaggacctgaccggcgaggtggaggagaacgagagatacgcctacgagtggcagagatgcctgggcagcgccctgaacgtgatcaagaaggccaacgacaccctgaacggcatcagcagcagcagcgtgtgcaccgaggtgatccagagcgcccagggcatggagtacctgctgggcgtggtggaggtgtacagagtgaccaagagagtggagctgggcatcaaggccaccgccgtgtgcagcgagaagctgcagcagctgctgaaggacatcgacaaggtgtggaacaacctgatcggcttcatgagcctggccaccctgacctgctgctgggagaagatgaccgtgatcaccaagcacctgagcccctaccacgagctgctggaggagaagcccgacgagaacagcctggacttcagcagctgcatgctgagacccggcatcaagaacgcccaggagctggcctgcggcgtgtgcctgctgaacgtggacagcagaagcagaaaggaggagaagcccgccgaggagcaccccaagaaggccttcaacagcgagaccgacagcttcaagctggcctacggcggccaccagtaccacgccagctgcgccaacttctggatcaactgcgtggagcccaagccccccggcctggtgctgcccgacctgctgtag

SEQ ID NO: 11381 - DNA, 1158 bp, synthetic construct
  source 1..1158: mol_type = other DNA; note = Synthetic coding sequence
atggccctgagacccggcgccggcagcggcggcggcggcgccgccggcgccggcgccggcagcgccggcggcggcggcttcatgttccccgtggccggcggcatcagacccccccaggccggcctgatgcccatgcagcagcagggcttccccatggtgagcgtgatgcagcccaacatgcagggcatcatgggcatgaactacagcagccagatgagccagggccccatcgccatgcaggccggcatccccatgggccccatgcccgccgccggcatgccctacctgggccaggcccccttcctgggcatgagaccccccggcccccagtacacccccgacatgcagaagcagttcgccgaggagcagcagaagagattcgagcagcagcagaagctgctggaggaggagagaaagagaagacagttcgaggagcagaagcagaagctgagactgctgagcagcgtgaagcccaagaccggcgagaagagcagagacgacgccctggaggccatcaagggcaacctggacggcttcagcagagacgccaagatgcaccccacccccgccagccaccccaagaagcccgactgccccaccagcagccacagcaccaagaccgtgagccccagccccgccttcctggacgaggaggagttcagcgacttcatgcagggccccgtggaggtgcccccctgcggccccagcagcaccagccagcccttccagagcttccaccccagcacccccctgggccagctgcacacccagaaggccggcacccagcccctgccccccagccagagccccgtgcccttcgccctgcacggcgtgcccggccagatcccctacttcagcaccgccagcgccagccacagcgtgcccgaggccggccccagcctggaggagaagttcctggtgagctgcgacatcagcaccagcggccaggagcagatcaagctgaacaccagcgaggtgggccacaaggccctgggccccggcagcagcaagaagtaccccagcctgatggccagcaacggcgtggccgtggacggctgcgtgtgggagtacttcccccacagaatcctgctgagccccgagtgcctgctgggcttcaccatgagagtgtggttccagatgcccatcagaaagagctag

SEQ ID NO: 11382 - DNA, 939 bp, synthetic construct
  source 1..939: mol_type = other DNA; note = Synthetic coding sequence
atggccgacttcggcatcagcgccggccagttcgtggccgtggtgtgggacaagagcagccccgtggaggccctgaagggcctggtggacaagctgcaggccctgaccggcaacgagggcagagtgagcgtggagaacatcaagcagctgctgcagagcgcccacaaggagagcagcttcgacatcatcctgagcggcctggtgcccggcagcaccaccctgcacagcgccgagatcctggccgagatcgccagaatcctgagacccggcggctgcctgttcctgaaggagcccgtggagaccgccgtggacaacaacagcaaggtgaagaccgccagcaagctgtgcagcgccctgaccctgagcggcctggtggaggtgaaggagctgcagagagagcccctgacccccgaggaggtgcagagcgtgagagagcacctgggccacgagagcgacaacctgctgttcgtgcagatcaccggcaagaagcccaacttcgaggtgggcagcagcagacagctgaagctgagcatcaccaagaagagcagccccagcgtgaagcccgccgtggaccccgccgccgccaagctgtggaccctgagcgccaacgacatggaggacgacagcatggacctgatcgacagcgacgagctgctggaccccgaggacctgaagaagcccgaccccgccagcctgagagccgccagctgcggcgagggcaagaagagaaaggcctgcaagaactgcacctgcggcctggccgaggagctggagaaggagaagagcagagagcagatgagcagccagcccaagagcgcctgcggcaactgctacctgggcgacgccttcagatgcgccagctgcccctacctgggcatgcccgccttcaagcccggcgagaaggtgctgctgagcgacagcaacctgcacgacgcctag

SEQ ID NO: 11383 - DNA, 1056 bp, synthetic construct
  source 1..1056: mol_type = other DNA; note = Synthetic coding sequence
atgaacgagagcaacgacagcaccaactacgacatggccccctactacgaggccctgtgcaagagcctggactggcagatcgacgtggacctgctgaacaagatgaagaaggccaacgaggacgagctgaagagactggacgaggagctggaggacgccgagaagaacctgggcgagagcgagatcagagacgccatgatggccaaggccgagtacctgtgcagaatcggcgacaaggagggcgccctgaccgccttcagaaagacctacgacaagaccgtggccctgggccacagactggacatcgtgttctacctgctgagaatcggcctgttctacatggacaacgacctgatcaccagaaacaccgagaaggccaagagcctgatcgaggagggcggcgactgggacagaagaaacagactgaaggtgtaccagggcctgtactgcgtggccatcagagacttcaagcaggccgccgagctgttcctggacaccgtgagcaccttcaccagctacgagctgatggactacaagaccttcgtgacctacaccgtgtacgtgagcatgatcgccctggagagacccgacctgagagagaaggtgatcaagggcgccgagatcctggaggtgctgcacagcctgcccgccgtgagacagtacctgttcagcctgtacgagtgcagatacagcgtgttcttccagagcctggccgtggtggagcaggagatgaagaaggactggctgttcgccccccactacagatactacgtgagagagatgagaatccacgcctacagccagctgctggagagctacagaagcctgaccctgggctacatggccgaggccttcggcgtgggcgtggagttcatcgaccaggagctgagcagattcatcgccgccggcagactgcactgcaagatcgacaaggtgaacgagatcgtggagaccaacagacccgacagcaagaactggcagtaccaggagaccatcaagaagggcgacctgctgctgaacagagtgcagaagctgagcagagtgatcaacatgtag

SEQ ID NO: 11384 - DNA, 414 bp, synthetic construct; identical to SEQ ID NO: 10430
  source 1..414: mol_type = other DNA; note = Synthetic coding sequence

SEQ ID NO: 11385 - DNA, 2796 bp, synthetic construct; identical to SEQ ID NO: 9514
  source 1..2796: mol_type = other DNA; note = Synthetic coding sequence

SEQ ID NO: 11386 - DNA, 318 bp, synthetic construct; identical to SEQ ID NO: 10324
  source 1..318: mol_type = other DNA; note = Synthetic coding sequence

SEQ ID NO: 11387 - DNA, 663 bp, synthetic construct
  source 1..663: mol_type = other DNA; note = Synthetic coding sequence
atgaacagcatggacagacacatccagcagaccaacgacagactgcagtgcatcaagcagcacctgcagaaccccgccaacttccacaacgccgccaccgagctgctggactggtgcggcgaccccagagccttccagagacccttcgagcagagcctgatgggctgcctgaccgtggtgagcagagtggccgcccagcagggcttcgacctggacctgggctacagactgctggccgtgtgcgccgccaacagagacaagttcacccccaagagcgccgccctgctgagcagctggtgcgaggagctgggcagactgctgctgctgagacaccagaagagcagacagagcgacccccccggcaagctgcccatgcagccccccctgagcagcatgagcagcatgaagcccaccctgagccacagcgacggcagcttcccctacgacagcgtgccctggctgcccgcctaccccgcctgcacccccccccccagccagagccaccccaacagctgcagcctgaagcagaagcagcccctggccttccccccccccctgtgcagcatctggctgaccaccctgcagggcctgctgggcagcctgagctgcgtgcacttcgtgagcggctggagcgtgcccagagagccccacggcctgggctag

SEQ ID NO: 11388 - DNA, 354 bp, synthetic construct
  source 1..354: mol_type = other DNA; note = Synthetic coding sequence
atggtgcagagactgacctacagaagaagactgagctacaacaccgccagcaacaagaccagactgagcagaacccccggcaacagaatcgtgtacctgtacaccaagaaggtgggcaaggcccccaagagcgcctgcggcgtgtgccccggcagactgagaggcgtgagagccgtgagacccaaggtgctgatgagactgagcaagaccaagaagcacgtgagcagagcctacggcggcagcatgtgcgccaagtgcgtgagagacagaatcaagagagccttcctgatcgaggagcagaagatcgtggtgaaggtgctgaaggcccaggcccagagccagaaggccaagtag

SEQ ID NO: 11389 - DNA, 354 bp, synthetic construct; identical to SEQ ID NO: 11388
  source 1..354: mol_type = other DNA; note = Synthetic coding sequence

SEQ ID NO: 11390 - DNA, 354 bp, synthetic construct; identical to SEQ ID NO: 11388
  source 1..354: mol_type = other DNA; note = Synthetic coding sequence

SEQ ID NO: 11391 - DNA, 1902 bp, synthetic construct; identical to SEQ ID NO: 10526
  source 1..1902: mol_type = other DNA; note = Synthetic coding sequence

SEQ ID NO: 11392 - DNA, 1641 bp, synthetic construct
  source 1..1641: mol_type = other DNA; note = Synthetic coding sequence
atgaaggccatcaagaagagcctgaccgaggaggagtacctgtacctggacttcagccaccagaccgagggctgcatcttccccctgcacaccagcgtgaccctgttcctgctgagctactgcgactgcaagatcttcaagatctgcctggtggtgaccaaggaggtgagccagtggaccagactgtgcgagctgaccatccccctggccatcgagaacttcctgagagagagcagcgaccagccccccaccatccccgtggagatcctgcagctggagaagaagctgagcgagcccgtgagagtgcacaacgacgacaagctgagaagacagaagctgaagcagcagaaggccgacggcgtgggcccccccctgaccaagggcaaggccaagagcaaggtgcacacccaggagaccagcgagggcctggacagcagcagcaagagcctggagctgaaggtggccttcagcaagctgaccgtgcaggaggagcccgccaccaccaacagagagcccagccacatcagaaaggccaaggccagcgacctgccccccctggagcacgtgttcgccgagggcctgtacttcaccctggccgacatcgtgctgctgccctgcatccaccacttcctggtgatcatcagcagaaagttcagcgagaagctggtggagttccccctgctggccagctggtaccagagaatccaggaggtgcccggcgtgaagaccgccgccagcaagtgcggcatccagttcctgcacctgcccaagctgctgaccaccagcaccgagcagcaccccaacctgtgcgaggtgcccggcgtggaggagcagagcgaccccctgttcatcggcggccccagacccaccatggccaagctgatggagaagggcatcgaggtgatgttcagcccccacccctgccccacctggaccctggactggaacgtgctgcccgccgccgtgagccccaaggagggcaagatgagcagcgacagagccctgagaaagcagcagcagctgaacaacctggtgtacgtggtgaccaaccaggccaagcccggcgacagaatcgtggacttctgcagcggcggcggccacgtgggcatcgtgctggcccacatgctgcccagctgccaggtgaccctgatcgagaacaaggagctgagcctgatcagagccaagaagagaagcgacgagctgggcctgagcaacatctggttcatccaggccaacatggagtacttcaccggcatgttcaacatcggcgtggccctgcacgcctgcggcgtggccaccgacatggtgatcgagcactgcatcaagaccagagccagcttcgtgacctgcccctgctgctacggcttcatccagaacaccagcaagttcaacttccccaagagcgagcagttcaagaagaccctgagctacaaggagcacatgatcctgtgcagattcgccgaccagaccgccgtgcagctgcccccccagagaagactgatcggcaagcagtgcatgtgcctggtggacctggacagagccagagccgccgaggagtgcggctacagcgtgcaggtgatcagcatggagcccgagagctgcagccccaagaacaacatgatcgtgggcgtgcccatctag

SEQ ID NO: 11393 - DNA, 1542 bp, synthetic construct
  source 1..1542: mol_type = other DNA; note = Synthetic coding sequence
atgctgctggagaacctgaccgacaacgagagcgagaacaccaacctgaagaagaaggtgttcgagaaggaggcccacatccaggagctgagctgcctgttccagagcgagaaggccaacaccctgaaggccaacagattcagccagagcgtgaaggtggtgcacgagagactgcagatccagatccacaagagagaggccgagaacgacaagctgaaggagtacgtgaagagcctggagaccaagatcgccaagtggaacctgcagagcagaatgaacaagaacgaggccatcgtgatgaaggaggccagcagacagaagaccgtggccctgaagaaggccagcaaggtgtacaagcagagactggaccacttcaccggcgccatcgagaagctgaccagccagatcagagaccaggaggccaagctgagcgagaccatcagcgccagcaacgcctggaagagccactacgagaagatcgtgatcgagaagaccgagctggaggtgcagatcgagaccatgaagaagcagatcatcaacctgctggaggacctgaagaagatggaggaccacggcaagaacagctgcgaggagatcctgagaaaggtgcacagcatcgagtacgagaacgagaccctgaacctggagaacaccaagctgaagaccaccctggccgccctgaaggacgaggtggtgagcgtggagaacgagctgagcgagctgcaggaggtggagaagaagcagaagaccctgatcgagatgtacaagacccaggtgcagaagctgcaggaggccgccgagatcgtgaagagcagatgcgagaacctgctgcacaagaacaaccagatcaccaagaccaagaacaagaacgtggagaagatgagaggccagatggagagccacctgaaggagctggagagagtgtgcgacagcctgaccgccgccgagagaagactgcacgagtgccaggagagcctgcagtgctgcaagggcaagtgcgccgaccaggagcacaccatcagagagctgcagggccaggtggacggcaaccacaacctgctgaccaagctgagcctggaggaggagaactgcctgatccagctgaagtgcgagaacctgcagcagaagctggagcagatggacgccgagaacaaggagctggagaagaagctggccaaccaggaggagtgcctgaagcacagcaacctgaagttcaaggagaagagcgccgagtacaccgccctggccagacagctggaggccgccctggaggagggcagacagaaggtggccgaggagatcgagaagatgagcagcagagagagcgccctgcagatcaagatcctggacctggagaccgagctgagaaagaagaacgaggagcagaaccagctggtgtgcaagatgaacagcaaggcccagcaccaggaggtgtgcctgaaggaggtgcagaacagcctggagaagagcgagaaccagaacgagagcatcaagaactacctgcagttcctgaagaccagctacgtgaccatgttcgagtag

SEQ ID NO: 11394 - DNA, 1167 bp, synthetic construct
  source 1..1167: mol_type = other DNA; note = Synthetic coding sequence
atggccgccgccgccgccctggccagactggagcagaagcagagcagagcctggggccccaccagccaggacaccatcagaaaccaggtgagaaaggagctgcaggccgaggccaccgtgagcggcagccccgaggcccccggcaccaacgtggtgagcgagcccagagaggagggcagcgcccacctggccgtgcccggcgtgtacttcacctgccccctgaccggcgccaccctgagaaaggaccagagagacgcctgcatcaaggaggccatcctgctgcacttcagcaccgaccccgtggccgccagcatcatgaagatctacaccttcaacaaggaccaggacagagtgaagctgggcgtggacaccatcgccaagtacctggacaacatccacctgcaccccgaggaggagaagtacagaaagatcaagctgcagaacaaggtgttccaggagagaatcaactgcctggagggcacccacgagttcttcgaggccatcggcttccagaaggtgctgctgcccgcccaggaccaggaggaccccgaggagttctacgtgctgagcgagaccaccctggcccagccccagagcctggagagacacaaggagcagctgctggccgccgagcccgtgagagccaagctggacagacagagaagagtgttccagcccagccccctggccagccagttcgagctgcccggcgacttcttcaacctgaccgccgaggagatcaagagagagcagagactgagaagcgaggccgtggagagactgagcgtgctgagaaccaaggccatgagagagaaggaggagcagagaggcctgagaaagtacaactacaccctgctgagagtgagactgcccgacggctgcctgctgcagggcaccttctacgccagagagagactgggcgccgtgtacggcttcgtgagagaggccctgcagagcgactggctgcccttcgagctgctggccagcggcggccagaagctgagcgaggacgagaacctggccctgaacgagtgcggcctggtgcccagcgccctgctgaccttcagctgggacatggccgtgctggaggacatcaaggccgccggcgccgagcccgacagcatcctgaagcccgagctgctgagcgccatcgagaagctgctgtag

SEQ ID NO: 11395 - DNA, 2691 bp, synthetic construct
  source 1..2691: mol_type = other DNA; note = Synthetic coding sequence
atggacggcgccgccggccccggcgacggccccgccagagaggccctgcagagcctgagccagagactgagagtgcaggagcaggagatggagctggtgaaggccgccctggccgaggccctgagactgctgagactgcaggtgccccccagcagcctgcagggcagcggcacccccgccccccccggcgacagcctggccgccccccccggcctgccccccacctgcacccccagcctggtgagcagaggcacccagaccgagaccgaggtggagctgaagagcagccccggcccccccggcctgagcaacggcccccccgccccccagggcgccagcgaggagcccagcggcacccagagcgagggcggcggcagcagcagcagcggcgccggcagccccggcccccccggcatcctgagacccctgcagcccccccagagagccgacacccccagaagaaacagcagcagcagcagcagccccagcgagagacccagacagaagctgagcagaaaggccatcagcagcgccaacctgctggtgagaagcggcagcaccgagagcagaggcggcaaggaccccctgagcagccccggcggccccggcagcagaagaagcaactacaacctggagggcatcagcgtgaagatgttcctgagaggcagacccatcaccatgtacatccccagcggcatcagaagcctggaggagctgcccagcggccccccccccgagaccctgagcctggactgggtgtacggctacagaggcagagacagcagaagcaacctgttcgtgctgagaagcggcgaggtggtgtacttcatcgcctgcgtggtggtgctgtacagacccggcggcggccccggcggccccggcggcggcggccagagacactacagaggccacaccgactgcgtgagatgcctggccgtgcaccccgacggcgtgagagtggccagcggccagaccgccggcgtggacaaggacggcaagcccctgcagcccgtggtgcacatctgggacagcgagaccctgctgaagctgcaggagatcggcctgggcgccttcgagagaggcgtgggcgccctggccttcagcgccgccgaccagggcgccttcctgtgcgtggtggacgacagcaacgagcacatgctgagcgtgtgggactgcagcagaggcatgaagctggccgagatcaagagcaccaacgacagcgtgctggccgtgggcttcaaccccagagacagcagctgcatcgtgaccagcggcaagagccacgtgcacttctggaactggagcggcggcgtgggcgtgcccggcaacggcaccctgaccagaaagcagggcgtgttcggcaagtacaagaagcccaagttcatcccctgcttcgtgttcctgcccgacggcgacatcctgaccggcgacagcgagggcaacatcctgacctggggcagaagccccagcgacagcaagacccccggcagaggcggcgccaaggagacctacggcatcgtggcccaggcccacgcccacgagggcagcatcttcgccctgtgcctgagaagagacggcaccgtgctgagcggcggcggcagagacagaagactggtgcagtggggccccggcctggtggccctgcaggaggccgagatccccgagcacttcggcgccgtgagagccatcgccgagggcctgggcagcgagctgctggtgggcaccaccaagaacgccctgctgagaggcgacctggcccagggcttcagccccgtgatccagggccacaccgacgagctgtggggcctgtgcacccaccccagccagaacagattcctgacctgcggccacgacagacagctgtgcctgtgggacggcgagagccacgccctggcctggagcatcgacctgaaggagaccggcctgtgcgccgacttccaccccagcggcgccgtggtggccgtgggcctgaacaccggcagatggctggtgctggacaccgagaccagagagatcgtgagcgacgtgatcgacggcaacgagcagctgagcgtggtgagatacagccccgacggcctgtacctggccatcggcagccacgacaacgtgatctacatctacagcgtgagcagcgacggcgccaagagcagcagattcggcagatgcatgggccacagcagcttcatcacccacctggactggagcaaggacggcaacttcatcatgagcaacagcggcgactacgagatcctgtactgggacgtggccggcggctgcaagcagctgaagaacagatacgagagcagagacagagagtgggccacctacacctgcgtgctgggcttccacgtgtacggcgtgtggcccgacggcagcgacggcaccgacatcaacagcctgtgcagaagccacaacgagagagtggtggccgtggccgacgacttctgcaaggtgcacctgttccagtacccctgcgccagagccaaggcccccagcagaatgtacggcggccacggcagccacgtgaccagcgtgagattcacccacgacgacagccacctggtgagcctgggcggcaaggacgccagcatcttccagtggagagtgctgggcgccggcggcgccggccccgcccccgccacccccagcagaacccccagcctgagccccgccagcagcctggacgtgtag

SEQ ID NO: 11396 - DNA, 2934 bp, synthetic construct
  source 1..2934: mol_type = other DNA; note = Synthetic coding sequence
atgggcgccgaggaggaggtgctggtgaccctgagcggcggcgccccctggggcttcagactgcacggcggcgccgagcagagaaagcccctgcaggtgagcaagatcagaagaagaagccaggccggcagagccggcctgagagagagagaccagctgctggccatcaacggcgtgagctgcaccaacctgagccacgccagcgccatgagcctgatcgacgccagcggcaaccagctggtgctgaccgtgcagagactggccgacgagggccccgtgcagagccccagcccccacgagctgcaggtgctgagccccctgagccccctgagccccgagccccccggcgcccccgtgccccagcccctgcagcccggcagcctgagaagcccccccgacagcgaggcctactacggcgagaccgacagcgacgccgacggccccgccacccaggagaagcccagaagacccagaagaagaggccccaccagacccaccccccccggcgccccccccgacgaggtgtacctgagcgacagccccgccgagcccgcccccaccatccccggcccccccagccagggcgacagcagagtgagcagccccagctgggaggacggcgccgccctgcagcccccccccgccgaggccctgctgctgccccacggccccctgagacccggcccccacctgatccccatggtgggccccgtgccccaccccgtggccgaggacctgaccaccacctacacccagaaggccaagcaggccaagctgcagagagccgagagcctgcaggagaagagcatcaaggaggccaagaccaagtgcagaaccatcgccagcctgctgaccgccgcccccaacccccacagcaagggcgtgctgatgttcaagaagagaagacagagagccaagaagtacaccctggtgagcttcggcgccgccgccggcaccggcgccgaggaggaggacggcgtgccccccaccagcgagagcgagctggacgaggaggccttcagcgacgccagaagcctgaccaaccagagcgactgggacagcccctacctggacatggagctggccagagccggcagcagagccagcgagggccagggcagcggcctgggcggccagctgagcgaggtgagcggcagaggcgtgcagctgttcgagcagcagagacagagagccgacagcagcacccaggagctggccagagtggagcccgccgccatgctgaacggcgagggcctgcagagcccccccagagcccagagcgccccccccgaggccgccgtgctgccccccagccccctgcccgcccccgtggccagccccagacccttccagcccggcggcggcgcccccacccccgcccccagcatcttcaacagaagcgccagacccttcacccccggcctgcagggccagagacccaccaccaccagcgtgatcttcagacccctggcccccaagagagccaacgacagcctgggcggcctgagccccgcccccccccccttcctgagcagccagggccccacccccctgcccagcttcaccagcggcgtgcccagccacgcccccgtgagcggcagccccagcacccccagaagcagcggccccgtgaccgccaccagcagcctgtacatccccgcccccagcagacccgtgacccccggcggcgcccccgagccccccgccccccccagcgccgccgccatgaccagcaccgccagcatcttcctgagcgcccccctgagacccagcgccagacccgaggcccccgcccccggccccggcgcccccgagccccccagcgccagagagcagagaatcagcgtgcccgccgccagaaccggcatcctgcaggaggccagaagaagaggcaccagaaagcagatgttcagacccggcaaggaggagaccaagaacagccccaaccccgagctgctgagcctggtgcagaacctggacgagaagcccagagccggcggcgccgagagcggccccgaggaggacgccctgagcctgggcgccgaggcctgcaacttcatgcagcccgtgggcgccagaagctacaagaccctgccccacgtgacccccaagacccccccccccatggcccccaagacccccccccccatgacccccaagacccccccccccgtggcccccaagccccccagcagaggcctgctggacggcctggtgaacggcgccgccagcagcgccggcatccccgagccccccagactgcagggcagaggcggcgagctgttcgccaagagacagagcagagccgacagatacgtggtggagggcacccccggccccggcctgggccccagacccagaagccccagccccacccccagcctgccccccagctggaagtacagccccaacatcagagcccccccccccatcgcctacaaccccctgctgagccccttcttcccccaggccgccagaaccctgcccaaggcccagagccagggccccagagccacccccaagcagggcatcaaggccctggacttcatgagacaccagccctaccagctgaagaccgccatgttctgcttcgacgaggtgccccccacccccggccccatcgccagcggcagccccaagaccgccagagtgcaggagatcagaagattcagcacccccgccccccagcccaccgccgagcccctggcccccaccgtgctggcccccagagccgccaccaccctggacgagcccatctggagaaccgagctggccagcgcccccgtgcccagccccgcccccccccccgaggcccccagaggcctgggcgccagccccagcagctgcggcttccaggtggccagacccagattcagcgccaccagaaccggcctgcaggcccacgtgtggagacccggcgccggccaccagtag

SEQ ID NO: 11397 - DNA, 2757 bp, synthetic construct
  source 1..2757: mol_type = other DNA; note = Synthetic coding sequence
atgggcaccaccgcccccggccccatccacctgctggagctgtgcgaccagaagctgatggagttcctgtgcaacatggacaacaaggacctggtgtggctggaggagatccaggaggaggccgagagaatgttcaccagagagttcagcaaggagcccgagctgatgcccaagacccccagccagaagaacagaagaaagaagagaagaatcagctacgtgcaggacgagaacagagaccccatcagaagaagactgagcagaagaaagagcagaagcagccagctgagcagcagaagactgagaagcaaggacagcgtggagaagctggccaccgtggtgggcgagaacggcagcgtgctgagaagagtgaccagagccgccgccgccgccgccgccgccaccatggccctggccgcccccagcagccccacccccgagagccccaccatgctgaccaagaagcccgaggacaaccacacccagtgccagctggtgcccgtggtggagatcggcatcagcgagagacagaacgccgagcagcacgtgacccagctgatgagcaccgagcccctgcccagaaccctgagccccacccccgccagcgccaccgcccccaccagccagggcatccccaccagcgacgaggagagcacccccaagaagagcaaggccagaatcctggagagcatcaccgtgagcagcctgatggccaccccccaggaccccaagggccagggcgtgggcaccggcagaagcgccagcaagctgagaatcgcccaggtgagccccggccccagagacagccccgccttccccgacagcccctggagagagagagtgctggcccccatcctgcccgacaacttcagcacccccaccggcagcagaaccgacagccagagcgtgagacacagccccatcgcccccagcagccccagcccccaggtgctggcccagaagtacagcctggtggccaagcaggagagcgtggtgagaagagccagcagaagactggccaagaagaccgccgaggagcccgccgccagcggcagaatcatctgccacagctacctggagagactgctgaacgtggaggtgccccagaaggtgggcagcgagcagaaggagccccccgaggaggccgagcccgtggccgccgccgagcccgaggtgcccgagaacaacggcaacaacagctggccccacaacgacaccgagatcgccaacagcacccccaaccccaagcccgccgccagcagccccgagacccccagcgccggccagcaggaggccaagaccgaccaggccgacggccccagagagcccccccagagcgccagaagaaagagaagctacaagcaggccgtgagcgagctggacgaggagcagcacctggaggacgaggagctgcagccccccagaagcaagacccccagcagcccctgccccgccagcaaggtggtgagacccctgagaaccttcctgcacaccgtgcagagaaaccagatgctgatgacccccaccagcgcccccagaagcgtgatgaagagcttcatcaagagaaacacccccctgagaatggaccccaagtgcagcttcgtggagaaggagagacagagactggagaacctgagaagaaaggaggaggccgagcagctgagaagacagaaggtggaggaggacaagagaagaagactggaggaggtgaagctgaagagagaggagagactgagaaaggtgctgcaggccagagagagagtggagcagatgaaggaggagaagaagaagcagatcgagcagaagttcgcccagatcgacgagaagaccgagaaggccaaggaggagagactggccgaggagaaggccaagaagaaggccgccgccaagaagatggaggaggtggaggccagaagaaagcaggaggaggaggccagaagactgagatggctgcagcaggaggaggaggagagaagacaccaggagctgctgcagaagaagaaggaggaggagcaggagagactgagaaaggccgccgaggccaagagactggccgagcagagagagcaggagagaagagagcaggagagaagagagcaggagagaagagagcaggagagaagagagcaggagagaagagagcaggagagacagctggccgagcaggagagaagaagagagcaggagagactgcaggccgagagagagctgcaggagagagagaaggccctgagactgcagaaggagcagctgcagagagagctggaggagaagaagaagaaggaggagcagcagagactggccgagagacagctgcaggaggagcaggagaagaaggccaaggaggccgccggcgccagcaaggccctgaacgtgaccgtggacgtgcagagccccgcctgcaccagctaccagatgaccccccagggccacagagccccccccaagatcaaccccgacaactacggcatggacctgaacagcgacgacagcaccgacgacgaggcccaccccagaaagcccatccccacctgggccagaggcacccccctgagccaggccatcatccaccagtactaccacccccccaacctgctggagctgttcggcaccatcctgcccctggacctggaggacatcttcaagaagagcaagcccagataccacaagagaaccagcagcgccgtgtggaacagcccccccctgcagggcgccagagtgcccagcagcctggcctacagcctgaagaagcactag

SEQ ID NO: 11398 - DNA, 1728 bp, synthetic construct
  source 1..1728: mol_type = other DNA; note = Synthetic coding sequence
atgaccagcaagaagctggtgaacagcgtggccggctgcgccgacgacgccctggccggcctggtggcctgcaaccccaacctgcagctgctgcagggccacagagtggccctgagaagcgacctggacagcctgaagggcagagtggccctgctgagcggcggcggcagcggccacgagcccgcccacgccggcttcatcggcaagggcatgctgaccggcgtgatcgccggcgccgtgttcaccagccccgccgtgggcagcatcctggccgccatcagagccgtggcccaggccggcaccgtgggcaccctgctgatcgtgaagaactacaccggcgacagactgaacttcggcctggccagagagcaggccagagccgagggcatccccgtggagatggtggtgatcggcgacgacagcgccttcaccgtgctgaagaaggccggcagaagaggcctgtgcggcaccgtgctgatccacaaggtggccggcgccctggccgaggccggcgtgggcctggaggagatcgccaagcaggtgaacgtggtggccaaggccatgggcaccctgggcgtgagcctgagcagctgcagcgtgcccggcagcaagcccaccttcgagctgagcgccgacgaggtggagctgggcctgggcatccacggcgaggccggcgtgagaagaatcaagatggccaccgccgacgagatcgtgaagctgatgctggaccacatgaccaacaccaccaacgccagccacgtgcccgtgcagcccggcagcagcgtggtgatgatggtgaacaacctgggcggcctgagcttcctggagctgggcatcatcgccgacgccaccgtgagaagcctggagggcagaggcgtgaagatcgccagagccctggtgggcaccttcatgagcgccctggagatgcccggcatcagcctgaccctgctgctggtggacgagcccctgctgaagctgatcgacgccgagaccaccgccgccgcctggcccaacgtggccgccgtgagcatcaccggcagaaagagaagcagagtggcccccgccgagccccaggaggcccccgacagcaccgccgccggcggcagcgccagcaagagaatggccctggtgctggagagagtgtgcagcaccctgctgggcctggaggagcacctgaacgccctggacagagccgccggcgacggcgactgcggcaccacccacagcagagccgccagagccatccaggagtggctgaaggagggccccccccccgccagccccgcccagctgctgagcaagctgagcgtgctgctgctggagaagatgggcggcagcagcggcgccctgtacggcctgttcctgaccgccgccgcccagcccctgaaggccaagaccagcctgcccgcctggagcgccgccatggacgccggcctggaggccatgcagaagtacggcaaggccgcccccggcgacagaaccatgctggacagcctgtgggccgccggccaggagctgcaggcctggaagagccccggcgccgacctgctgcaggtgctgaccaaggccgtgaagagcgccgaggccgccgccgaggccaccaagaacatggaggccggcgccggcagagccagctacatcagcagcgccagactggagcagcccgaccccggcgccgtggccgccgccgccatcctgagagccatcctggaggtgctgcagagctag

SEQ ID NO: 11399 - DNA, 1080 bp, synthetic construct
  source 1..1080: mol_type = other DNA; note = Synthetic coding sequence
atggccgccccctgcgccgaggaccccagcctggagagacacttcaagggccacagagacgccgtgacctgcgtggacttcagcatcaacaccaagcagctggccagcggcagcatggacagctgcctgatggtgtggcacatgaagccccagagcagagcctacagattcaccggccacaaggacgccgtgacctgcgtgaacttcagccccagcggccacctgctggccagcggcagcagagacaagaccgtgagaatctgggtgcccaacgtgaagggcgagagcaccgtgttcagagcccacaccgccaccgtgagaagcgtgcacttctgcagcgacggccagagcttcgtgaccgccagcgacgacaagaccgtgaaggtgtgggccacccacagacagaagttcctgttcagcctgagccagcacatcaactgggtgagatgcgccaagttcagccccgacggcagactgatcgtgagcgccagcgacgacaagaccgtgaagctgtgggacaagagcagcagagagtgcgtgcacagctactgcgagcacggcggcttcgtgacctacgtggacttccaccccagcggcacctgcatcgccgccgccggcatggacaacaccgtgaaggtgtgggacgtgagaacccacagactgctgcagcactaccagctgcacagcgccgccgtgaacggcctgagcttccaccccagcggcaactacctgatcaccgccagcagcgacagcaccctgaagatcctggacctgatggagggcagactgctgtacaccctgcacggccaccagggccccgccaccaccgtggccttcagcagaaccggcgagtacttcgccagcggcggcagcgacgagcaggtgatggtgtggaagagcaacttcgacatcgtggaccacggcgaggtgaccaaggtgcccagaccccccgccaccctggccagcagcatgggcaacctgaccgtgagcatcctggagcagagactgaccctgaccgaggacaagctgaagcagtgcctggagaaccagcagctgatcatgcagagagccaccccctag

SEQ ID NO: 11400 - DNA, 633 bp, synthetic construct; identical to SEQ ID NO: 10549
  source 1..633: mol_type = other DNA; note = Synthetic coding sequence

SEQ ID NO: 11401 - DNA, 1491 bp, synthetic construct
  source 1..1491: mol_type = other DNA; note = Synthetic coding sequence
atggaccaggactacgagagaagactgctgagacagatcgtgatccagaacgagaacaccatgcccagagtgaccgagatgagaagaaccctgacccccgccagcagccccgtgagcagccccagcaagcacggcgacagattcatccccagcagagccggcgccaactggagcgtgaacttccacagaatcaacgagaacgagaagagccccagccagaacagaaaggccaaggacgccaccagcgacaacggcaaggacggcctggcctacagcgccctgctgaagaacgagctgctgggcgccggcatcgagaaggtgcaggacccccagaccgaggacagaagactgcagcccagcacccccgagaagaagggcctgttcacctacagcctgagcaccaagagaagcagccccgacgacggcaacgacgtgagcccctacagcctgagccccgtgagcaacaagagccagaagctgctgagaagccccagaaagcccaccagaaagatcagcaagatccccttcaaggtgctggacgcccccgagctgcaggacgacttctacctgaacctggtggactggagcagcctgaacgtgctgagcgtgggcctgggcacctgcgtgtacctgtggagcgcctgcaccagccaggtgaccagactgtgcgacctgagcgtggagggcgacagcgtgaccagcgtgggctggagcgagagaggcaacctggtggccgtgggcacccacaagggcttcgtgcagatctgggacgccgccgccggcaagaagctgagcatgctggagggccacaccgccagagtgggcgccctggcctggaacgccgagcagctgagcagcggcagcagagacagaatgatcctgcagagagacatcagaaccccccccctgcagagcgagagaagactgcagggccacagacaggaggtgtgcggcctgaagtggagcaccgaccaccagctgctggccagcggcggcaacgacaacaagctgctggtgtggaaccacagcagcctgagccccgtgcagcagtacaccgagcacctggccgccgtgaaggccatcgcctggagcccccaccagcacggcctgctggccagcggcggcggcaccgccgacagatgcatcagattctggaacaccctgaccggccagcccctgcagtgcatcgacaccggcagccaggtgtgcaacctggcctggagcaagcacgccaacgagctggtgagcacccacggctacagccagaaccagatcctggtgtggaagtaccccagcctgacccaggtggccaagctgaccggccacagctacagagtgctgtacctggccatgagccccgacggcgaggccatcgtgaccggcgccggcgacgagaccctgagattctggaacgtgttcagcaagaccagaagcaccaaggtgaagtgggagagcgtgagcgtgctgaacctgttcaccagaatcagatag

SEQ ID NO: 11402 - DNA, 390 bp, synthetic construct; identical to SEQ ID NO: 10956
  source 1..390: mol_type = other DNA; note = Synthetic coding sequence

SEQ ID NO: 11403 - DNA, 888 bp, synthetic construct; identical to SEQ ID NO: 10194
  source 1..888: mol_type = other DNA; note = Synthetic coding sequence

SEQ ID NO: 11404 - DNA, 888 bp, synthetic construct; identical to SEQ ID NO: 10194
  source 1..888: mol_type = other DNA; note = Synthetic coding sequence

SEQ ID NO: 11405 - DNA, 354 bp, synthetic construct
  source 1..354: mol_type = other DNA; note = Synthetic coding sequence
atgctgtgctggggcaacgccagcttcggccagctgggcctgggcggcatcgacgaggagatcgtgctggagcccagaaagagcgacttcttcatcaacaagagagtgagagacgtgggctgcggcctgagacacaccgtgttcgtgctggacgacggcaccgtgtacacctgcggctgcaacgacctgggccagctgggccacgagaagagcagaaagaagcccgagatcctgaaggtgtgccagatcagcagactgtacagactgctggtggtgaccatcatccacctgcacttcctgaagcaggtgaagagcagcgtgggcgacagaatcaacatggccaactgggtgtag

SEQ ID NO: 11406 - DNA, 3174 bp, synthetic construct
  source 1..3174: mol_type = other DNA; note = Synthetic coding sequence
atgctgtgctggggcaacgccagcttcggccagctgggcctgggcggcatcgacgaggagatcgtgctggagcccagaaagagcgacttcttcatcaacaagagagtgagagacgtgggctgcggcctgagacacaccgtgttcgtgctggacgacggcaccgtgtacacctgcggctgcaacgacctgggccagctgggccacgagaagagcagaaagaagcccgagcaggtggtggccctggacgcccagaacatcgtggccgtgagctgcggcgaggcccacaccctggccctgaacgacaagggccaggtgtacgcctggggcctggacagcgacggccagctgggcctggtgggcagcgaggagtgcatcagagtgcccagaaacatcaagagcctgagcgacatccagatcgtgcaggtggcctgcggctactaccacagcctggccctgagcaaggccagcgaggtgttctgctggggccagaacaagtacggccagctgggcctgggcaccgactgcaagaagcagaccagcccccagctgctgaagagcctgctgggcatccccttcatgcaggtggccgccggcggcgcccacagcttcgtgctgaccctgagcggcgccatcttcggctggggcagaaacaagttcggccagctgggcctgaacgacgagaacgacagatacgtgcccaacctgctgaagagcctgagaagccagaagatcgtgtacatctgctgcggcgaggaccacaccgccgccctgaccaaggagggcggcgtgttcaccttcggcgccggcggctacggccagctgggccacaacagcaccagccacgagatcaaccccagaaaggtgttcgagctgatgggcagcatcgtgaccgagatcgcctgcggcagacagcacaccagcgccttcgtgcccagcagcggcagaatctacagcttcggcctgggcggcaacggccagctgggcaccggcagcaccagcaacagaaagagccccttcaccgtgaagggcaactggtacccctacaacggccagtgcctgcccgacatcgacagcgaggagtacttctgcgtgaagagaatcttcagcggcggcgaccagagcttcagccactacagcagcccccagaactgcggcccccccgacgacttcagatgccccaaccccaccaagcagatctggaccgtgaacgaggccctgatccagaagtggctgagctaccccagcggcagattccccgtggagatcgccaacgagatcgacggcaccttcagcagcagcggctgcctgaacggcagcttcctggccgtgagcaacgacgaccactacagaaccggcaccagattcagcggcgtggacatgaacgccgccagactgctgttccacaagctgatccagcccgaccacccccagatcagccagcaggtggccgccagcctggagaagaacctgatccccaagctgaccagcagcctgcccgacgtggaggccctgagattctacctgaccctgcccgagtgccccctgatgagcgacagcaacaacttcaccaccatcgccatccccttcggcaccgccctggtgaacctggagaaggcccccctgaaggtgctggagaactggtggagcgtgctggagccccccctgttcctgaagatcgtggagctgttcaaggaggtggtggtgcacctgctgaagctgtacaagatcggcatcccccccagcgagagaagaatcttcaacagcttcctgcacaccgccctgaaggtgctggagatcctgcacagagtgaacgagaagatgggccagatcatccagtacgacaagttctacatccacgaggtgcaggagctgatcgacatcagaaacgactacatcaactgggtgcagcagcaggcctacggcatggacgtgaaccacggcctgaccgagctggccgacatccccgtgaccatctgcacctaccccttcgtgttcgacgcccaggccaagaccaccctgctgcagaccgacgccgtgctgcagatgcagatggccatcgaccaggcccacagacagaacgtgagcagcctgttcctgcccgtgatcgagagcgtgaacccctgcctgatcctggtggtgagaagagagaacatcgtgggcgacgccatggaggtgctgagaaagaccaagaacatcgactacaagaagcccctgaaggtgatcttcgtgggcgaggacgccgtggacgccggcggcgtgagaaaggagttcttcctgctgatcatgagagagctgctggaccccaagtacggcatgttcagatactacgaggacagcagactgatctggttcagcgacaagaccttcgaggacagcgacctgttccacctgatcggcgtgatctgcggcctggccatctacaactgcaccatcgtggacctgcacttccccctggccctgtacaagaagctgctgaagaagaagcccagcctggacgacctgaaggagctgatgcccgacgtgggcagaagcatgcagcagctgctggactaccccgaggacgacatcgaggagaccttctgcctgaacttcaccatcaccgtggagaacttcggcgccaccgaggtgaaggagctggtgctgaacggcgccgacaccgccgtgaacaagcagaacagacaggagttcgtggacgcctacgtggactacatcttcaacaagagcgtggccagcctgttcgacgccttccacgccggcttccacaaggtgtgcggcggcaaggtgctgctgctgttccagcccaacgagctgcaggccatggtgatcggcaacaccaactacgactggaaggagctggagaagaacaccgagtacaagggcgagtactgggccgagcaccccaccatcaagatcttctgggaggtgttccacgagctgcccctggagaagaagaagcagttcctgctgttcctgaccggcagcgacagaatccccatcctgggcatgaagagcctgaagctggtgatccagagcaccggcggcggcgaggagtacctgcccgtgagccacacctgcttcaacctgctggacctgcccaagtacaccgagaaggagaccctgagaagcaagctgatccaggccatcgaccacaacgagggcttcagcctgatctag

SEQ ID NO: 11407 - DNA, 1080 bp, synthetic construct; identical to SEQ ID NO: 9386
  source 1..1080: mol_type = other DNA; note = Synthetic coding sequence

SEQ ID NO: 11408 - DNA, 714 bp, synthetic construct
  source 1..714: mol_type = other DNA; note = Synthetic coding sequence
atggaggtgatggagggccccctgaacctggcccaccagcagagcagaagagccgacagactgctggccgccggcaagtacgaggaggccatcagctgccacaagaaggccgccgcctacctgagcgaggccatgaagctgacccagagcgagcaggcccacctgagcctggagctgcagagagacagccacatgaagcagctgctgctgatccaggagagatggaagagagcccagagagaggagagactgaaggcccagcagaacaccgtgctgtacctgctgcagcagaagagcgagcccgccgagccctgcatcggcagcaaggcccccaaggacgacaagaccatcatcgaggagcaggccaccaagatcgccgacctgaagagacacgtggagttcctggtggccgagaacgagagactgagaaaggagaacaagcagctgaaggccgagaaggccagactgctgaagggccccatcgagaaggagctggacgtggacgccgacttcgtggagaccagcgagctgtggagcctgcccccccacgccgagaccgccaccgccagcagcacctggcagaagttcgccgccaacaccggcaaggccaaggacatccccatccccaacctgccccccctggacttccccagccccgagctgcccctgatggagctgagcgaggacatcctgaagggcttcatgaacaactag

SEQ ID NO: 11409 - DNA, 1458 bp, synthetic construct
  source 1..1458: mol_type = other DNA; note = Synthetic coding sequence
atgaacggcaccctggaccaccccgaccagcccgacctggacgccatcaagatgttcgtgggccaggtgcccagaacctggagcgagaaggacctgagagagctgttcgagcagtacggcgccgtgtacgagatcaacgtgctgagagacagaagccagaaccccccccagagcaagggctgctgcttcgtgaccttctacaccagaaaggccgccctggaggcccagaacgccctgcacaacatgaaggtgctgcccggcatgcaccaccccatccagatgaagcccgccgacagcgagaagaacaacgtggaggacagaaagctgttcatcggcatgatcagcaagaagtgcaccgagaacgacatcagagtgatgttcagcagcttcggccagatcgaggagtgcagaatcctgagaggccccgacggcctgagcagaggctgcgccttcgtgaccttcaccaccagagccatggcccagaccgccatcaaggccatgcaccaggcccagaccatggagggctgcagcagccccatggtggtgaagttcgccgacacccagaaggacaaggagcagaagagaatggcccagcagctgcagcagcagatgcagcagatcagcgccgccagcgtgtggggcaacctggccggcctgaacaccctgggcccccagtacctggccctgtacctgcagctgctgcagcagaccgccagcagcggcaacctgaacaccctgagcagcctgcaccccatgggcggcctgaacgccatgcagctgcagaacctggccgccctggccgccgccgccagcgccgcccagaacacccccagcggcaccaacgccctgaccaccagcagcagccccctgagcgtgctgaccagcagcggcagcagccccagcagcagcagcagcaacagcgtgaaccccatcgccagcctgggcgccctgcagaccctggccggcgccaccgccggcctgaacgtgggcagcctggccggcatggccgccctgaacggcggcctgggcagcagcggcctgagcaacggcaccggcagcaccatggaggccctgacccaggcctacagcggcatccagcagtacgccgccgccgccctgcccaccctgtacaaccagaacctgctgacccagcagagcatcggcgccgccggcagccagaaggagggccccgagggcgccaacctgttcatctaccacctgccccaggagttcggcgaccaggacctgctgcagatgttcatgcccttcggcaacgtggtgagcgccaaggtgttcatcgacaagcagaccaacctgagcaagtgcttcggcttcgtgagctacgacaaccccgtgagcgcccaggccgccatccagagcatgaacggcttccagatcggcatgaagagactgaaggtgcagctgaagagaagcaagaacgacagcaagccctactag

SEQ ID NO: 11410 - DNA, 1452 bp, synthetic construct
  source 1..1452: mol_type = other DNA; note = Synthetic coding sequence
atgaacggcaccctggaccaccccgaccagcccgacctggacgccatcaagatgttcgtgggccaggtgcccagaacctggagcgagaaggacctgagagagctgttcgagcagtacggcgccgtgtacgagatcaacgtgctgagagacagaagccagaaccccccccagagcaagggctgctgcttcgtgaccttctacaccagaaaggccgccctggaggcccagaacgccctgcacaacatgaaggtgctgcccggcatgcaccaccccatccagatgaagcccgccgacagcgagaagaacaacgccgtggaggacagaaagctgttcatcggcatgatcagcaagaagtgcaccgagaacgacatcagagtgatgttcagcagcttcggccagatcgaggagtgcagaatcctgagaggccccgacggcctgagcagaggctgcgccttcgtgaccttcaccaccagagccatggcccagaccgccatcaaggccatgcaccaggcccagaccatggagggctgcagcagccccatggtggtgaagttcgccgacacccagaaggacaaggagcagaagagaatggcccagcagctgcagcagcagatgcagcagatcagcgccgccagcgtgtggggcaacctggccggcctgaacaccctgggcccccagtacctggccctgctgcagcagaccgccagcagcggcaacctgaacaccctgagcagcctgcaccccatgggcggcctgaacgccatgcagctgcagaacctggccgccctggccgccgccgccagcgccgcccagaacacccccagcggcaccaacgccctgaccaccagcagcagccccctgagcgtgctgaccagcagcgccggcagcagccccagcagcagcagcagcaacagcgtgaaccccatcgccagcctgggcgccctgcagaccctggccggcgccaccgccggcctgaacgtgggcagcctggccggcatggccgccctgaacggcggcctgggcagcagcggcctgagcaacggcaccggcagcaccatggaggccctgacccaggcctacagcggcatccagcagtacgccgccgccgccctgcccaccctgtacaaccagaacctgctgacccagcagagcatcggcgccgccggcagccagaaggagggccccgagggcgccaacctgttcatctaccacctgccccaggagttcggcgaccaggacctgctgcagatgttcatgcccttcggcaacgtggtgagcgccaaggtgttcatcgacaagcagaccaacctgagcaagtgcttcggcttcgtgagctacgacaaccccgtgagcgcccaggccgccatccagagcatgaacggcttccagatcggcatgaagagactgaaggtgcagctgaagagaagcaagaacgacagcaagccctactag

SEQ ID NO: 11411 - DNA, 3570 bp, synthetic construct
  source 1..3570: mol_type = other DNA; note = Synthetic coding sequence
atggacgacaagggcgaccccagcaacgaggaggcccccaaggccatcaagcccaccagcaaggagttcagaaagacctggggcttcagaagaaccaccatcgccaagagagagggcgccggcgacgccgaggccgaccccctggagcccccccccccccagcagcagctgggcctgagcctgagaagaagcggcagacagcccaagagaaccgagagagtggagcagttcctgaccatcgccagaagaagaggcagaagaagcatgcccgtgagcctggaggacagcggcgagcccaccagctgccccgccaccgacgccgagaccgccagcgagggcagcgtggagagcgccagcgagaccagaagcggcccccagagcgccagcaccgccgtgaaggagagacccgccagcagcgagaaggtgaagggcggcgacgaccacgacgacaccagcgacagcgacagcgacggcctgaccctgaaggagctgcagaacagactgagaagaaagagagagcaggagcccaccgagagacccctgaagggcatccagagcagactgagaaagaagagaagagaggagggccccgccgagaccgtgggcagcgaggccagcgacaccgtggagggcgtgctgcccagcaagcaggagcccgagaacgaccagggcgtggtgagccaggccggcaaggacgacagagagagcaagctggagggcaaggccgcccaggacatcaaggacgaggagcccggcgacctgggcagacccaagcccgagtgcgagggctacgaccccaacgccctgtactgcatctgcagacagccccacaacaacagattcatgatctgctgcgacagatgcgaggagtggttccacggcgactgcgtgggcatcagcgaggccagaggcagactgctggagagaaacggcgaggactacatctgccccaactgcaccatcctgcaggtgcaggacgagacccacagcgagaccgccgaccagcaggaggccaagtggagacccggcgacgccgacggcaccgactgcaccagcatcggcaccatcgagcagaagagcagcgaggaccagggcatcaagggcagaatcgagaaggccgccaaccccagcggcaagaagaagctgaagatcttccagcccgtgatcgaggcccccggcgccagcaagtgcatcggccccggctgctgccacgtggcccagcccgacagcgtgtactgcagcaacgactgcatcctgaagcacgccgccgccaccatgaagttcctgagcagcggcaaggagcagaagcccaagcccaaggagaagatgaagatgaagcccgagaagcccagcctgcccaagtgcggcgcccaggccggcatcaagatcagcagcgtgcacaagagacccgcccccgagaagaaggagaccaccgtgaagaaggccgtggtggtgcccgccagaagcgaggccctgggcaaggaggccgcctgcgagagcagcacccccagctgggccagcgaccacaactacaacgccgtgaagcccgagaagaccgccgcccccagccccagcctgctgtacaagagcaccaaggaggacagaagaagcgaggagaaggccgccgccatggccgccagcaagaagaccgccccccccggcagcgccgtgggcaagcagcccgcccccagaaacctggtgcccaagaagagcagcttcgccaacgtggccgccgccacccccgccatcaagaagccccccagcggcttcaagggcaccatccccaagagaccctggctgagcgccacccccagcagcggcgccagcgccgccagacaggccggccccgcccccgccgccgccaccgccgccagcaagaagttccccggcagcgccgccctggtgggcgccgtgagaaagcccgtggtgcccagcgtgcccatggccagccccgcccccggcagactgggcgccatgagcgccgcccccagccagcccaacagccagatcagacagaacatcagaagaagcctgaaggagatcctgtggaagagagtgaacgacagcgacgacctgatcatgaccgagaacgaggtgggcaagatcgccctgcacatcgagaaggagatgttcaacctgttccaggtgaccgacaacagatacaagagcaagtacagaagcatcatgttcaacctgaaggaccccaagaaccagggcctgttccacagagtgctgagagaggagatcagcctggccaagctggtgagactgaagcccgaggagctggtgagcaaggagctgagcacctggaaggagagacccgccagaagcgtgatggagagcagaaccaagctgcacaacgagagcaagaagaccgcccccagacaggaggccatccccgacctggaggacagcccccccgtgagcgacagcgaggagcagcaggagagcgccagagccgtgcccgagaagagcaccgcccccctgctggacgtgttcagcagcatgctgaaggacaccaccagccagcacagagcccacctgttcgacctgaactgcaagatctgcaccggccaggtgcccagcgccgaggacgagcccgcccccaagaagcagaagctgagcgccagcgtgaagaaggaggacctgaagagcaagcacgacagcagcgcccccgaccccgcccccgacagcgccgacgaggtgatgcccgaggccgtgcccgaggtggccagcgagcccggcctggagagcgccagccaccccaacgtggacagaacctacttccccggcccccccggcgacggccaccccgagcccagccccctggaggacctgagcccctgccccgccagctgcggcagcggcgtggtgaccaccgtgaccgtgagcggcagagaccccagaaccgcccccagcagcagctgcaccgccgtggccagcgccgccagcagacccgacagcacccacatggtggaggccagacaggacgtgcccaagcccgtgctgaccagcgtgatggtgcccaagagcatcctggccaagcccagcagcagccccgaccccagatacctgagcgtgccccccagccccaacatcagcaccagcgagagcagaagcccccccgagggcgacaccaccctgttcctgagcagactgagcaccatctggaagggcttcatcaacatgcagagcgtggccaagttcgtgaccaaggcctaccccgtgagcggctgcttcgactacctgagcgaggacctgcccgacaccatccacatcggcggcagaatcgcccccaagaccgtgtgggactacgtgggcaagctgaagagcagcgtgagcaaggagctgtgcctgatcagattccaccccgccaccgaggaggaggaggtggcctacatcagcctgtacagctacttcagcagcagaggcagattcggcgtggtggccaacaacaacagacacgtgaaggacctgtacctgatccccctgagcgcccaggaccccgtgcccagcaagctgctgcccttcgagggccccggcaagagaagactgagcggctggagatag

SEQ ID NO: 11412 - DNA, 3570 bp, synthetic construct; identical to SEQ ID NO: 11411
  source 1..3570: mol_type = other DNA; note = Synthetic coding sequence

SEQ ID NO: 11413 - DNA, 6723 bp, synthetic construct; identical to SEQ ID NO: 9498
  source 1..6723: mol_type = other DNA; note = Synthetic coding sequence

SEQ ID NO: 11414 - DNA, 888 bp, synthetic construct; identical to SEQ ID NO: 10194
  source 1..888: mol_type = other DNA; note = Synthetic coding sequence

SEQ ID NO: 11415 - DNA, 834 bp, synthetic construct; identical to SEQ ID NO: 10915
  source 1..834: mol_type = other DNA; note = Synthetic coding sequence

SEQ ID NO: 11416 - DNA, 1245 bp, synthetic construct
  source 1..1245: mol_type = other DNA; note = Synthetic coding sequence
atgggcaccgtgaccgaggacctgatcagaagaaacgccgagcacaacgactgcgtgatcttcagcctggaggagctgagcctgcaccagcaggagatcgagagactggagcacatcgacaagtggtgcagagacctgaagatcctgtacctgcagaacaacctgatcggcaagatcgagaacgtgagcaagctgaagaagctggagtacctgaacctggccctgaacaacatcgagaagatcgagaacctggagggctgcgaggagctggccaagctggacctgaccgtgaacttcatcggcgagctgagcagcatcaagaacctgcagcacaacatccacctgaaggagctgttcctgatgggcaacccctgcgccagcttcgaccactacagagagttcgtggtggccaccctgccccagctgaagtggctggacggcaaggagatcgagcccagcgagagaatcaaggccctgcaggactacagcgtgatcgagccccagatcagagagcaggagaaggaccactgcctgaagagagccaagctgaaggaggaggcccagagaaagcaccaggaggaggacaagaacgaggacaagagaagcaacgccggcttcgacggcagatggtacaccgacatcaacgccaccctgagcagcctggagagcaaggaccacctgcaggcccccgacaccgaggagcacaacaccaagaagctggacaacagcgaggacgacctggagttctggaacaagccctgcctgttcacccccgagagcagactggagaccctgagacacatggagaagcagagaaagaagcaggagaagctgagcgagaagaagaagaaggtgaagccccccagaaccctgatcaccgaggacggcaaggccctgaacgtgaacgagcccaagatcgacttcagcctgaaggacaacgagaagcagatcatcctggacctggccgtgtacagatacatggacaccagcctgatcgacgtggacgtgcagcccacctacgtgagagtgatgatcaagggcaagcccttccagctggtgctgcccgccgaggtgaagcccgacagcagcagcgccaagagaagccagaccaccggccacctggtgatctgcatgcccaaggtgggcgaggtgatcaccggcggccagagagccttcaagagcatgaagaccaccagcgacagaagcagagagcagaccaacaccagctacagcaccggcttctag

SEQ ID NO: 11417 - DNA, 2529 bp, synthetic construct
  source 1..2529: mol_type = other DNA; note = Synthetic coding sequence
atgagcagcagccacttcgccagcagacacagaaaggacatcagcaccgagatgatcagaaccaagatcgcccacagaaagagcctgagccagaaggagaacagacacaaggagtacgagagaaacagacacttcggcctgaaggacgtgaacatccccaccctggagggcagaatcctggtggagctggacgagaccagccagggcctggtgcccgagaagaccaacgtgaagcccagagccatgaagaccatcctgggcgaccagagaaagcagatgctgcagaagtacaaggaggagaagcagctgcagaagctgaaggagcagagagagaaggccaagagaggcatcttcaaggtgggcagatacagacccgacatgccctgcttcctgctgagcaaccagaacgccgtgaaggccgagcccaagaaggccatccccagcagcgtgagaatcaccagaagcaaggccaaggaccagatggagcagaccaagatcgacaacgagagcgacgtgagagccatcagacccggccccagacagaccagcgagaagaaggtgagcgacaaggagaagaaggtggtgcagcccgtgatgcccaccagcctgagaatgaccagaagcgccacccaggccgccaagcaggtgcccagaaccgtgagcagcaccaccgccagaaagcccgtgaccagagccgccaacgagaacgagcccgagggcaaggtgcccagcaagggcagacccgccaagaacgtggagaccaagcccgacaagggcatcagctgcaaggtggacagcgaggagaacaccctgaacagccagaccaacgccaccagcggcatgaaccccgacggcgtgctgagcaagatggagaacctgcccgagatcaacaccgccaagatcaagggcaagaacagcttcgcccccaaggacttcatgttccagcccctggacggcctgaagacctaccaggtgacccccatgacccccagaagcgccaacgccttcctgacccccagctacacctggacccccctgaagaccgaggtggacgagagccaggccaccaaggagatcctggcccagaagtgcaagacctacagcaccaagaccatccagcaggacagcaacaagctgccctgccccctgggccccctgaccgtgtggcacgaggagcacgtgctgaacaagaacgaggccaccaccaagaacctgaacggcctgcccatcaaggaggtgcccagcctggagagaaacgagggcagaatcgcccagccccaccacggcgtgccctacttcagaaacatcctgcagagcgagaccgagaagctgaccagccactgcttcgagtgggacagaaagctggagctggacatccccgacgacgccaaggacctgatcagaaccgccgtgggccagaccagactgctgatgaaggagagattcaagcagttcgagggcctggtggacgactgcgagtacaagagaggcatcaaggagaccacctgcaccgacctggacggcttctgggacatggtgagcttccagatcgaggacgtgatccacaagttcaacaacctgatcaagctggaggagagcggctggcaggtgaacaacaacatgaaccacaacatgaacaagaacgtgttcagaaagaaggtggtgagcggcatcgccagcaagcccaagcaggacgacgccggcagaatcgccgccagaaacagactggccgccatcaagaacgccatgagagagagaatcagacaggaggagtgcgccgagaccgccgtgagcgtgatccccaaggaggtggacaagatcgtgttcgacgccggcttcttcagagtggagagccccgtgaagctgttcagcggcctgagcgtgagcagcgagggccccagccagagactgggcacccccaagagcgtgaacaaggccgtgagccagagcagaaacgagatgggcatcccccagcagaccaccagccccgagaacgccggcccccagaacaccaagagcgagcacgtgaagaagaccctgttcctgagcatccccgagagcagaagcagcatcgaggacgcccagtgccccggcctgcccgacctgatcgaggagaaccacgtggtgaacaagaccgacctgaaggtggactgcctgagcagcgagagaatgagcctgcccctgctggccggcggcgtggccgacgacatcaacaccaacaagaaggagggcatcagcgacgtggtggagggcatggagctgaacagcagcatcaccagccaggacgtgctgatgagcagccccgagaagaacaccgccagccagaacagcatcctggaggagggcgagaccaagatcagccagagcgagctgttcgacaacaagagcctgaccaccgagtgccacctgctggacagcgtgggcagctgctacgtggccagagccggcctggaggtgctgggcagcagcgaccccaccaccagcgccagcagagtggccggcaccaccgccagaagcaagctgcagtag

SEQ ID NO: 11418 - DNA, 1710 bp, synthetic construct
  source 1..1710: mol_type = other DNA; note = Synthetic coding sequence
atgctgtgcagccccagcttctgcaagctgtgctggaagagacagagagagaacggccagagaaagtacggcggccccccccccggctgggacgccgccccccccgagagaggctgcgagatcttcatcggcaagctgcccagagacctgttcgaggacgagctgatccccctgtgcgagaagatcggcaagatctacgagatgagaatgatgatggacttcaacggcaacaacagaggctacgccttcgtgaccttcagcaacaaggtggaggccaagaacgccatcaagcagctgaacaactacgagatcagaaacggcagactgctgggcgtgtgcgccagcgtggacaactgcagactgttcgtgggcggcatccccaagaccaagaagagagaggagatcctgagcgagatgaagaaggtgaccgagggcgtggtggacgtgatcgtgtaccccagcgccgccgacaagaccaagaacagaggcttcgccttcgtggagtacgagagccacagagccgccgccatggccagaagaaagctgctgcccggcagaatccagctgtggggccacggcatcgccgtggactgggccgagcccgaggtggaggtggacgaggacaccatgagcagcgtgaagatcctgtacgtgagaaacctgatgctgagcaccagcgaggagatgatcgagaaggagttcaacaacatcaagcccggcgccgtggagagagtgaagaagatcagagactacgccttcgtgcacttcagcaacagagaggacgccgtggaggccatgaaggccctgaacggcaaggtgctggacggcagccccatcgaggtgaccctggccaagcccgtggacaaggacagctacgtgagatacaccagaggcaccggcggcagaggcaccatgctgcagggcgagtacacctacagcctgggccaggtgtacgaccccaccaccacctacctgggcgcccccgtgttctacgccccccagacctacgccgccatccccagcctgcacttccccgccaccaagggccacctgagcaacagagccatcatcagagcccccagcgtgagaggcgccgccggcgtgagaggcctgggcggcagaggctacctggcctacaccggcctgggcagaggctaccaggtgaagggcgacaagagagaggacaagctgtacgacatcctgcccggcatggagctgacccccatgaaccccgtgaccctgaagccccagggcatcaagctggccccccagatcctggaggagatctgccagaagaacaactggggccagcccgtgtaccagctgcacagcgccatcggccaggaccagagacagctgttcctgtacaagatcaccatccccgccctggccagccagaaccccgccatccaccccttcaccccccccaagctgagcgccttcgtggacgaggccaagacctacgccgccgagtacaccctgcagaccctgggcatccccaccgacggcggcgacggcaccatggccaccgccgccgccgccgccaccgccttccccggctacgccgtgcccaacgccaccgcccccgtgagcgccgcccagctgaagcaggccgtgaccctgggccaggacctggccgcctacaccacctacgaggtgtaccccaccttcgccgtgaccgccagaggcgacggctacggcaccttctag

SEQ ID NO: 11419 - DNA, 1764 bp, synthetic construct
  source 1..1764: mol_type = other DNA; note = Synthetic coding sequence
atgagcaccgccatccccggcctgaagaagggcaacaacgccctgcagagcatcatcctgcagaccctgctggagaaggagaacggccagagaaagtacggcggccccccccccggctgggacgccgccccccccgagagaggctgcgagatcttcatcggcaagctgcccagagacctgttcgaggacgagctgatccccctgtgcgagaagatcggcaagatctacgagatgagaatgatgatggacttcaacggcaacaacagaggctacgccttcgtgaccttcagcaacaaggtggaggccaagaacgccatcaagcagctgaacaactacgagatcagaaacggcagactgctgggcgtgtgcgccagcgtggacaactgcagactgttcgtgggcggcatccccaagaccaagaagagagaggagatcctgagcgagatgaagaaggtgaccgagggcgtggtggacgtgatcgtgtaccccagcgccgccgacaagaccaagaacagaggcttcgccttcgtggagtacgagagccacagagccgccgccatggccagaagaaagctgctgcccggcagaatccagctgtggggccacggcatcgccgtggactgggccgagcccgaggtggaggtggacgaggacaccatgagcagcgtgaagatcctgtacgtgagaaacctgatgctgagcaccagcgaggagatgatcgagaaggagttcaacaacatcaagcccggcgccgtggagagagtgaagaagatcagagactacgccttcgtgcacttcagcaacagagaggacgccgtggaggccatgaaggccctgaacggcaaggtgctggacggcagccccatcgaggtgaccctggccaagcccgtggacaaggacagctacgtgagatacaccagaggcaccggcggcagaggcaccatgctgcagggcgagtacacctacagcctgggccaggtgtacgaccccaccaccacctacctgggcgcccccgtgttctacgccccccagacctacgccgccatccccagcctgcacttccccgccaccaagggccacctgagcaacagagccatcatcagagcccccagcgtgagagagatctacatgaacgtgcccgtgggcgccgccggcgtgagaggcctgggcggcagaggctacctggcctacaccggcctgggcagaggctaccaggtgaagggcgacaagagagaggacaagctgtacgacatcctgcccggcatggagctgacccccatgaaccccgtgaccctgaagccccagggcatcaagctggccccccagatcctggaggagatctgccagaagaacaactggggccagcccgtgtaccagctgcacagcgccatcggccaggaccagagacagctgttcctgtacaagatcaccatccccgccctggccagccagaaccccgccatccaccccttcaccccccccaagctgagcgccttcgtggacgaggccaagacctacgccgccgagtacaccctgcagaccctgggcatccccaccgacggcggcgacggcaccatggccaccgccgccgccgccgccaccgccttccccggctacgccgtgcccaacgccaccgcccccgtgagcgccgcccagctgaagcaggccgtgaccctgggccaggacctggccgcctacaccacctacgaggtgtaccccaccttcgccgtgaccgccagaggcgacggctacggcaccttctag

SEQ ID NO: 11420 - DNA, 1620 bp, synthetic construct
  source 1..1620: mol_type = other DNA; note = Synthetic coding sequence
atggagagcaaccacaagagcggcgacggcctgagcggcacccagaaggaggccgccctgagagccctggtgcagagaaccggctacagcctggtgcaggagaacggccagagaaagtacggcggccccccccccggctgggacgccgccccccccgagagaggctgcgagatcttcatcggcaagctgcccagagacctgttcgaggacgagctgatccccctgtgcgagaagatcggcaagatctacgagatgagaatgatgatggacttcaacggcaacaacagaggctacgccttcgtgaccttcagcaacaaggtggaggccaagaacgccatcaagcagctgaacaactacgagatcagaaacggcagactgctgggcgtgtgcgccagcgtggacaactgcagactgttcgtgggcggcatccccaagaccaagaagagagaggagatcctgagcgagatgaagaaggtgaccgagggcgtggtggacgtgatcgtgtaccccagcgccgccgacaagaccaagaacagaggcttcgccttcgtggagtacgagagccacagagccgccgccatggccagaagaaagctgctgcccggcgccgtggagagagtgaagaagatcagagactacgccttcgtgcacttcagcaacagagaggacgccgtggaggccatgaaggccctgaacggcaaggtgctggacggcagccccatcgaggtgaccctggccaagcccgtggacaaggacagctacgtgagatacaccagaggcaccggcggcagaggcaccatgctgcagggcgagtacacctacagcctgggccaggtgtacgaccccaccaccacctacctgggcgcccccgtgttctacgccccccagacctacgccgccatccccagcctgcacttccccgccaccaagggccacctgagcaacagagccatcatcagagcccccagcgtgagagagatctacatgaacgtgcccgtgggcgccgccggcgtgagaggcctgggcggcagaggctacctggcctacaccggcctgggcagaggctaccaggtgaagggcgacaagagagaggacaagctgtacgacatcctgcccggcatggagctgacccccatgaaccccgtgaccctgaagccccagggcatcaagctggccccccagatcctggaggagatctgccagaagaacaactggggccagcccgtgtaccagctgcacagcgccatcggccaggaccagagacagctgttcctgtacaagatcaccatccccgccctggccagccagaaccccgccatccaccccttcaccccccccaagctgagcgccttcgtggacgaggccaagacctacgccgccgagtacaccctgcagaccctgggcatccccaccgacggcggcgacggcaccatggccaccgccgccgccgccgccaccgccttccccggctacgccgtgcccaacgccaccgcccccgtgagcgccgcccagctgaagcaggccgtgaccctgggccaggacctggccgcctacaccacctacgaggtgtaccccaccttcgccgtgaccgccagaggcgacggctacggcaccttctag

SEQ ID NO: 11421 - DNA, 1044 bp, synthetic construct
  source 1..1044: mol_type = other DNA; note = Synthetic coding sequence
ttcagcctgttccccgccgtggacaacgaggaggccgccctgctgcacgaggaggccaccatgaccatcgaggagctgctgaccagatacggccagaactgccacaagggccccccccacagcaagagcggcgccagcgacaagctgcccagagtggccaagagcaagttcttcgaggacagcgaggacgagagcgacgaggccgaggaggaggaggaggacagcgaggagtgcagcgaggaggaggacggctacagcagcgaggaggccgagaacgaggaggacgaggacgacaccgaggaggccgaggaggacgacgaggaggaggaggaggagatgatggtgcccggcatggagggcaaggaggagcccggcagcgacagcggcaccaccgccgtggtggccctgatcagaggcaagcagctgatcgtggccaacgccggcgacagcagatgcgtggtgagcgaggccggcaaggccctggacatgagctacgaccacaagcccgaggacgaggtggagctggccagaatcaagaacgccggcggcaaggtgaccatggacggcagagtgaacggcggcctgaacctgagcagagccatcggcgaccacttctacaagagaaacaagaacctgccccccgaggagcagatgatcagcgccctgcccgacatcaaggtgctgaccctgaccgacgaccacgagttcatggtgatcgcctgcgacggcatctggaacgtgatgagcagccaggaggtggtggacttcatccagagcaagatcagccagagagacgagaacggcgagctgagactgctgagcagcatcgtggaggagctgctggaccagtgcctggcccccgacaccagcggcgacggcaccggctgcgacaacatgacctgcatcatcatctgcttcaagcccagaaacaccgccgagctgcagcccgagagcggcaagagaaagctggaggaggtgctgagcaccgagggcgccgaggagaacggcaacagcgacaagaagaagaaggccaagagagactag

SEQ ID NO: 11422 - DNA, 1218 bp, synthetic construct
  source 1..1218: mol_type = other DNA; note = Synthetic coding sequence
atggagaccgacctgaacagccaggacagaaaggacctggacaagttcatcaagttcttcgccctgaagaccgtgcaggtgatcgtgcaggccagactgggcgagaagatctgcaccagaagcagcagcagccccaccggcagcgactggttcaacctggccatcaaggacatccccgaggtgacccacgaggccaagaaggccctggccggccagctgcccgccgtgggcagaagcatgtgcgtggagatcagcctgaagaccagcgagggcgacagcatggagctggagatctggtgcctggagatgaacgagaagtgcgacaaggagatcaaggtgagctacaccgtgtacaacagactgagcctgctgctgaagagcctgctggccatcaccagagtgacccccgcctacagactgagcagaaagcagggccacgagtacgtgatcctgtacagaatctacttcggcgaggtgcagctgagcggcctgggcgagggcttccagaccgtgagagtgggcaccgtgggcacccccgtgggcaccatcaccctgagctgcgcctacagaatcaacctggccttcatgagcaccagacagttcgagagaaccccccccatcatgggcatcatcatcgaccacttcgtggacagaccctaccccagcagcagccccatgcacccctgcaactacagaaccgccggcgaggacaccggcgtgatctaccccagcgtggaggacagccaggaggtgtgcaccaccagcttcagcaccagcccccccagccagctgatggtgcccggcaaggagggcggcgtgcccctggcccccaaccagcccgtgcacggcacccaggccgaccaggagagactggccacctgcacccccagcgacagaacccactgcgccgccacccccagcagcagcgaggacaccgagaccgtgagcaacagcagcgagggcagagccagcccccacgacgtgctggagaccatcttcgtgagaaaggtgggcgccttcgtgaacaagcccatcaaccaggtgaccctgaccagcctggacatccccttcgccatgttcgcccccaagaacctggagctggaggacaccgaccccatggtgaacccccccgacagccccgagaccgagagccccctgcagggcagcctgccctgcagctggcccctgccctgcctgctgagccccagcaccgtgtag

SEQ ID NO: 11423 - DNA, 2025 bp, synthetic construct; identical to SEQ ID NO: 10426
  source 1..2025: mol_type = other DNA; note = Synthetic coding sequence

SEQ ID NO: 11424 - DNA, 2640 bp, synthetic construct
  source 1..2640: mol_type = other DNA; note = Synthetic coding sequence
atgaactaccccggcagaggcagccccagaagccccgagcacaacggcagaggcggcggcggcggcgcctgggagctgggcagcgacgccagacccgccttcggcggcggcgtgtgctgcttcgagcacctgcccggcggcgaccccgacgacggcgacgtgcccctggccctgctgagaggcgagcccggcctgcacctggcccccggcaccgacgaccacaaccaccacctggccctggacccctgcctgagcgacgagaactacgacttcagcagcgccgagagcggcagcagcctgagatactacagcgagggcgagagcggcggcggcggcagcagcctgagcctgcaccccccccagcagccccccctggtgcccaccaacagcggcggcggcggcgccaccggcggcagccccggcgagagaaagagaaccagactgggcggccccgccgccagacacagatacgaggtggtgaccgagctgggccccgaggaggtgagatggttctacaaggaggacaagaagacctggaagcccttcatcggctacgacagcctgagaatcgagctggccttcagaaccctgctgcagaccaccggcgccagaccccagggcggcgacagagacggcgaccacgtgtgcagccccaccggccccgccagcagcagcggcgaggacgacgacgaggacagagcctgcggcttctgccagagcaccaccggccacgagcccgagatggtggagctggtgaacatcgagcccgtgtgcgtgagaggcggcctgtacgaggtggacgtgacccagggcgagtgctaccccgtgtactggaaccaggccgacaagatccccgtgatgagaggccagtggttcatcgacggcacctggcagcccctggaggaggaggagagcaacctgatcgagcaggagcacctgaactgcttcagaggccagcagatgcaggagaacttcgacatcgaggtgagcaagagcatcgacggcaaggacggcagcggcatcaactacagcgccgtgcacagcttcaagctgagcagaaaccacgtggactggcacagcgtggacgaggtgtacctgtacagcgacgccaccaccagcaagatcgccagaaccgtgacccagaagctgggcttcagcaaggccagcagcagcggcaccagactgcacagaggctacgtggaggaggccaccctggaggacaagcccagccagaccacccacatcgtgttcgtggtgcacggcatcggccagaagatggaccagggcagaatcatcaagaacaccgccatgatgagagaggccgccagaaagatcgaggagagacacttcagcaaccacgccacccacgtggagttcctgcccgtggagtggagaagcaagctgaccctggacggcgacaccgtggacagcatcacccccgacaaggtgagaggcctgagagacatgctgaacagcagcgccatggacatcatgtactacaccagccccctgtacagagacgagctggtgaagggcctgcagcaggagctgaacagactgtacagcctgttctgcagcagaaaccccgacttcgaggagaagggcggcaaggtgagcatcgtgagccacagcctgggctgcgtgatcacctacgacatcatgaccggctggaaccccgtgagactgtacgagcagctgctgcagaaggaggaggagctgcccgacgagagatggatgagctacgaggagagacacctgctggacgagctgtacatcaccaagagaagactgaaggagatcgaggagagactgcacggcctgaaggccagcagcatgacccagacccccgccctgaagttcaaggtggagaacttcttctgcatgggcagccccctggccgtgttcctggccctgagaggcatcagacccggcaacaccggcagccaggaccacatcctgcccagagagatctgcaacagactgctgaacatcttccaccccaccgaccccgtggcctacagactggagcccctgatcctgaagcactacagcaacatcagccccgtgcagatccactggtacaacaccagcaaccccctgccctacgagcacatgaagcccagcttcctgaaccccgccaaggagcccaccagcgtgagcgagaacgagggcatcagcaccatccccagccccgtgaccagccccgtgctgagcagaagacactacggcgagagcatcaccaacatcggcaaggccagcatcctgggcgccgccagcatcggcaagggcctgggcggcatgctgttcagcagattcggcagaagcagcaccacccagagcagcgagaccagcaaggacagcatggaggacgagaagaagcccgtggccagccccagcgccaccaccgtgggcacccagaccctgccccacagcagcagcggcttcctggacagcgccctggagctggaccacagaatcgacttcgagctgagagagggcctggtggagagcagatactggagcgccgtgaccagccacaccgcctactggagcagcctggacgtggccctgttcctgctgaccttcatgtacaagcacgagcacgacgacgacgccaagcccaacctggaccccatctag

SEQ ID NO: 11425 - DNA, 2316 bp, synthetic construct
  source 1..2316: mol_type = other DNA; note = Synthetic coding sequence
atgaactaccccggcagaggcagccccagaagccccgagcacaacggcagaggcggcggcggcggcgcctgggagctgggcagcgacgccagacccgccttcggcggcggcgtgtgctgcttcgagcacctgcccggcggcgaccccgacgacggcgacgtgcccctggccctgctgagaggcgagcccggcctgcacctggcccccggcaccgacgaccacaaccaccacctggccctggacccctgcctgagcgacgagaactacgacttcagcagcgccgagagcggcagcagcctgagatactacagcgagggcgagagcggcggcggcggcagcagcctgagcctgcaccccccccagcagccccccctggtgcccaccaacagcggcggcggcctgtacgaggtggacgtgacccagggcgagtgctaccccgtgtactggaaccaggccgacaagatccccgtgatgagaggccagtggttcatcgacggcacctggcagcccctggaggaggaggagagcaacctgatcgagcaggagcacctgaactgcttcagaggccagcagatgcaggagaacttcgacatcgaggtgagcaagagcatcgacggcaaggacgccgtgcacagcttcaagctgagcagaaaccacgtggactggcacagcgtggacgaggtgtacctgtacagcgacgccaccaccagcaagatcgccagaaccgtgacccagaagctgggcttcagcaaggccagcagcagcggcaccagactgcacagaggctacgtggaggaggccaccctggaggacaagcccagccagaccacccacatcgtgttcgtggtgcacggcatcggccagaagatggaccagggcagaatcatcaagaacaccgccatgatgagagaggccgccagaaagatcgaggagagacacttcagcaaccacgccacccacgtggagttcctgcccgtggagtggagaagcaagctgaccctggacggcgacaccgtggacagcatcacccccgacaaggtgagaggcctgagagacatgctgaacagcagcgccatggacatcatgtactacaccagccccctgtacagagacgagctggtgaagggcctgcagcaggagctgaacagactgtacagcctgttctgcagcagaaaccccgacttcgaggagaagggcggcaaggtgagcatcgtgagccacagcctgggctgcgtgatcacctacgacatcatgaccggctggaaccccgtgagactgtacgagcagctgctgcagaaggaggaggagctgcccgacgagagatggatgagctacgaggagagacacctgctggacgagctgtacatcaccaagagaagactgaaggagatcgaggagagactgcacggcctgaaggccagcagcatgacccagacccccgccctgaagttcaaggtggagaacttcttctgcatgggcagccccctggccgtgttcctggccctgagaggcatcagacccggcaacaccggcagccaggaccacatcctgcccagagagatctgcaacagactgctgaacatcttccaccccaccgaccccgtggcctacagactggagcccctgatcctgaagcactacagcaacatcagccccgtgcagatccactggtacaacaccagcaaccccctgccctacgagcacatgaagcccagcttcctgaaccccgccaaggagcccaccagcgtgagcgagaacgagggcatcagcaccatccccagccccgtgaccagccccgtgctgagcagaagacactacggcgagagcatcaccaacatcggcaaggccagcatcctgggcgccgccagcatcggcaagggcctgggcggcatgctgttcagcagattcggcagaagcagcaccacccagagcagcgagaccagcaaggacagcatggaggacgagaagaagcccgtggccagccccagcgccaccaccgtgggcacccagaccctgccccacagcagcagcggcttcctggacagcgcctacttcagactgcaggagagcttcttcaacctgccccagctgctgttccccgagaacgtgatgcagaacaaggacaacgccctggtggagctggaccacagaatcgacttcgagctgagagagggcctggtggagagcagatactggagcgccgtgaccagccacaccgcctactggagcagcctggacgtggccctgttcctgctgaccttcatgtacaagcacgagcacgacgacgacgccaagcccaacctggaccccatctag

SEQ ID NO: 11426 - DNA, 1179 bp, synthetic construct
  source 1..1179: mol_type = other DNA; note = Synthetic coding sequence
atgggcaccacctgcctgcacctgggcaccctggagcagagcctggtgttcgagaacaaggtgaacagcgagaaggtgaagctgagcctgagaaacttcccccacaacgactacgaggacgtgttcgaggagcccagcgagagcggcagcgaccccagcatgtggaccgccagaggccccttcagaagagacagatggagcagcgaggacgaggaggccgccggccccagccaggccctgagccccctgctgagcgacaccagaaagatcgtgagcgagggcgagctggaccagctggcccagatcagacccctgatcttcaacttccacgagcagaccgccatcaaggactgcctgaagatcctggaggagaagaccgccgcctacgacatcatgcaggagttcatggccctggagctgaagaacctgcccggcgagttcaacagcggcaaccagcccagcaacagagagaagaacagatacagagacatcctgccctacgacagcaccagagtgcccctgggcaagagcaaggactacatcaacgccagctacatcagaatcgtgaactgcggcgaggagtacttctacatcgccacccagggccccctgctgagcaccatcgacgacttctggcagatggtgctggagaacaacagcaacgtgatcgccatgatcaccagagagatcgagggcggcatcatcaagtgctaccactactggcccatcagcctgaagaagcccctggagctgaagcacttcagagtgttcctggagaactaccagatcctgcagtacttcatcatcagaatgttccaggtggtggagaagagcaccggcaccagccacagcgtgaagcagctgcagttcaccaagtggcccgaccacggcacccccgccagcgccgacagcttcatcaagtacatcagatacgccagaaagagccacctgaccggccccatggtggtgcactgcagcgccggcatcggcagaaccggcgtgttcctgtgcgtggacgtggtgttctgcgccatcgtgaagaactgcagcttcaacatcatggacatcgtggcccagatgagagagcagagaagcggcatggtgcagaccaaggagcagtaccacttctgctacgacatcgtgctggaggtgctgagaaagctgctgaccctggactag

SEQ ID NO: 11427 - DNA, 621 bp, synthetic construct
  source 1..621: mol_type = other DNA; note = Synthetic coding sequence
atgagcagccccagagacttcagagccgagcccgtgaacgactacgagggcaacgacagcgaggccgaggacctgaacttcagagagaccctgcccagcagcagccaggagaacacccccagaagcaaggtgttcgagaacaaggtgaacagcgagaaggtgaagctgagcctgagaaacttcccccacaacgactacgaggacgtgttcgaggagcccagcgagagcggcagcgaccccagcatgtggaccgccagaggccccttcagaagagacagatggagcagcgaggacgaggaggccgccggccccagccaggccctgagccccctgctgagcgacaccagaaagatcgtgagcgagggcgagctggaccagctggcccagatcagacccctgatcttcaacttccacgagcagaccgccatcaaggactgcctgaagatcctggaggagaagaccgccgcctacgacatcatgcaggagttcatgttcaacatcatggacatcgtggcccagatgagagagcagagaagcggcatggtgcagaccaaggagcagtaccacttctgctacgacatcgtgctggaggtgctgagaaagctgctgaccctggactag

SEQ ID NO: 11428 - DNA, 438 bp, synthetic construct
  source 1..438: mol_type = other DNA; note = Synthetic coding sequence
atgtggaccgccagaggccccttcagaagagacagatggagcagcgaggacgaggaggccgccggccccagccaggccctgagccccctgctgagcgacaccagaaagatcgtgagcgagggcgagctggaccagctggcccagatcagacccctgatcttcaacttccacgagcagaccgccatcaaggactgcctgaagatcctggaggagaagaccgccgcctacgacatcatgcaggagttcatggccctggagctgaagaacctgcccggcgagttcaacagcggcaaccagcccagcaacagagagaagaacagatacagagacatcctgcccttccagcaccacggctacagcggccccaacgagagaaccaccttctggcacggcagcaacgagggcgccgtgagcctgctgctgagatactgcgcctag

SEQ ID NO: 11429 - DNA, 1020 bp, synthetic construct; identical to SEQ ID NO: 10066
  source 1..1020: mol_type = other DNA; note = Synthetic coding sequence

SEQ ID NO: 11430 - DNA, 1047 bp, synthetic construct
  source 1..1047: mol_type = other DNA; note = Synthetic coding sequence
atgcagttcggcgagctgctggccgccgtgagaaaggcccaggccaacgtgatgctgttcctggaggagaaggagcaggccgccctgagccaggccaacggcatcaaggcccacctggagtacagaagcgccgagatggagaagagcaagcaggagctggagaccatggccgccatcagcaacaccgtgcagttcctggaggagtactgcaagttcaagaacaccgaggacatcaccttccccagcgtgtacatcggcctgaaggacaagctgagcggcatcagaaaggtgatcaccgagagcaccgtgcacctgatccagctgctggagaactacaagaagaagctgcaggagttcagcaaggaggaggagtacgacatcagaacccaggtgagcgccatcgtgcagagaaagtactggaccagcaagcccgagcccagcaccagagagcagttcctgcagtacgtgcacgacatcaccttcgaccccgacaccgcccacaagtacctgagactgcaggaggagaacagaaaggtgaccaacaccaccccctgggagcacccctaccccgacctgcccagcagattcctgcactggagacaggtgctgagccagcagagcctgtacctgcacagatactacttcgaggtggagatcttcggcgccggcacctacgtgggcctgacctgcaagggcatcgaccagaagggcgaggagagaagcagctgcatcagcggcaacaacttcagctggagcctgcagtggaacggcaaggagttcaccgcctggtacagcgacatggagacccccctgaaggccggccccttctggagactgggcgtgtacatcgacttccccggcggcatcctgagcttctacggcgtggagtacgacagcatgaccctggtgcacaagttcgcctgcaagttcagcgagcccgtgtacgccgccttctggctgagcaagaaggagaacgccatcagaatcgtggacctgggcgaggagcccgagaagcccgcccccagcctggtgggcaccgccccctag

SEQ ID NO: 11431 - DNA, 1047 bp, synthetic construct; identical to SEQ ID NO: 11430
  source 1..1047: mol_type = other DNA; note = Synthetic coding sequence

SEQ ID NO: 11432 - DNA, 687 bp, synthetic construct
  source 1..687: mol_type = other DNA; note = Synthetic coding sequence
atgatcgacgacagcaccagagtgcccctgggcaagagcaaggactacatcaacgccagctacatcagaatcgtgaactgcggcgaggagtacttctacatcgccacccagggccccctgctgagcaccatcgacgacttctggcagatggtgctggagaacaacagcaacgtgatcgccatgatcaccagagagatcgagggcggcatcatcaagtgctaccactactggcccatcagcctgaagaagcccctggagctgaagcacttcagagtgttcctggagaactaccagatcctgcagtacttcatcatcagaatgttccaggtggtggagaagagcaccggcaccagccacagcgtgaagcagctgcagttcaccaagtggcccgaccacggcacccccgccagcgccgacagcttcatcaagtacatcagatacgccagaaagagccacctgaccggccccatggtggtgcactgcagcgccggcatcggcagaaccggcgtgttcctgtgcgtggacgtggtgttctgcgccatcgtgaagaactgcagcttcaacatcatggacatcgtggcccagatgagagagcagagaagcggcatggtgcagaccaaggagcagtaccacttctgctacgacatcgtgctggaggtgctgagaaagctgctgaccctggactag

SEQ ID NO: 11433 - DNA, 1449 bp, synthetic construct; identical to SEQ ID NO: 10502
  source 1..1449: mol_type = other DNA; note = Synthetic coding sequence

SEQ ID NO: 11434 - DNA, 1020 bp, synthetic construct; identical to SEQ ID NO: 10066
  source 1..1020: mol_type = other DNA; note = Synthetic coding sequence

SEQ ID NO: 11435 - DNA, 621 bp, synthetic construct; identical to SEQ ID NO: 11427
  source 1..621: mol_type = other DNA; note = Synthetic coding sequence

SEQ ID NO: 11436 - DNA, 438 bp, synthetic construct; identical to SEQ ID NO: 11428
  source 1..438: mol_type = other DNA; note = Synthetic coding sequence

SEQ ID NO: 11437 - DNA, 687 bp, synthetic construct; identical to SEQ ID NO: 11432
  source 1..687: mol_type = other DNA; note = Synthetic coding sequence

SEQ ID NO: 11438 - DNA, 2802 bp, synthetic construct
  source 1..2802: mol_type = other DNA; note = Synthetic coding sequence
atgttctggaagttcgacctgaacaccaccagccacgtggacaagctgctggacaaggagcacgtgaccctgcaggagctgatggacgaggacgacatcctgcaggagtgcaaggcccagaaccagaagctgctggacttcctgtgcagacagcagtgcatggaggagctggtgagcctgatcacccaggacccccccctggacatggaggagaaggtgagattcaagtaccccaacaccgcctgcgagctgctgacctgcgacgtgccccagatcagcgacagactgggcggcgacgagagcctgctgagcctgctgtacgacttcctggaccacgagccccccctgaaccccctgctggccagcttcttcagcaagaccatcggcaacctgatcgccagaaagaccgagcaggtgatcaccttcctgaagaagaaggacaagttcatcagcctggtgctgaagcacatcggcaccagcgccctgatggacctgctgctgagactggtgagctgcgtggagcccgccggcctgagacaggacgtgctgcactggctgaacgaggagaaggtgatccagagactggtggagctgatccaccccagccaggacgaggacagacagagcaacgccagccagaccctgtgcgacatcgtgagactgggcagagaccagggcagccagctgcaggaggccctggagcccgaccccctgctgaccgccctggagagcagacaggactgcgtggagcagctgctgaagaacatgttcgacggcgacagaaccgagagctgcctggtgagcggcacccaggtgctgctgaccctgctggagaccagaagagtgggcaccgagggcctggtggacagcttcagccagggcctggagagaagctacgccgtgagcagcagcgtgctgcacggcatcgagcccagactgaaggacttccaccagctgctgctgaacccccccaagaagaaggccatcctgaccaccatcggcgtgctggaggagcccctgggcaacgccagactgcacggcgccagactgatggccgccctgctgcacaccaacacccccagcatcaaccaggagctgtgcagactgaacaccatggacctgctgctggacctgttcttcaagtacacctggaacaacttcctgcacttccaggtggagctgtgcatcgccgccatcctgagccacgccgccagagaggagagaaccgaggccagcggcagcgagagcagagtggagcccccccacgagaacggcaacagaagcctggagaccccccagcccgccgccagcctgcccgacaacaccatggtgacccacctgttccagaagtgctgcctggtgcagagaatcctggaggcctgggaggccaacgaccacacccaggccgccggcggcatgagaagaggcaacatgggccacctgaccagaatcgccaacgccgtggtgcagaacctggagagaggccccgtgcagacccacatcagcgaggtgatcagaggcctgcccgccgactgcagaggcagatgggagagcttcgtggaggagaccctgaccgagaccaacagaagaaacaccgtggacctggccttcagcgactaccagatccagcagatgaccgccaacttcgtggaccagttcggcttcaacgacgaggagttcgccgaccaggacgacaacatcaacgcccccttcgacagaatcgccgagatcaacttcaacatcgacgccgacgaggacagccccagcgccgccctgttcgaggcctgctgcagcgacagaatccagcccttcgacgacgacgaggacgaggacatctgggaggacagcgacaccagatgcgccgccagagtgatggccagacccagattcggcgccccccacgccagcgagagctgcagcaagaacggccccgagagaggcggccaggacggcaaggccagcctggaggcccacagagacgcccccggcgccggcgccccccccgcccccggcaagaaggaggccccccccgtggagggcgacagcgagggcgccatgtggaccgccgtgttcgacgagcccgccaacagcacccccaccgcccccggcgtggtgagagacgtgggcagcagcgtgtgggccgccggcaccagcgcccccgaggagaagggctgggccaagttcaccgacttccagcccttctgctgcagcgagagcggccccagatgcagcagccccgtggacaccgagtgcagccacgccgagggcagcagaagccagggccccgagaaggccttcagccccgccagcccctgcgcctggaacgtgtgcgtgaccagaaaggcccccctgctggccagcgacagcagcagcagcggcggcagccacagcgaggacggcgaccagaaggccgccagcgccatggacgccgtgagcagaggccccggcagagaggccccccccctgcccaccgtggccagaaccgaggaggccgtgggcagagtgggctgcgccgacagcagactgctgagccccgcctgccccgcccccaaggaggtgaccgccgcccccgccgtggccgtgccccccgaggccaccgtggccatcaccaccgccctgagcaaggccggccccgccatccccacccccgccgtgagcagcgccctggccgtggccgtgcccctgggccccatcatggccgtgaccgccgcccccgccatggtggccaccctgggcaccgtgaccaaggacggcaagaccgacgccccccccgagggcgccgccctgaacggccccgtgtag

SEQ ID NO: 11439 - DNA, 2799 bp, synthetic construct
  source 1..2799: mol_type = other DNA; note = Synthetic coding sequence
atgttctggaagttcgacctgaacaccaccagccacgtggacaagctgctggacaaggagcacgtgaccctgcaggagctgatggacgaggacgacatcctgcaggagtgcaaggcccagaaccagaagctgctggacttcctgtgcagacagcagtgcatggaggagctggtgagcctgatcacccaggacccccccctggacatggaggagaaggtgagattcaagtaccccaacaccgcctgcgagctgctgacctgcgacgtgccccagatcagcgacagactgggcggcgacgagagcctgctgagcctgctgtacgacttcctggaccacgagccccccctgaaccccctgctggccagcttcttcagcaagaccatcggcaacctgatcgccagaaagaccgagcaggtgatcaccttcctgaagaagaaggacaagttcatcagcctggtgctgaagcacatcggcaccagcgccctgatggacctgctgctgagactggtgagctgcgtggagcccgccggcctgagacaggacgtgctgcactggctgaacgaggagaaggtgatccagagactggtggagctgatccaccccagccaggacgaggacagacagagcaacgccagccagaccctgtgcgacatcgtgagactgggcagagaccagggcagccagctgcaggaggccctggagcccgaccccctgctgaccgccctggagagccaggactgcgtggagcagctgctgaagaacatgttcgacggcgacagaaccgagagctgcctggtgagcggcacccaggtgctgctgaccctgctggagaccagaagagtgggcaccgagggcctggtggacagcttcagccagggcctggagagaagctacgccgtgagcagcagcgtgctgcacggcatcgagcccagactgaaggacttccaccagctgctgctgaacccccccaagaagaaggccatcctgaccaccatcggcgtgctggaggagcccctgggcaacgccagactgcacggcgccagactgatggccgccctgctgcacaccaacacccccagcatcaaccaggagctgtgcagactgaacaccatggacctgctgctggacctgttcttcaagtacacctggaacaacttcctgcacttccaggtggagctgtgcatcgccgccatcctgagccacgccgccagagaggagagaaccgaggccagcggcagcgagagcagagtggagcccccccacgagaacggcaacagaagcctggagaccccccagcccgccgccagcctgcccgacaacaccatggtgacccacctgttccagaagtgctgcctggtgcagagaatcctggaggcctgggaggccaacgaccacacccaggccgccggcggcatgagaagaggcaacatgggccacctgaccagaatcgccaacgccgtggtgcagaacctggagagaggccccgtgcagacccacatcagcgaggtgatcagaggcctgcccgccgactgcagaggcagatgggagagcttcgtggaggagaccctgaccgagaccaacagaagaaacaccgtggacctggccttcagcgactaccagatccagcagatgaccgccaacttcgtggaccagttcggcttcaacgacgaggagttcgccgaccaggacgacaacatcaacgcccccttcgacagaatcgccgagatcaacttcaacatcgacgccgacgaggacagccccagcgccgccctgttcgaggcctgctgcagcgacagaatccagcccttcgacgacgacgaggacgaggacatctgggaggacagcgacaccagatgcgccgccagagtgatggccagacccagattcggcgccccccacgccagcgagagctgcagcaagaacggccccgagagaggcggccaggacggcaaggccagcctggaggcccacagagacgcccccggcgccggcgccccccccgcccccggcaagaaggaggccccccccgtggagggcgacagcgagggcgccatgtggaccgccgtgttcgacgagcccgccaacagcacccccaccgcccccggcgtggtgagagacgtgggcagcagcgtgtgggccgccggcaccagcgcccccgaggagaagggctgggccaagttcaccgacttccagcccttctgctgcagcgagagcggccccagatgcagcagccccgtggacaccgagtgcagccacgccgagggcagcagaagccagggccccgagaaggccttcagccccgccagcccctgcgcctggaacgtgtgcgtgaccagaaaggcccccctgctggccagcgacagcagcagcagcggcggcagccacagcgaggacggcgaccagaaggccgccagcgccatggacgccgtgagcagaggccccggcagagaggccccccccctgcccaccgtggccagaaccgaggaggccgtgggcagagtgggctgcgccgacagcagactgctgagccccgcctgccccgcccccaaggaggtgaccgccgcccccgccgtggccgtgccccccgaggccaccgtggccatcaccaccgccctgagcaaggccggccccgccatccccacccccgccgtgagcagcgccctggccgtggccgtgcccctgggccccatcatggccgtgaccgccgcccccgccatggtggccaccctgggcaccgtgaccaaggacggcaagaccgacgccccccccgagggcgccgccctgaacggccccgtgtag

SEQ ID NO: 11440 - DNA, 789 bp, synthetic construct; identical to SEQ ID NO: 10456
  source 1..789: mol_type = other DNA; note = Synthetic coding sequence

SEQ ID NO: 11441 - DNA, 2718 bp, synthetic construct
  source 1..2718: mol_type = other DNA; note = Synthetic coding sequence
atggaggtgcaggtgagccaggccagcctgggcttcgagctgaccagcgtggagaagagcctgagagagtggagcagactgagcagagaggtgatcgcctggctgtgccccagcagccccaacttcatcctgaacttcccccccccccccagcgccagcagcgtgagcatggtgcagctgttcagcagccccttcggctaccagagccccagcggccacagcgaggaggagagagagggcaacatgaagagcgccaagccccaggtgaaccacagccagcacggcgagagccagagagccctgagccccctgcagagcaccctgagcagcgccgccagccccagccaggcctacgagacctacatcgagaacggcctgatctgcctgaagcacaagatcagaaacatcgagaagaagaagctgaagctggaggactacaaggacagactgaagagcggcgagcacctgaaccccgaccagctggaggccgtggagaagtacgaggaggtgctgcacaacctggagttcgccaaggagctgcagaagaccttcagcggcctgagcctggacctgctgaaggcccagaagaaggcccagagaagagagcacatgctgaagctggaggccgagaagaagaagctgagaaccatcctgcaggtgcagtacgtgctgcagaacctgacccaggagcacgtgcagaaggacttcaagggcggcctgaacggcgccgtgtacctgcccagcaaggagctggactacctgatcaagttcagcaagctgacctgccccgagagaaacgagagcctgagcgtggaggaccagatggagcagagcagcctgtacttctgggacctgctggagggcagcgagaaggccgtggtgggcaccacctacaagcacctgaaggacctgctgagcaagctgctgaacagcggctacttcgagagcatccccgtgcccaagaacgccaaggagaaggaggtgcccctggaggaggagatgctgatccagagcgagaagaagacccagctgagcaagaccgagagcgtgaaggagagcgagagcctgatggagttcgcccagcccgagatccagccccaggagttcctgaacagaagatacatgaccgaggtggactacagcaacaagcagggcgaggagcagccctgggaggccgactacgccagaaagcccaacctgcccaagagatgggacatgctgaccgagcccgacggccaggagaagaagcaggagagcttcaagagctgggaggccagcggcaagcaccaggaggtgagcaagcccgccgtgagcctggagcagagaaagcaggacaccagcaagctgagaagcaccctgcccgaggagcagaagaagcaggagatcagcaagagcaagcccagccccagccagtggaagcaggacacccccaagagcaaggccggctacgtgcaggaggagcagaagaagcaggagacccccaagctgtggcccgtgcagctgcagaaggagcaggaccccaagaagcagacccccaagagctggacccccagcatgcagagcgagcagaacaccaccaagagctggaccacccccatgtgcgaggagcaggacagcaagcagcccgagacccccaagagctgggagaacaacgtggagagccagaagcacagcctgaccagccagagccagatcagccccaagagctggggcgtggccaccgccagcctgatccccaacgaccagctgctgcccagaaagctgaacaccgagcccaaggacgtgcccaagcccgtgcaccagcccgtgggcagcagcagcaccctgcccaaggaccccgtgctgagaaaggagaagctgcaggacctgatgacccagatccagggcacctgcaacttcatgcaggagagcgtgctggacttcgacaagcccagcagcgccatccccaccagccagccccccagcgccacccccggcagccccgtggccagcaaggagcagaacctgagcagccagagcgacttcctgcaggagcccctgcaggccgccatcccccccggcaagcagcccagcagcctggccagccccaacccccccatggccaagggcagcgagcagggcttccagagcccccccgccagcagcagcagcgtgaccatcaacaccgcccccttccaggccatgcagaccgtgttcaacgtgaacgcccccctgccccccagaaaggagcaggagatcaaggagagcccctacagccccggctacaaccagagcttcaccaccgccagcacccagacccccccccagtgccagctgcccagcatccacgtggagcagaccgtgcacagccaggagaccgcccagaccaacgtgttccccagacccacccagcccttcgtgaacagcagaggcagcgtgagaggctgcaccagaggcggcagactgatcaccaacagctacagaagccccggcggctacaagggcttcgacacctacagaggcctgcccagcatcagcaacggcaactacagccagctgcagttccaggccagagagtacagcggcgccccctacagccagagagacaacttccagcagtgctacaagagaggcggcaccagcggcggccccagagccaacagcagagccaactgcttcatcatgagaaacagcctgctgctgatcaagcagcagggcggcgtgatcctgctgagatag

SEQ ID NO: 11442 - DNA, 1107 bp, synthetic construct; identical to SEQ ID NO: 10791
  source 1..1107: mol_type = other DNA; note = Synthetic coding sequence

SEQ ID NO: 11443 - DNA, 1107 bp, synthetic construct; identical to SEQ ID NO: 10791
  source 1..1107: mol_type = other DNA; note = Synthetic coding sequence

SEQ ID NO: 11444 - DNA, 2745 bp, synthetic construct
  source 1..2745: mol_type = other DNA; note = Synthetic coding sequence
atgagcagcagcggctacccccccaaccagggcgccttcagcaccgagcagagcagataccccccccacagcgtgcagtacaccttccccaacaccagacaccagcaggaccccgccttcggcggcaagcacgaggcccccagcagccccatcagcggccagccctgcggcgacgaccagaacgccagccccagcaagctgagcaaggaggagctgatccagagcatggacagagtggacagagagatcgccaaggtggagcagcagatcctgaagctgaagaagaagcagcagcagctggaggaggaggccgccaagccccccgagcccgagaagcccgtgagccccccccccgtggagcagaagcacagaagcatcgtgcagatcatctacgacgagaacagaaagaaggccgaggaggcccacaagatcttcgagggcctgggccccaaggtggagctgcccctgtacaaccagcccagcgacaccaaggtgtaccacgagaacatcaagaccaaccaggtgatgagaaagaagctgatcctgttcttcaagagaagaaaccacgccagaaagcagagagagcagaagatctgccagagatacgaccagctgatggaggcctgggagaagaaggtggacagaatcgagaacaaccccagaagaaaggccaaggagagcaagaccagagagtactacgagaagcagttccccgagatcagaaagcagagagagcagcaggagagattccagagagtgggccagagaggcgccggcctgagcgccaccatcgccagaagcgagcacgagatcagcgagatcatcgacggcctgagcgagcaggagaacaacgagaagcagatgagacagctgagcgtgatcccccccatgatgttcgacgccgagcagagaagagtgaagttcatcaacatgaacggcctgatggaggaccccatgaaggtgtacaaggacagacagttcatgaacgtgtggaccgaccacgagaaggagatcttcaaggacaagttcatccagcaccccaagaacttcggcctgatcgccagctacctggagagaaagagcgtgcccgactgcgtgctgtactactacctgaccaagaagaacgagaactacaaggccctggtgagaagaaactacggcaagagaagaggcagaaaccagcagatcgccagacccagccaggaggagaaggtggaggagaaggaggaggacaaggccgagaagaccgagaagaaggaggaggagaagaaggacgaggaggagaaggacgagaaggaggacagcaaggagaacaccaaggagaaggacaagatcgacggcaccgccgaggagaccgaggagagagagcaggccacccccagaggcagaaagaccgccaacagccagggcagaagaaagggcagaatcaccagaagcatgaccaacgaggccgccgccgccagcgccgccgccgccgccgccaccgaggagccccccccccccctgccccccccccccgagcccatcagcaccgagcccgtggagaccagcagatggaccgaggaggagatggaggtggccaagaagggcctggtggagcacggcagaaactgggccgccatcgccaagatggtgggcaccaagagcgaggcccagtgcaagaacttctacttcaactacaagagaagacacaacctggacaacctgctgcagcagcacaagcagaagaccagcagaaagcccagagaggagagagacgtgagccagtgcgagagcgtggccagcaccgtgagcgcccaggaggacgaggacatcgaggccagcaacgaggaggagaaccccgaggacagcgagggcgccgagaacagcagcgacaccgagagcgcccccagccccagccccgtggaggccgtgaagcccagcgaggacagccccgagaacgccaccagcagaggcaacaccgagcccgccgtggagctggagcccaccaccgagaccgcccccagcaccagccccagcctggccgtgcccagcaccaagcccgccgaggacgagagcgtggagacccaggtgaacgacagcatcagcgccgagaccgccgagcagatggacgtggaccagcaggagcacagcgccgaggagggcagcgtgtgcgaccccccccccgccaccaaggccgacagcgtggacgtggaggtgagagtgcccgagaaccacgccagcaaggtggagggcgacaacaccaaggagagagacctggacagagccagcgagaaggtggagcccagagacgaggacctggtggtggcccagcagatcaacgcccagagacccgagccccagagcgacaacgacagcagcgccacctgcagcgccgacgaggacgtggacggcgagcccgagagacagagaatgttccccatggacagcaagcccagcctgctgaaccccaccggcagcatcctggtgagcagccccctgaagcccaaccccctggacctgccccagctgcagcacagagccgccgtgatcccccccatggtgagctgcaccccctgcaacatccccatcggcacccccgtgagcggctacgccctgtaccagagacacatcaaggccatgcacgagagcgccctgctggaggagcagagacagagacaggagcagatcgacctggagtgcagaagcagcaccagcccctgcggcaccagcaagagccccaacagagagtgggagggcagatag

SEQ ID NO: 11445 - DNA, 7032 bp, synthetic construct
  source 1..7032: mol_type = other DNA; note = Synthetic coding sequence
atgagcagcagcggctacccccccaaccagggcgccttcagcaccgagcagagcagataccccccccacagcgtgcagtacaccttccccaacaccagacaccagcaggaccccgccttcggcggcaagcacgaggcccccagcagccccatcagcggccagccctgcggcgacgaccagaacgccagccccagcaagctgagcaaggaggagctgatccagagcatggacagagtggacagagagatcgccaaggtggagcagcagatcctgaagctgaagaagaagcagcagcagctggaggaggaggccgccaagccccccgagcccgagaagcccgtgagccccccccccgtggagcagaagcacagaagcatcgtgcagatcatctacgacgagaacagaaagaaggccgaggaggcccacaagatcttcgagggcctgggccccaaggtggagctgcccctgtacaaccagcccagcgacaccaaggtgtaccacgagaacatcaagaccaaccaggtgatgagaaagaagctgatcctgttcttcaagagaagaaaccacgccagaaagcagagagagcagaagatctgccagagatacgaccagctgatggaggcctgggagaagaaggtggacagaatcgagaacaaccccagaagaaaggccaaggagagcaagaccagagagtactacgagaagcagttccccgagatcagaaagcagagagagcagcaggagagattccagagagtgggccagagaggcgccggcctgagcgccaccatcgccagaagcgagcacgagatcagcgagatcatcgacggcctgagcgagcaggagaacaacgagaagcagatgagacagctgagcgtgatcccccccatgatgttcgacgccgagcagagaagagtgaagttcatcaacatgaacggcctgatggaggaccccatgaaggtgtacaaggacagacagttcatgaacgtgtggaccgaccacgagaaggagatcttcaaggacaagttcatccagcaccccaagaacttcggcctgatcgccagctacctggagagaaagagcgtgcccgactgcgtgctgtactactacctgaccaagaagaacgagaactacaaggccctggtgagaagaaactacggcaagagaagaggcagaaaccagcagatcgccagacccagccaggaggagaaggtggaggagaaggaggaggacaaggccgagaagaccgagaagaaggaggaggagaagaaggacgaggaggagaaggacgagaaggaggacagcaaggagaacaccaaggagaaggacaagatcgacggcaccgccgaggagaccgaggagagagagcaggccacccccagaggcagaaagaccgccaacagccagggcagaagaaagggcagaatcaccagaagcatgaccaacgaggccgccgccgccagcgccgccgccgccgccgccaccgaggagccccccccccccctgccccccccccccgagcccatcagcaccgagcccgtggagaccagcagatggaccgaggaggagatggaggtggccaagaagggcctggtggagcacggcagaaactgggccgccatcgccaagatggtgggcaccaagagcgaggcccagtgcaagaacttctacttcaactacaagagaagacacaacctggacaacctgctgcagcagcacaagcagaagaccagcagaaagcccagagaggagagagacgtgagccagtgcgagagcgtggccagcaccgtgagcgcccaggaggacgaggacatcgaggccagcaacgaggaggagaaccccgaggacagcgagggcgccgagaacagcagcgacaccgagagcgcccccagccccagccccgtggaggccgtgaagcccagcgaggacagccccgagaacgccaccagcagaggcaacaccgagcccgccgtggagctggagcccaccaccgagaccgcccccagcaccagccccagcctggccgtgcccagcaccaagcccgccgaggacgagagcgtggagacccaggtgaacgacagcatcagcgccgagaccgccgagcagatggacgtggaccagcaggagcacagcgccgaggagggcagcgtgtgcgaccccccccccgccaccaaggccgacagcgtggacgtggaggtgagagtgcccgagaaccacgccagcaaggtggagggcgacaacaccaaggagagagacctggacagagccagcgagaaggtggagcccagagacgaggacctggtggtggcccagcagatcaacgcccagagacccgagccccagagcgacaacgacagcagcgccacctgcagcgccgacgaggacgtggacggcgagcccgagagacagagaatgttccccatggacagcaagcccagcctgctgaaccccaccggcagcatcctggtgagcagccccctgaagcccaaccccctggacctgccccagctgcagcacagagccgccgtgatcccccccatggtgagctgcaccccctgcaacatccccatcggcacccccgtgagcggctacgccctgtaccagagacacatcaaggccatgcacgagagcgccctgctggaggagcagagacagagacaggagcagatcgacctggagtgcagaagcagcaccagcccctgcggcaccagcaagagccccaacagagagtgggaggtgctgcagcccgccccccaccaggtgatcaccaacctgcccgagggcgtgagactgcccaccaccagacccaccagaccccccccccccctgatccccagcagcaagaccaccgtggccagcgagaagcccagcttcatcatgggcggcagcatcagccagggcacccccggcacctacctgaccagccacaaccaggccagctacacccaggagacccccaagcccagcgtgggcagcatcagcctgggcctgcccagacagcaggagagcgccaagagcgccaccctgccctacatcaagcaggaggagttcagccccagaagccagaacagccagcccgagggcctgctggtgagagcccagcacgagggcgtggtgagaggcaccgccggcgccatccaggagggcagcatcaccagaggcacccccaccagcaagatcagcgtggagagcatccccagcctgagaggcagcatcacccagggcacccccgccctgccccagaccggcatccccaccgaggccctggtgaagggcagcatcagcagaatgcccatcgaggacagcagccccgagaagggcagagaggaggccgccagcaagggccacgtgatctacgagggcaagagcggccacatcctgagctacgacaacatcaagaacgccagagagggcaccagaagccccagaaccgcccacgagatcagcctgaagagaagctacgagagcgtggagggcaacatcaagcagggcatgagcatgagagagagccccgtgagcgcccccctggagggcctgatctgcagagccctgcccagaggcagcccccacagcgacctgaaggagagaaccgtgctgagcggcagcatcatgcagggcacccccagagccaccaccgagagcttcgaggacggcctgaagtaccccaagcagatcaagagagagagcccccccatcagagccttcgagggcgccatcaccaagggcaagccctacgacggcatcaccaccatcaaggagatgggcagaagcatccacgagatccccagacaggacatcctgacccaggagagcagaaagacccccgaggtggtgcagagcaccagacccatcatcgagggcagcatcagccagggcacccccatcaagttcgacaacaacagcggccagagcgccatcaagcacaacgtgaagagcctgatcaccggccccagcaagctgagcagaggcatgccccccctggagatcgtgcccgagaacatcaaggtggtggagagaggcaagtacgaggacgtgaaggccggcgagaccgtgagaagcagacacaccagcgtggtgagcagcggccccagcgtgctgagaagcaccctgcacgaggcccccaaggcccagctgagccccggcatctacgacgacaccagcgccagaagaacccccgtgagctaccagaacaccatgagcagaggcagccccatgatgaacagaaccagcgacgtgagcagcaacaagagcaccaaccacgagagaaagagcaccctgacccccacccagagagagagcatccccgccaagagccccgtgcccggcgtggaccccgtggtgagccacagccccttcgacccccaccacagaggcagcaccgccggcgaggtgtacagaagccacctgcccacccacctggaccccgccatgcccttccacagagccctggaccccgccgccgcctacctgttccagagacagctgagccccacccccggctaccccagccagtaccagctgtacgccatggagaacaccagacagaccatcctgaacgactacatcaccagccagcagatgcaggtgaacctgagacccgacgtggccagaggcctgagccccagagagcagcccctgggcctgccctaccccgccaccagaggcatcatcgacctgaccaacatgccccccaccatcctggtgccccaccccggcggcaccagcaccccccccatggacagaatcacctacatccccggcacccagatcaccttcccccccagaccctacaacagcgccagcatgagccccggccaccccacccacctggccgccgccgccagcgccgagagagagagagagagagagagagagaaggagagagagagagagagaatcgccgccgccagcagcgacctgtacctgagacccggcagcgagcagcccggcagacccggcagccacggctacgtgagaagccccagccccagcgtgagaacccaggagaccatgctgcagcagagacccagcgtgttccagggcaccaacggcaccagcgtgatcacccccctggaccccaccgcccagctgagaatcatgcccctgcccgccggcggccccagcatcagccagggcctgcccgccagcagatacaacaccgccgccgacgccctggccgccctggtggacgccgccgccagcgccccccagatggacgtgagcaagaccaaggagagcaagcacgaggccgccagactggaggagaacctgagaagcagaagcgccgccgtgagcgagcagcagcagctggagcagaagaccctggaggtggagaagagaagcgtgcagtgcctgtacaccagcagcgccttccccagcggcaagccccagccccacagcagcgtggtgtacagcgaggccggcaaggacaagggccccccccccaagagcagatacgaggaggagctgagaaccagaggcaagaccaccatcaccgccgccaacttcatcgacgtgatcatcaccagacagatcgccagcgacaaggacgccagagagagaggcagccagagcagcgacagcagcagcagcctgagcagccacagatacgagacccccagcgacgccatcgaggtgatcagccccgccagcagccccgcccccccccaggagaagctgcagacctaccagcccgaggtggtgaaggccaaccaggccgagaacgaccccaccagacagtacgagggccccctgcaccactacagaccccagcaggagagccccagcccccagcagcagctgccccccagcagccaggccgagggcatgggccaggtgcccagaacccacagactgatcaccctggccgaccacatctgccagatcatcacccaggacttcgccagaaaccaggtgagcagccagaccccccagcagccccccaccagcaccttccagaacagccccagcgccctggtgagcacccccgtgagaaccaagaccagcaacagatacagccccgagagccaggcccagagcgtgcaccaccagagacccggcagcagagtgagccccgagaacctggtggacaagagcagaggcagcagacccggcaagagccccgagagaagccacgtgagcagcgagccctacgagcccatcagccccccccaggtgcccgtggtgcacgagaagcaggacagcctgctgctgctgagccagagaggcgccgagcccgccgagcagagaaacgacgccagaagccccggcagcatcagctacctgcccagcttcttcaccaagctggagaacaccagccccatggtgaagagcaagaagcaggagatcttcagaaagctgaacagcagcggcggcggcgacagcgacatggccgccgcccagcccggcaccgagatcttcaacctgcccgccgtgaccaccagcggcagcgtgagcagcagaggccacagcttcgccgaccccgccagcaacctgggcctggaggacatcatcagaaaggccctgatgggcagcttcgacgacaaggtggaggaccacggcgtggtgatgagccagcccatgggcgtggtgcccggcaccgccaacaccagcgtggtgaccagcggcgagaccagaagagaggagggcgaccccagcccccacagcggcgtgtgcaagcccaagctgatcagcaagagcaacagcagaaagagcaagagccccatccccggccagggctacctgggcaccgagagacccagcagcgtgagcagcgtgcacagcgagggcgactaccacagacagacccccggctgggcctgggaggacagacccagcagcaccggcagcacccagttcccctacaaccccctgaccatgagaatgctgagcagcaccccccccacccccatcgcctgcgcccccagcgccgtgaaccaggccgccccccaccagcagaacagaatctgggagagagagcccgcccccctgctgagcgcccagtacgagaccctgagcgacagcgacgactag

SEQ ID NO: 11446 - DNA, 7014 bp, synthetic construct
  source 1..7014: mol_type = other DNA; note = Synthetic coding sequence
atgagcagcagcggctacccccccaaccagggcgccttcagcaccgagcagagcagataccccccccacagcgtgcagtacaccttccccaacaccagacaccagcaggagttcgccgtgcccgactacagaagcagccacctggaggtgagccaggccagccagctgctgcagcagcagcagcagcagcagctgagaagaagacccagcctgctgagcgagttccaccccggcagcgacagaccccaggagagaagaaccagctacgagcccttccaccccggccccagccccgtggaccacgacagcctggagagcaagagacccagactggagcaggtgagcgacagccacttccagagagtgagcgccgccgtgctgcccctggtgcaccccctgcccgagggcctgagagccagcgccgacgccaagaaggaccccgccttcggcggcaagcacgaggcccccagcagccccatcagcggccagccctgcggcgacgaccagaacgccagccccagcaagctgagcaaggaggagctgatccagagcatggacagagtggacagagagatcgccaaggtggagcagcagatcctgaagctgaagaagaagcagcagcagctggaggaggaggccgccaagccccccgagcccgagaagcccgtgagccccccccccgtggagcagaagcacagaagcatcgtgcagatcatctacgacgagaacagaaagaaggccgaggaggcccacaagatcttcgagggcctgggccccaaggtggagctgcccctgtacaaccagcccagcgacaccaaggtgtaccacgagaacatcaagaccaaccaggtgatgagaaagaagctgatcctgttcttcaagagaagaaaccacgccagaaagcagagagagcagaagatctgccagagatacgaccagctgatggaggcctgggagaagaaggtggacagaatcgagaacaaccccagaagaaaggccaaggagagcaagaccagagagtactacgagaagcagttccccgagatcagaaagcagagagagcagcaggagagattccagagagtgggccagagaggcgccggcctgagcgccaccatcgccagaagcgagcacgagatcagcgagatcatcgacggcctgagcgagcaggagaacaacgagaagcagatgagacagctgagcgtgatcccccccatgatgttcgacgccgagcagagaagagtgaagttcatcaacatgaacggcctgatggaggaccccatgaaggtgtacaaggacagacagttcatgaacgtgtggaccgaccacgagaaggagatcttcaaggacaagttcatccagcaccccaagaacttcggcctgatcgccagctacctggagagaaagagcgtgcccgactgcgtgctgtactactacctgaccaagaagaacgagaactacaaggccctggtgagaagaaactacggcaagagaagaggcagaaaccagcagatcgccagacccagccaggaggagaaggtggaggagaaggaggaggacaaggccgagaagaccgagaagaaggaggaggagaagaaggacgaggaggagaaggacgagaaggaggacagcaaggagaacaccaaggagaaggacaagatcgacggcaccgccgaggagaccgaggagagagagcaggccacccccagaggcagaaagaccgccaacagccagggcagaagaaagggcagaatcaccagaagcatgaccaacgaggccgccgccgccagcgccgccgccgccgccgccaccgaggagccccccccccccctgccccccccccccgagcccatcagcaccgagcccgtggagaccagcagatggaccgaggaggagatggaggtggccaagaagggcctggtggagcacggcagaaactgggccgccatcgccaagatggtgggcaccaagagcgaggcccagtgcaagaacttctacttcaactacaagagaagacacaacctggacaacctgctgcagcagcacaagcagaagaccagcagaaagcccagagaggagagagacgtgagccagtgcgagagcgtggccagcaccgtgagcgcccaggaggacgaggacatcgaggccagcaacgaggaggagaaccccgaggacagcgagggcgccgagaacagcagcgacaccgagagcgcccccagccccagccccgtggaggccgtgaagcccagcgaggacagccccgagaacgccaccagcagaggcaacaccgagcccgccgtggagctggagcccaccaccgagaccgcccccagcaccagccccagcctggccgtgcccagcaccaagcccgccgaggacgagagcgtggagacccaggtgaacgacagcatcagcgccgagaccgccgagcagatggacgtggaccagcaggagcacagcgccgaggagggcagcgtgtgcgaccccccccccgccaccaaggccgacagcgtggacgtggaggtgagagtgcccgagaaccacgccagcaaggtggagggcgacaacaccaaggagagagacctggacagagccagcgagaaggtggagcccagagacgaggacctggtggtggcccagcagatcaacgcccagagacccgagccccagagcgacaacgacagcagcgccacctgcagcgccgacgaggacgtggacggcgagcccgagagacagagaatgttccccatggacagcaagcccagcctgctgaaccccaccggcagcatcctggtgagcagccccctgaagcccaaccccctggacctgccccagctgcagcacagagccgccgtgatcccccccatggtgagctgcaccccctgcaacatccccatcggcacccccgtgagcggctacgccctgtaccagagacacatcaaggccatgcacgagagcgccctgctggaggagcagagacagagacaggagcagatcgacctggagtgcagaagcagcaccagcccctgcggcaccagcaagagccccaacagagagtgggaggtgctgcagcccgccccccaccaggtgatcaccaacctgcccgagggcgtgagactgcccaccaccagacccaccagaccccccccccccctgatccccagcagcaagaccaccgtggccagcgagaagcccagcttcatcatgggcggcagcatcagccagggcacccccggcacctacctgaccagccacaaccaggccagctacacccaggagacccccaagcccagcgtgggcagcatcagcctgggcctgcccagacagcaggagagcgccaagagcgccaccctgccctacatcaagcaggaggagttcagccccagaagccagaacagccagcccgagggcctgctggtgagagcccagcacgagggcgtggtgagaggcaccgccggcgccatccaggagggcagcatcaccagaggcacccccaccagcaagatcagcgtggagagcatccccagcctgagaggcagcatcacccagggcacccccgccctgccccagaccggcatccccaccgaggccctggtgaagggcagcatcagcagaatgcccatcgaggacagcagccccgagaagggcagagaggaggccgccagcaagggccacgtgatctacgagggcaagagcggccacatcctgagctacgacaacatcaagaacgccagagagggcaccagaagccccagaaccgcccacgagatcagcctgaagagaagctacgagagcgtggagggcaacatcaagcagggcatgagcatgagagagagccccgtgagcgcccccctggagggcctgatctgcagagccctgcccagaggcagcccccacagcgacctgaaggagagaaccgtgctgagcggcagcatcatgcagggcacccccagagccaccaccgagagcttcgaggacggcctgaagtaccccaagcagatcaagagagagagcccccccatcagagccttcgagggcgccatcaccaagggcaagccctacgacggcatcaccaccatcaaggagatgggcagaagcatccacgagatccccagacaggacatcctgacccaggagagcagaaagacccccgaggtggtgcagagcaccagacccatcatcgagggcagcatcagccagggcacccccatcaagttcgacaacaacagcggccagagcgccatcaagcacaacgtgaagagcctgatcaccggccccagcaagctgagcagaggcatgccccccctggagatcgtgcccgagaacatcaaggtggtggagagaggcaagtacgaggacgtgaaggccggcgagaccgtgagaagcagacacaccagcgtggtgagcagcggccccagcgtgctgagaagcaccctgcacgaggcccccaaggcccagctgagccccggcatctacgacgacaccagcgccagaagaacccccgtgagctaccagaacaccatgagcagaggcagccccatgatgaacagaaccagcgacgtgaccatcagcagcaacaagagcaccaaccacgagagaaagagcaccctgacccccacccagagagagagcatccccgccaagagccccgtgcccggcgtggaccccgtggtgagccacagccccttcgacccccaccacagaggcagcaccgccggcgaggtgtacagaagccacctgcccacccacctggaccccgccatgcccttccacagagccctggaccccgccgccgccgcctacctgttccagagacagctgagccccacccccggctaccccagccagtaccagctgtacgccatggagaacaccagacagaccatcctgaacgactacatcaccagccagcagatgcaggtgaacctgagacccgacgtggccagaggcctgagccccagagagcagcccctgggcctgccctaccccgccaccagaggcatcatcgacctgaccaacatgccccccaccatcctggtgccccaccccggcggcaccagcaccccccccatggacagaatcacctacatccccggcacccagatcaccttcccccccagaccctacaacagcgccagcatgagccccggccaccccacccacctggccgccgccgccagcgccgagagagagagagagagagagagagagaaggagagagagagagagagaatcgccgccgccagcagcgacctgtacctgagacccggcagcgagcagcccggcagacccggcagccacggctacgtgagaagccccagccccagcgtgagaacccaggagaccatgctgcagcagagacccagcgtgttccagggcaccaacggcaccagcgtgatcacccccctggaccccaccgcccagctgagaatcatgcccctgcccgccggcggccccagcatcagccagggcctgcccgccagcagatacaacaccgccgccgacgccctggccgccctggtggacgccgccgccagcgccccccagatggacgtgagcaagaccaaggagatcagcagccacagatacgagacccccagcgacgccatcgaggtgatcagccccgccagcagccccgcccccccccaggagaagctgcagacctaccagcccgaggtggtgaaggccaaccaggccgagaacgaccccaccagacagtacgagggccccctgcaccactacagaccccagcaggagagccccagcccccagcagcagctgccccccagcagccaggccgagggcatgggccaggtgcccagaacccacagactgatcaccctggccgaccacatctgccagatcatcacccaggacttcgccagaaaccaggtgagcagccagaccccccagcagccccccaccagcaccttccagaacagccccagcgccctggtgagcacccccgtgagaaccaagaccagcaacagatacagccccgagagccaggcccagagcgtgcaccaccagagacccggcagcagagtgagccccgagaacctggtggacaagagcagaggcagcagacccggcaagagccccgagagaagccacgtgagcagcgagccctacgagcccatcagccccccccaggtgcccgtggtgcacgagaagcaggacagcctgctgctgctgagccagagaggcgccgagcccgccgagcagagaaacgacgccagaagccccggcagcatcagctacctgcccagcttcttcaccaagctggagaacaccagccccatggtgaagagcaagaagcaggagatcttcagaaagctgaacagcagcggcggcggcgacagcgacatggccgccgcccagcccggcaccgagatcttcaacctgcccgccgtgaccaccagcggcagcgtgagcagcagaggccacagcttcgccgaccccgccagcaacctgggcctggaggacatcatcagaaaggccctgatgggcagcttcgacgacaaggtggaggaccacggcgtggtgatgagccagcccatgggcgtggtgcccggcaccgccaacaccagcgtggtgaccagcggcgagaccagaagagaggagggcgaccccagcccccacagcggcggcgtgtgcaagcccaagctgatcagcaagagcaacagcagaaagagcaagagccccatccccggccagggctacctgggcaccgagagacccagcagcgtgagcagcgtgcacagcgagggcgactaccacagacagacccccggctgggcctgggaggacagacccagcagcaccggcagcacccagttcccctacaaccccctgaccatgagaatgctgagcagcaccccccccacccccatcgcctgcgcccccagcgccgtgaaccaggccgccccccaccagcagaacagaatctgggagagagagcccgcccccctgctgagcgcccagtacgagaccctgagcgacagcgacgactag

SEQ ID NO: 11447 - DNA, 3075 bp, synthetic construct
  source 1..3075: mol_type = other DNA; note = Synthetic coding sequence
atgccccccctggagatcgtgcccgagaacatcaaggtggtggagagaggcaagtacgaggacgtgaaggccggcgagaccgtgagaagcagacacaccagcgtggtgagcagcggccccagcgtgctgagaagcaccctgcacgaggcccccaaggcccagctgagccccggcatctacgacgacaccagcgccagaagaacccccgtgagctaccagaacaccatgagcagaggcagccccatgatgaacagaaccagcgacgtgaccatcagcagcaacaagagcaccaaccacgagagaaagagcaccctgacccccacccagagagagagcatccccgccaagagccccgtgcccggcgtggaccccgtggtgagccacagccccttcgacccccaccacagaggcagcaccgccggcgaggtgtacagaagccacctgcccacccacctggaccccgccatgcccttccacagagccctggaccccgccgccgccgcctacctgttccagagacagctgagccccacccccggctaccccagccagtaccagctgtacgccatggagaacaccagacagaccatcctgaacgactacatcaccagccagcagatgcaggtgaacctgagacccgacgtggccagaggcctgagccccagagagcagcccctgggcctgccctaccccgccaccagaggcatcatcgacctgaccaacatgccccccaccatcctggtgccccaccccggcggcaccagcaccccccccatggacagaatcacctacatccccggcacccagatcaccttcccccccagaccctacaacagcgccagcatgagccccggccaccccacccacctggccgccgccgccagcgccgagagagagagagagagagagagagagaaggagagagagagagagagaatcgccgccgccagcagcgacctgtacctgagacccggcagcgagcagcccggcagacccggcagccacggctacgtgagaagccccagccccagcgtgagaacccaggagaccatgctgcagcagagacccagcgtgttccagggcaccaacggcaccagcgtgatcacccccctggaccccaccgcccagctgagaatcatgcccctgcccgccggcggccccagcatcagccagggcctgcccgccagcagatacaacaccgccgccgacgccctggccgccctggtggacgccgccgccagcgccccccagatggacgtgagcaagaccaaggagagcaagcacgaggccgccagactggaggagaacctgagaagcagaagcgccgccgtgagcgagcagcagcagctggagcagaagaccctggaggtggagaagagaagcgtgcagtgcctgtacaccagcagcgccttccccagcggcaagccccagccccacagcagcgtggtgtacagcgaggccggcaaggacaagggccccccccccaagagcagatacgaggaggagctgagaaccagaggcaagaccaccatcaccgccgccaacttcatcgacgtgatcatcaccagacagatcgccagcgacaaggacgccagagagagaggcagccagagcagcgacagcagcagcagcctgagcagccacagatacgagacccccagcgacgccatcgaggtgatcagccccgccagcagccccgcccccccccaggagaagctgcagacctaccagcccgaggtggtgaaggccaaccaggccgagaacgaccccaccagacagtacgagggccccctgcaccactacagaccccagcaggagagccccagcccccagcagcagctgccccccagcagccaggccgagggcatgggccaggtgcccagaacccacagactgatcaccctggccgaccacatctgccagatcatcacccaggacttcgccagaaaccaggtgagcagccagaccccccagcagccccccaccagcaccttccagaacagccccagcgccctggtgagcacccccgtgagaaccaagaccagcaacagatacagccccgagagccaggcccagagcgtgcaccaccagagacccggcagcagagtgagccccgagaacctggtggacaagagcagaggcagcagacccggcaagagccccgagagaagccacgtgagcagcgagccctacgagcccatcagccccccccaggtgcccgtggtgcacgagaagcaggacagcctgctgctgctgagccagagaggcgccgagcccgccgagcagagaaacgacgccagaagccccggcagcatcagctacctgcccagcttcttcaccaagctggagaacaccagccccatggtgaagagcaagaagcaggagatcttcagaaagctgaacagcagcggcggcggcgacagcgacatggccgccgcccagcccggcaccgagatcttcaacctgcccgccgtgaccaccagcggcagcgtgagcagcagaggccacagcttcgccgaccccgccagcaacctgggcctggaggacatcatcagaaaggccctgatgggcagcttcgacgacaaggtggaggaccacggcgtggtgatgagccagcccatgggcgtggtgcccggcaccgccaacaccagcgtggtgaccagcggcgagaccagaagagaggagggcgaccccagcccccacagcggcggcgtgtgcaagcccaagctgatcagcaagagcaacagcagaaagagcaagagccccatccccggccagggctacctgggcaccgagagacccagcagcgtgagcagcgtgcacagcgagggcgactaccacagacagacccccggctgggcctgggaggacagacccagcagcaccggcagcacccagttcccctacaaccccctgaccatgagaatgctgagcagcaccccccccacccccatcgcctgcgcccccagcgccgtgaaccaggccgccccccaccagcagaacagaatctgggagagagagcccgcccccctgctgagcgcccagtacgagaccctgagcgacagcgacgactag

SEQ ID NO: 11448 - DNA, 4821 bp, synthetic construct
  source 1..4821: mol_type = other DNA; note = Synthetic coding sequence
atgctgctgcacctgtgcagcgtgaagaacctgtaccagaacagattcctgggcctggccgccatggccagccccagcagaaacagccagagcagaagaagatgcaaggagcccctgagatacagctacaaccccgaccagttccacaacatggacctgagaggcggcccccacgacggcgtgaccatccccagaagcaccagcgacaccgacctggtgaccagcgacagcagaagcaccctgatggtgagcagcagctactacagcatcggccacagccaggacctggtgatccactgggacatcaaggaggaggtggacgccggcgactggatcggcatgtacctgatcgacgaggtgctgagcgagaacttcctggactacaagaacagaggcgtgaacggcagccacagaggccagatcatctggaagatcgacgccagcagctacttcgtggagcccgagaccaagatctgcttcaagtactaccacggcgtgagcggcgccctgagagccaccacccccagcgtgaccgtgaagaacagcgccgcccccatcttcaagagcatcggcgccgacgagaccgtgcagggccagggcagcagaagactgatcagcttcagcctgagcgacttccaggccatgggcctgaagaagggcatgttcttcaaccccgacccctacctgaagatcagcatccagcccggcaagcacagcatcttccccgccctgccccaccacggccaggagagaagaagcaagatcatcggcaacaccgtgaaccccatctggcaggccgagcagttcagcttcgtgagcctgcccaccgacgtgctggagatcgaggtgaaggacaagttcgccaagagcagacccatcatcaagagattcctgggcaagctgagcatgcccgtgcagagactgctggagagacacgccatcggcgacagagtggtgagctacaccctgggcagaagactgcccaccgaccacgtgagcggccagctgcagttcagattcgagatcaccagcagcatccaccccgacgacgaggagatcagcctgagcaccgagcccgagagcgcccagatccaggacagccccatgaacaacctgatggagagcggcagcggcgagcccagaagcgaggcccccgagagcagcgagagctggaagcccgagcagctgggcgagggcagcgtgcccgacggccccggcaaccagagcatcgagctgagcagacccgccgaggaggccgccgtgatcaccgaggccggcgaccagggcatggtgagcgtgggccccgagggcgccggcgagctgctggcccaggtgcagaaggacatccagcccgcccccagcgccgaggagctggccgagcagctggacctgggcgaggaggccagcgccctgctgctggaggacggcgaggcccccgccagcaccaaggaggagcccctggaggaggaggccaccacccagagcagagccggcagagaggaggaggagaaggagcaggaggaggagggcgacgtgagcaccctggagcagggcgagggcagactgcagctgagagccagcgtgaagagaaagagcagaccctgcagcctgcccgtgagcgagctggagaccgtgatcgccagcgcctgcggcgaccccgagacccccagaacccactacatcagaatccacaccctgctgcacagcatgcccagcgcccagggcggcagcgccgccgaggaggaggacggcgccgaggaggagagcaccctgaaggacagcagcgagaaggacggcctgagcgaggtggacaccgtggccgccgaccccagcgccctggaggaggacagagaggagcccgagggcgccacccccggcaccgcccaccccggccacagcggcggccacttccccagcctggccaacggcgccgcccaggacggcgacacccaccccagcaccggcagcgagagcgacagcagccccagacagggcggcgaccacagctgcgagggctgcgacgccagctgctgcagccccagctgctacagcagcagctgctacagcaccagctgctacagcagcagctgctacagcgccagctgctacagccccagctgctacaacggcaacagattcgccagccacaccagattcagcagcgtggacagcgccaagatcagcgagagcaccgtgttcagcagccaggacgacgaggaggaggagaacagcgccttcgagagcgtgcccgacagcatgcagagccccgagctggaccccgagagcaccaacggcgccggcccctggcaggacgagctggccgcccccagcggccacgtggagagaagccccgagggcctggagagccccgtggccggccccagcaacagaagagagggcgagtgccccatcctgcacaacagccagcccgtgagccagctgcccagcctgagacccgagcaccaccactaccccaccatcgacgagcccctgccccccaactgggaggccagaatcgacagccacggcagagtgttctacgtggaccacgtgaacagaaccaccacctggcagagacccaccgccgccgccacccccgacggcatgagaagaagcggcagcatccagcagatggagcagctgaacagaagataccagaacatccagagaaccatcgccaccgagagaagcgaggaggacagcggcagccagagctgcgagcaggcccccgccggcggcggcggcggcggcggcagcgacagcgaggccgagagcagccagagcagcctggacctgagaagagagggcagcctgagccccgtgaacagccagaagatcaccctgctgctgcagagccccgccgtgaagttcatcaccaaccccgagttcttcaccgtgctgcacgccaactacagcgcctacagagtgttcaccagcagcacctgcctgaagcacatgatcctgaaggtgagaagagacgccagaaacttcgagagataccagcacaacagagacctggtgaacttcatcaacatgttcgccgacaccagactggagctgcccagaggctgggagatcaagaccgaccagcagggcaagagcttcttcgtggaccacaacagcagagccaccaccttcatcgaccccagaatccccctgcagaacggcagactgcccaaccacctgacccacagacagcacctgcagagactgagaagctacagcgccggcgaggccagcgaggtgagcagaaacagaggcgccagcctgctggccagacccggccacagcctggtggccgccatcagaagccagcaccagcacgagagcctgcccctggcctacaacgacaagatcgtggccttcctgagacagcccaacatcttcgagatgctgcaggagagacagcccagcctggccagaaaccacaccctgagagagaagatccactacatcagaaccgagggcaaccacggcctggagaagctgagctgcgacgccgacctggtgatcctgctgagcctgttcgaggaggagatcatgagctacgtgcccctgcaggccgccttccaccccggctacagcttcagccccagatgcagcccctgcagcagcccccagaacagccccggcctgcagagagccagcgccagagcccccagcccctacagaagagacttcgaggccaagctgagaaacttctacagaaagctggaggccaagggcttcggccagggccccggcaagatcaagctgatcatcagaagagaccacctgctggagggcaccttcaaccaggtgatggcctacagcagaaaggagctgcagagaaacaagctgtacgtgaccttcgtgggcgaggagggcctggactacagcggccccagcagagagttcttcttcctgctgagccaggagctgttcaacccctactacggcctgttcgagtacagcgccaacgacacctacaccgtgcagatcagccccatgagcgccttcgtggagaaccacctggagtggttcagattcagcggcagaatcctgggcctggccctgatccaccagtacctgctggacgccttcttcaccagacccttctacaaggccctgctgagactgccctgcgacctgagcgacctggagtacctggacgaggagttccaccagagcctgcagtggatgaaggacaacaacatcaccgacatcctggacctgaccttcaccgtgaacgaggaggtgttcggccaggtgaccgagagagagctgaagagcggcggcgccaacacccaggtgaccgagaagaacaagaaggagtacatcgagagaatggtgaagtggagagtggagagaggcgtggtgcagcagaccgaggccctggtgagaggcttctacgaggtggtggacagcagactggtgagcgtgttcgacgccagagagctggagctggtgatcgccggcaccgccgagatcgacctgaacgactggagaaacaacaccgagtacagaggcggctaccacgacggccacctggtgatcagatggttctgggccgccgtggagagattcaacaacgagcagagactgagactgctgcagttcgtgaccggcaccagcagcgtgccctacgagggcttcgccgccctgagaggcagcaacggcctgagaagattctgcatcgagaagtggggcaagatcaccagcctgcccagagcccacacctgcttcaacagactggacctgcccccctaccccagctacagcatgctgtacgagaagctgctgaccgccgtggaggagaccagcaccttcggcctggagtag

SEQ ID NO: 11449 - DNA, 1209 bp, synthetic construct
  source 1..1209: mol_type = other DNA; note = Synthetic coding sequence
atggccgccctgtgcagaaccgccgagagccaggccgagctgcagtgcacccagctggacctggagagaaagctgaagctgaacgagaacgccatcagcagactgcaggccaaccagaagagcgtgctggtgagcgtgagcgaggtgaaggccgtggccgagatgcagttcggcgagctgctggccgccgtgagaaaggcccaggccaacgtgatgctgttcctggaggagaaggagcaggccgccctgagccaggccaacggcatcaaggcccacctggagtacagaagcgccgagatggagaagagcaagcaggagctggagaccatggccgccatcagcaacaccgtgcagttcctggaggagtactgcaagttcaagaacaccgaggacatcaccttccccagcgtgtacatcggcctgaaggacaagctgagcggcatcagaaaggtgatcaccgagagcaccgtgcacctgatccagctgctggagaactacaagaagaagctgcaggagttcagcaaggaggaggagtacgacatcagaacccaggtgagcgccatcgtgcagagaaagtactggaccagcaagcccgagcccagcaccagagagcagttcctgcagtacgtgcacgacatcaccttcgaccccgacaccgcccacaagtacctgagactgcaggaggagaacagaaaggtgaccaacaccaccccctgggagcacccctaccccgacctgcccagcagattcctgcactggagacaggtgctgagccagcagagcctgtacctgcacagatactacttcgaggtggagatcttcggcgccggcacctacgtgggcctgacctgcaagggcatcgaccagaagggcgaggagagaagcagctgcatcagcggcaacaacttcagctggagcctgcagtggaacggcaaggagttcaccgcctggtacagcgacatggagacccccctgaaggccggccccttctggagactgggcgtgtacatcgacttccccggcggcatcctgagcttctacggcgtggagtacgacagcatgaccctggtgcacaagttcgcctgcaagttcagcgagcccgtgtacgccgccttctggctgagcaagaaggagaacgccatcagaatcgtggacctgggcgaggagcccgagaagcccgcccccagcctggtgggcaccgccccctag

SEQ ID NO: 11450 - DNA, 1677 bp, synthetic construct
  source 1..1677: mol_type = other DNA; note = Synthetic coding sequence
atgcacagaagcgcccccagccagaccaccaagagaagcagaagccccttcagcaccaccagaagaagctgggacgacagcgagagcagcggcaccaacctgaacatcgacaacgaggactacagcagatacccccccagagagtacagagccagcggcagcagaagaggcatggcctacggccacatcgacagctacggcgccgacgacagcgaggaggagggcgccggccccgtggagagaccccccgtgagaggcaagaccggcaagttcaaggacgacaagctgctggaccccgtgcccgccgccagatgcagcgccagcagagccgacttcctgccccagagcagcgtggccagccagagcagcagcgagggcaagctggccaccaagggcgacagcagcgagagagagagaagagagcagaacctgcccgccagacccagcagagcccccgtgagcatctgcggcggcggcgagaacaccagcaagagcgccgaggagcccgtggtgagacccaagatcagaaacctggccagccccaactgcgtgaagcccaagatcttcttcgacaccgacgacgacgacgacatgccccacagcaccagcagatggagagacaccgccaacgacaacgagggccacagcgacggcctggccagaagaggcagaggcgagagcagcagcggctaccccgagcccaagtaccccgaggacaagagagaggccagaagcgaccaggtgaagcccgagaaggtgcccagaagaagaagaaccatggccgaccccgacttctggacccacagcgacgactactacaagtactgcgacgaggacagcgacagcgacaaggagtggatcgccgccctgagaagaaagtacagaagcagagagcagaccctgagcagcagcggcgagagctgggagaccctgcccggcaaggaggagagagagcccccccaggccaaggtgagcgccagcaccggcaccagccccggccccggcgccagcgccagcgccggcgccggcgccggcgccagcgccggcagcaacggcagcaactacctggaggaggtgagagagcccagcctgcaggaggagcaggccagcctggaggagggcgagatcccctggctgcagtaccacgagaacgacagcagcagcgagggcgacaacgacagcggccacgagctgatgcagcccggcgtgttcatgctggacggcaacaacaacctggaggacgacagcagcgtgagcgaggacctggaggtggactggagcctgttcgacggcttcgccgacggcctgggcgtggccgaggccatcagctacgtggacccccagttcctgacctacatggccctggaggagagactggcccaggccatggagaccgccctggcccacctggagagcctggccgtggacgtggaggtggccaacccccccgccagcaaggagagcatcgacgccctgcccgagatcctggtgaccgaggaccacggcgccgtgggccaggagatgtgctgccccatctgctgcagcgagtacgtgaagggcgaggtggccaccgagctgccctgccaccactacttccacaagccctgcgtgagcatctggctgcagaagagcggcacctgccccgtgtgcagatgcatgttccccccccccctgtag

SEQ ID NO: 11451 - DNA, 3591 bp, synthetic construct
  source 1..3591: mol_type = other DNA; note = Synthetic coding sequence
gtgcccccctgccccgccgagctgagaagcgtgaccaacggccagagcaaccagcccagcaacgagggcgacgccatcaaggtgttcgtgagaatcagaccccccgccgagagaagcggcagcgccgacggcgagcagaacctgtgcctgagcgtgctgagcagcaccagcctgagactgcacagcaaccccgagcccaagaccttcaccttcgaccacgtggccgacgtggacaccacccaggagagcgtgttcgccaccgtggccaagagcatcgtggagagctgcatgagcggctacaacggcaccatcttcgcctacggccagaccggcagcggcaagaccttcaccatgatgggccccagcgagagcgacaacttcagccacaacctgagaggcgtgatccccagaagcttcgagtacctgttcagcctgatcgacagagagaaggagaaggccggcgccggcaagagcttcctgtgcaagtgcagcttcatcgagatctacaacgagcagatctacgacctgctggacagcgccagcgccggcctgtacctgagagagcacatcaagaagggcgtgttcgtggtgggcgccgtggagcaggtggtgaccagcgccgccgaggcctaccaggtgctgagcggcggctggagaaacagaagagtggccagcaccagcatgaacagagagagcagcagaagccacgccgtgttcaccatcaccatcgagagcatggagaagagcaacgagatcgtgaacatcagaaccagcctgctgaacctggtggacctggccggcagcgagagacagaaggacacccacgccgagggcatgagactgaaggaggccggcaacatcaacagaagcctgagctgcctgggccaggtgatcaccgccctggtggacgtgggcaacggcaagcagagacacgtgtgctacagagacagcaagctgaccttcctgctgagagacagcctgggcggcaacgccaagaccgccatcatcgccaacgtgcaccccggcagcagatgcttcggcgagaccctgagcaccctgaacttcgcccagagagccaagctgatcaagaacaaggccgtggtgaacgaggacacccagggcaacgtgagccagctgcaggccgaggtgaagagactgaaggagcagctggccgagctggccagcggccagaccccccccgagagcttcctgaccagagacaagaagaagaccaactacatggagtacttccaggaggccatgctgttcttcaagaagagcgagcaggagaagaagagcctgatcgagaaggtgacccagctggaggacctgaccctgaagaaggagaagttcatccagagcaacaagatgatcgtgaagttcagagaggaccagatcatcagactggagaagctgcacaaggagagcagaggcggcttcctgcccgaggagcaggacagactgctgagcgagctgagaaacgagatccagaccctgagagagcagatcgagcaccaccccagagtggccaagtacgccatggagaaccacagcctgagagaggagaacagaagactgagactgctggagcccgtgaagagagcccaggagatggacgcccagaccatcgccaagctggagaaggccttcagcgagatcagcggcatggagaagagcgacaagaaccagcagggcttcagccccaaggcccagaaggagccctgcctgttcgccaacaccgagaagctgaaggcccagctgctgcagatccagaccgagctgaacaacagcaagcaggagtacgaggagttcaaggagctgaccagaaagagacagctggagctggagagcgagctgcagagcctgcagaaggccaacctgaacctggagaacctgctggaggccaccaaggcctgcaagagacaggaggtgagccagctgaacaagatccacgccgagaccctgaagatcatcaccacccccaccaaggcctaccagctgcacagcagacccgtgcccaagctgagccccgagatgggcagcttcggcagcctgtacacccagaacagcagcatcctggacaacgacatcctgaacgagcccgtgccccccgagatgaacgagcaggccttcgaggccatcagcgaggagctgagaaccgtgcaggagcagatgagcgccctgcaggccaagctggacgaggaggagcacaagaacctgaagctgcagcagcacgtggacaagctggagcaccacagcacccagatgcaggagctgttcagcagcgagagaatcgactggaccaagcagcaggaggagctgctgagccagctgaacgtgctggagaagcagctgcaggagacccagaccaagaacgacttcctgaagagcgaggtgcacgacctgagagtggtgctgcacagcgccgacaaggagctgagcagcgtgaagctggagtacagcagcttcaagaccaaccaggagaaggagttcaacaagctgagcgagagacacatgcacgtgcagctgcagctggacaacctgagactggagaacgagaagctgctggagagcaaggcctgcctgcaggacagctacgacaacctgcaggagatcatgaagttcgagatcgaccagctgagcagaaacctgcagaacttcaagaaggagaacgagaccctgaagagcgacctgaacaacctgatggagctgctggaggccgagaaggagagaaacaacaagctgagcctgcagttcgaggaggacaaggagaacagcagcaaggagatcctgaaggtgctggaggccgtgagacaggagaagcagaaggagaccgccaagtgcgagcagcagatggccaaggtgcagaagctggaggagagcctgctggccaccgagaaggtgatcagcagcctggagaagagcagagacagcgacaagaaggtggtggccgacctgatgaaccagatccaggagctgagaaccagcgtgtgcgagaagaccgagaccatcgacaccctgaagcaggagctgaaggacatcaactgcaagtacaacagcgccctggtggacagagaggagagcagagtgctgatcaagaagcaggaggtggacatcctggacctgaaggagaccctgagactgagaatcctgagcgaggacatcgagagagacatgctgtgcgaggacctggcccacgccaccgagcagctgaacatgctgaccgaggccagcaagaagcacagcggcctgctgcagagcgcccagagaaccgaccaggagggcagccccgacagcggcaccagcgcccaggccaagcccaaggagagaggcagcagaaccgaggaggagtacaacttcaagatgagacagctggagcacgtgatggacagcgccgccgaggacccccagagccccaagacccccccccacttccagacccacctggccaagctgctggagacccaggagcaggagatcgaggacggcagagccagcaagaccagcctggagcacctggtgaccaagctgaacgaggacagagaggtgaagaacgccgagatcctgagaatgaaggagcagctgagatag

SEQ ID NO: 11452 - DNA, 3264 bp, synthetic construct
  source 1..3264: mol_type = other DNA; note = Synthetic coding sequence
atggaccccttcaccgagaagctgctggagagaaccagagccagaagagagaacctgcagagaaagatggccgagagacccaccgccgcccccagaagcatgacccacgccaagagagccagacagcccctgagcgaggccagcaaccagcagcccctgagcggcggcgaggagaagagctgcaccaagcccagccccagcaagaagagatgcagcgacaacaccgaggtggaggtgagcaacctggagaacaagcagcccgtggagagcaccagcgccaagagctgcagccccagccccgtgagcccccaggtgcagccccaggccgccgacaccatcagcgacagcgtggccgtgcccgccagcctgctgggcatgagaagaggcctgaacagcagactggaggccaccgccgccagcagcgtgaagaccagaatgcagaagctggccgagcagagaagaagatgggacaacgacgacatgaccgacgacatccccgagagcagcctgttcagccccatgcccagcgaggagaaggccgccagcccccccagacccctgctgagcaacgccagcgccacccccgtgggcagaagaggcagactggccaacctggccgccaccatctgcagctgggaggacgacgtgaaccacagcttcgccaagcagaacagcgtgcaggagcagcccggcaccgcctgcctgagcaagttcagcagcgccagcggcgccagcgccagaatcaacagcagcagcgtgaagcaggaggccaccttctgcagccagagagacggcgacgccagcctgaacaaggccctgagcagcagcgccgacgacgccagcctggtgaacgccagcatcagcagcagcgtgaaggccaccagccccgtgaagagcaccaccagcatcaccgacgccaagagctgcgagggccagaaccccgagctgctgcccaagacccccatcagccccctgaagaccggcgtgagcaagcccatcgtgaagagcaccctgagccagaccgtgcccagcaagggcgagctgagcagagagatctgcctgcagagccagagcaaggacaagagcaccacccccggcggcaccggcatcaagcccttcctggagagattcggcgagagatgccaggagcacagcaaggagagccccgccagaagcaccccccacagaacccccatcatcacccccaacaccaaggccatccaggagagactgttcaagcaggacaccagcagcagcaccacccacctggcccagcagctgaagcaggagagacagaaggagctggcctgcctgagaggcagattcgacaagggcaacatctggagcgccgagaagggcggcaacagcaagagcaagcagctggagaccaagcaggagacccactgccagagcacccccctgaagaagcaccagggcgtgagcaagacccagagcctgcccgtgaccgagaaggtgaccgagaaccagatccccgccaagaacagcagcaccgagcccaaggaggtgatcagagagatcgagatgagcgtggacgacgacgacatcaacagcagcaaggtgatcaacgacctgttcagcgacgtgctggaggagggcgagctggacatggagaagagccaggaggagatggaccaggccctggccgagagcagcgaggagcaggaggacgccctgaacatcagcagcatgagcctgctggcccccctggcccagaccgtgggcgtggtgagccccgagagcctggtgagcacccccagactggagctgaaggacaccagcagaagcgacgagagccccaagcccggcaagttccagagaaccagagtgcccagagccgagagcggcgacagcctgggcagcgaggacagagacctgctgtacagcatcgacgcctacagaagccagagattcaaggagaccgagagacccagcatcaagcaggtgatcgtgagaaaggaggacgtgaccagcaagctggacgagaagaacaacgccttcccctgccaggtgaacatcaagcagaagatgcaggagctgaacaacgagatcaacatgcagcagaccgtgatctaccaggccagccaggccctgaactgctgcgtggacgaggagcacggcaagggcagcctggaggaggccgaggccgagagactgctgctgatcgccaccggcaagagaaccctgctgatcgacgagctgaacaagctgaagaacgagggcccccagagaaagaacaaggccagcccccagagcgagttcatgcccagcaagggcagcgtgaccctgagcgagatcagactgcccctgaaggccgacttcgtgtgcagcaccgtgcagaagcccgacgccgccaactactactacctgatcatcctgaaggccggcgccgagaacatggtggccacccccctggccagcaccagcaacagcctgaacggcgacgccctgaccttcaccaccaccttcaccctgcaggacgtgagcaacgacttcgagatcaacatcgaggtgtacagcctggtgcagaagaaggaccccagcggcctggacaagaagaagaagaccagcaagagcaaggccatcacccccaagagactgctgaccagcatcaccaccaagagcaacatccacagcagcgtgatggccagccccggcggcctgagcgccgtgagaaccagcaacttcgccctggtgggcagctacaccctgagcctgagcagcgtgggcaacaccaagttcgtgctggacaaggtgcccttcctgagcagcctggagggccacatctacctgaagatcaagtgccaggtgaacagcagcgtggaggagagaggcttcctgaccatcttcgaggacgtgagcggcttcggcgcctggcacagaagatggtgcgtgctgagcggcaactgcatcagctactggacctaccccgacgacgagaagagaaagaaccccatcggcagaatcaacctggccaactgcaccagcagacagatcgagcccgccaacagagagttctgcgccagaagaaacaccttcgagctgatcaccgtgagaccccagagagaggacgacagagagaccctggtgagccagtgcagagacaccctgtgcgtgaccaagaactggctgagcgccgacaccaaggaggagagagacctgtggatgcagaagctgaaccaggtgctggtggacatcagactgtggcagcccgacgcctgctacaagcccatcggcaagccctag

SEQ ID NO: 11453 - DNA, 648 bp, synthetic construct; identical to SEQ ID NO: 10193
  source 1..648: mol_type = other DNA; note = Synthetic coding sequence

SEQ ID NO: 11454 - DNA, 2976 bp, synthetic construct
  source 1..2976: mol_type = other DNA; note = Synthetic coding sequence
atggaggagtacgagaagttctgcgagaagagcctggccagaatccaggaggccagcctgagcaccgagagcttcctgcccgcccagagcgagagcatcagcctgatcagattccacggcgtggccatcctgagccccctgctgaacatcgagaagagaaaggagatgcagcaggagaagcagaaggccctggacgtggaggccagaaagcaggtgaacagaaagaaggccctgctgaccagagtgcaggagatcctggacaacgtgcaggtgagaaaggcccccaacgccagcgacttcgaccagtgggagatggagaccgtgtacagcaacagcgaggtgagaaacctgaacgtgcccgccaccttccccaacagcttccccagccacaccgagcacagcaccgccgccaagctggacaagatcgccggcatcctgcccctggacaacgaggaccagtgcaagaccgacggcatcgacctggccagagacagcgagggcttcaacagccccaagcagtgcgacagcagcaacatcagccacgtggagaacgaggccttccccaagaccagcagcgccaccccccaggagaccctgatcagcgacggccccttcagcgtgaacgagcagcaggacctgcccctgctggccgaggtgatccccgacccctacgtgatgagcctgcagaacctgatgaagaagagcaaggagtacatcgagagagagcagagcagaagaagcctgagaggcagcatcaacagaatcgtgaacgagagccacctggacaaggagcacgacgccgtggaggtggccgactgcgtgaaggagaagggccagctgaccggcaagcactgcgtgagcgtgatccccgacaagcccagcctgaacaagagcaacgtgctgctgcagggcgccagcacccaggccagcagcatgagcatgcccgtgctggccagcttcagcaaggtggacatccccatcagaaccggccaccccaccgtgctggagagcaacagcgacttcaaggtgatccccaccttcgtgaccgagaacaacgtgatcaagagcctgaccggcagctacgccaagctgcccagccccgagcccagcatgagccccaagatgcacagaagaagaagcagaaccagcagcgcctgccacatcctgatcaacaaccccatcaacgcctgcgagctgagccccaagggcaaggagcaggccatggacctgatcatccaggacaccgacgagaacaccaacgtgcccgagatcatgcccaagctgcccaccgacctggccggcgtgtgcagcagcaaggtgtacgtgggcaagaacaccagcgaggtgaaggaggacgtggtgctgggcaagagcaaccaggtgtgccagagcagcggcaaccacctggagaacaaggtgacccacggcctggtgaccgtggagggccagctgaccagcgacgagagaggcgcccacatcatgaacagcacctgcgccgccatgcccaagctgcacgagccctacgccagcagccagtgcatcgccagccccaacttcggcaccgtgagcggcctgaagcccgccagcatgctggagaagaactgcagcctgcagaccgagctgaacaagagctacgacgtgaagaaccccagccccctgctgatgcagaaccagaacaccagacagcagatggacacccccatggtgagctgcggcaacgagcagttcctggacaacagcttcgagaaggtgaagagaagactggacctggacatcgacggcctgcagaaggagaactgcccctacgtgatcaccagcggcatcaccgagcaggagagacagcacctgcccgagaagagataccccaagggcagcggcttcgtgaacaagaacaagatgctgggcaccagcagcaaggagagcgaggagctgctgaagagcaagatgctggccttcgaggagatgagaaagagactggaggagcagcacgcccagcagctgagcctgctgatcgccgagcaggagagagagcaggagagactgcagaaggagatcgaggagcaggagaagatgctgaaggagaagaaggccatgaccgccgaggccagcgagctggacatcaacaacgccgtggagctggagtggagaaagatcagcgacagcagcctgctggagaccatgctgagccaggccgacagcctgcacaccagcaacagcaacagcagcggcttcaccaacagcgccatgcagtacagcttcgtgagcgccaacgaggcccccttctacctgtggggcagcagcaccagcggcctgaccaagctgagcgtgaccagacccttcggcagagccaagaccagatggagccaggtgttcagcctggagatccaggccaagttcaacaagatcaccgccgtggccaagggcttcctgaccagaagactgatgcagaccgacaagctgaagcagctgagacagaccgtgaaggacaccatggagttcatcagaagcttccagagcgaggcccccctgaagagaggcatcgtgagcgcccaggacgccagcctgcaggagagagtgctggcccagctgagagccgccctgtacggcatccacgacatcttcttcgtgatggacgccgccgagagaatgagcatcctgcaccacgacagagaggtgagaaaggagaagatgctgagacagatggacaagatgaagagccccagagtggccctgagcgccgccacccagaagagcctggacagaaagaagtacatgaaggccgccgagatgggcatgcccaacaagaagttcctggtgaagcagaaccccagcgagaccagagtgctgcagcccaaccagggccagaacgcccccgtgcacagactgctgagcagacagggcagcatctgcagaaagaaccccaagaaggccgccaagtgctgcgacaacctgagaagacagcacagcctgggctag

SEQ ID NO: 11455 - DNA, 2976 bp, synthetic construct; identical to SEQ ID NO: 11454
  source 1..2976: mol_type = other DNA; note = Synthetic coding sequence

SEQ ID NO: 11456 - DNA, 999 bp, synthetic construct; identical to SEQ ID NO: 9575
  source 1..999: mol_type = other DNA; note = Synthetic coding sequence

SEQ ID NO: 11457 - DNA, 888 bp, synthetic construct; identical to SEQ ID NO: 9488
  source 1..888: mol_type = other DNA; note = Synthetic coding sequence

SEQ ID NO: 11458 - DNA, 1368 bp, synthetic construct
  source 1..1368: mol_type = other DNA; note = Synthetic coding sequence
atggagggcgtgctgtacaagtggaccaactacctgagcggctggcagcccagatggttcctgctgtgcggcggcatcctgagctactacgacagccccgaggacgcctggaagggctgcaagggcagcatccagatggccgtgtgcgagatccaggtgcacagcgtggacaacaccagaatggacctgatcatccccggcgagcagtacttctacctgaaggccagaagcgtggccgagagacagagatggctggtggccctgggcagcgccaaggcctgcctgaccgacagcagaacccagaaggagaaggagttcgccgagaacaccgagaacctgaagaccaagatgagcgagctgagactgtactgcgacctgctggtgcagcaggtggacaagaccaaggaggtgaccaccaccggcgtgagcaacagcgaggagggcatcgacgtgggcaccctgctgaagagcacctgcaacaccttcctgaagaccctggaggagtgcatgcagatcgccaacgccgccttcaccagcgagctgctgtacagaaccccccccggcagcccccagctggccatgctgaagagcagcaagatgaagcaccccatcatccccatccacaacagcctggagagacagatggagctgagcacctgcgagaacggcagcctgaacatggagatcaacggcgaggaggagatcctgatgaagaacaagaacagcctgtacctgaagagcgccgagatcgactgcagcatcagcagcgaggagaacaccgacgacaacatcaccgtgcagggcgagatcagaaaggaggacggcatggagaacctgaagaaccacgacaacaacctgacccagagcggcagcgacagcagctgcagccccgagtgcctgtgggaggagggcaaggaggtgatccccaccttcttcagcaccatgaacaccagcttcagcgacatcgagctgctggaggacagcggcatccccaccgaggccttcctggccagctgctacgccgtggtgcccgtgctggacaagctgggccccaccgtgttcgcccccgtgaagatggacctggtgggcaacatcaagaaggtgaaccagaagtacatcaccaacaaggaggagttcaccaccctgcagaagatcgtgctgcacgaggtggaggccgacgtggcccaggtgagaaacagcgccaccgaggccctgctgtggctgaagagaggcctgaagttcctgaagggcttcctgaccgaggtgaagaacggcgagaaggacatccagaccgccctgaacaacgcctacggcaagaccctgagacagcaccacggctgggtggtgagaggcgtgttcgccgtgtag

SEQ ID NO: 11459 - DNA, 1320 bp, synthetic construct
  source 1..1320: mol_type = other DNA; note = Synthetic coding sequence
atggagggcgtgctgtacaagtggaccaactacctgagcggctggcagcccagatggttcctgctgtgcggcggcatcctgagctactacgacagccccgaggacgcctggaagggctgcaagggcagcatccagatggccgtgtgcgagatccaggtgcacagcgtggacaacaccagaatggacctgatcatccccggcgagcagtacttctacctgaaggccagaagcgtggccgagagacagagatggctggtggccctgggcagcgccaaggcctgcctgaccgacagcagaacccagaaggagaaggagttcgccgagaacaccgagaacctgaagaccaagatgagcgagctgagactgtactgcgacctgctggtgcagcaggtggacaagaccaaggaggtgaccaccaccggcgtgagcaacagcgaggagggcatcgacgtgggcaccctgctgaagagcacctgcaacaccttcctgaagaccctggaggagtgcatgcagatcgccaacgccgccttcaccagcgagctgctgtacagaaccccccccggcagcccccagctggccatgctgaagagcagcaagatgaagcaccccatcatccccatccacaacagcctggagagacagatggagctgagcacctgcgagaacggcagcctgaacatggagatcaacggcgaggaggagatcctgatgaagaacaagaacagcctgtacctgaagagcgccgagatcgactgcagcatcagcagcgaggagaacaccgacgacaacatcaccgtgcagggcgagatcagaaaggaggacggcatggagaacctgaagaaccacgacaacaacctgacccagagcggcagcgacagcagctgcagccccgagtgcctgtgggaggagggcaaggaggtgatccccaccttcttcagcaccatgaacaccagcttcagcgacatcgagctgctggaggacagcggcatccccaccgaggccttcctggccagctgctacgccgtggtgcccgtgctggacaagctgggccccaccgtgttcgcccccgtgaagatggacctggtgggcaacatcaagaaggtgaaccagaagtacatcaccaacaaggaggagttcaccaccctgcagaagatcgtgctgcacgaggtggaggccgacgtggcccaggtgagaaacagcgccaccgaggccctgctgtggctgaagagaggcctgaagttcctgaagggcttcctgaccgaggtgaagaacggcgagaaggacatccagaccgccctgagcgtgggcatgtgggtgtag

SEQ ID NO: 11460 - DNA, 984 bp, synthetic construct; identical to SEQ ID NO: 9809
  source 1..984: mol_type = other DNA; note = Synthetic coding sequence

SEQ ID NO: 11461 - DNA, 5229 bp, synthetic construct
  source 1..5229: mol_type = other DNA; note = Synthetic coding sequence
atgatggagggcaacggcaccgagaacagctgcagcagaaccagaggctggctgcagcaggacaacgacgccaagccctggctgtggaagttcagcaactgcttcagcagacccgagcagaccctgccccacagcccccagaccaaggagtacatggagaacaagaaggtggccgtggagctgaaggacgtgcccagccccctgcacgccggcagcaagctgttccccgccgtgcccctgcccgacatcagaagcctgcagcagcccaagatccagctgagcagcgtgcccaaggtgagctgctgcgcccactgccccaacgagcccagcaccagccccatgagattcggcggcggcggcggcggcagcggcggcaccagcagcctgatccaccccggcgccctgctggacagccagagcaccagaaccatcacctgccaggtgggcagcggcttcgccttccagagcgccagcagcctgcagaacgccagcgccagaaacaacctggccggcatcgccagcgacttccccagcatgtgcctggagagcaacctgagcagctgcaagcacctgccctgctgcggcaagctgcacttccagagctgccacggcaacgtgcacaagctgcaccagttccccagcctgcagggctgcaccagcgccggctacttcccctgcagcgacttcaccagcggcgcccccggccacctggaggagcacatcagccagagcgagctgaccccccacctgtgcaccaacagcctgcacctgaacgtggtgccccccgtgtgcctgaagggcagcctgtactgcgaggactgcctgaacaagcccgccagaaacagcatcatcgacgccgccaaggtgtggcccaacatccccccccccaacacccagcccgcccccctggccgtgcccctgtgcaacggctgcggcaccaagggcaccggcaaggagaccaccctgctgctggccaccagcctgggcaaggccgccagcaagttcggcagccccgaggtggccgtggccggccaggtgctggagaacctgccccccatcggcgtgttctgggacatcgagaactgcagcgtgcccagcggcagaagcgccaccgccgtggtgcagagaatcagagagaagttcttcaagggccacagagaggccgagttcatctgcgtgtgcgacatcagcaaggagaacaaggaggtgatccaggagctgaacaactgccaggtgaccgtggcccacatcaacgccaccgccaagaacgccgccgacgacaagctgagacagagcctgagaagattcgccaacacccacaccgcccccgccaccgtggtgctggtgagcaccgacgtgaacttcgccctggagctgagcgacctgagacacagacacggcttccacatcatcctggtgcacaagaaccaggccagcgaggccctgctgcaccacgccaacgagctgatcagattcgaggagttcatcagcgacctgccccccagactgcccctgaagatgccccagtgccacaccctgctgtacgtgtacaacctgcccgccaacaaggacggcaagagcgtgagcaacagactgagaagactgagcgacaactgcggcggcaaggtgctgagcatcaccggctgcagcgccatcctgagattcatcaaccaggacagcgccgagagagcccagaagagaatggagaacgaggacgtgttcggcaacagaatcatcgtgagcttcacccccaagaacagagagctgtgcgagaccaagagcagcaacgccatcgccgacaaggtgaagagccccaagaagctgaagaaccccaagctgtgcctgatcaaggacgccagcgagcagagcagcagcgccaaggccacccccggcaagggcagccaggccaacagcggcagcgccaccaagaacaccaacgtgaagagcctgcaggagctgtgcagaatggagagcaagaccggccacagaaacagcgagcaccagcagggccacctgagactggtggtgcccacccacggcaacagcagcgccgccgtgagcacccccaagaacagcggcgtggccgagcccgtgtacaagaccagccagaagaaggagaacctgagcgccagaagcgtgaccagcagccccgtggagaagaaggacaaggaggagaccgtgttccaggtgagctaccccagcgccttcagcaagctggtggccagcagacaggtgagccccctgctggccagccagagctggagcagcagaagcatgagccccaacctgctgaacagagccagccccctggccttcaacatcgccaacagcagcagcgaggccgactgccccgaccccttcgccaacggcgccgacgtgcaggtgagcaacatcgactacagactgagcagaaaggagctgcagcagctgctgcaggaggccttcgccagacacggcaaggtgaagagcgtggagctgagcccccacaccgactaccagctgaaggccgtggtgcagatggagaacctgcaggacgccatcggcgccgtgaacagcctgcacagatacaagatcggcagcaagaagatcctggtgagcctggccaccggcgccgccagcaagagcctgagcctgctgagcgccgagaccatgagcgtgctgcaggacgcccccgcctgctgcctgcccctgttcaagttcaccgacatctacgagaagaagttcggccacaagctgaacgtgagcgacctgtacaagctgaccgacaccgtggccatcagagagcagggcaacggcagactggtgtgcctgctgcccagcagccaggccagacagagccccctgggcagcagccagagccacgacggcagcagcaccaactgcagccccatcatcttcgaggagctggagtaccacgagcccgtgtgcagacagcactgcagcaacaaggacttcagcgagcacgagttcgaccccgacagctacaagatccccttcgtgatcctgagcctgaagaccttcgccccccaggtgcacagcctgctgcagacccacgagggcaccgtgcccctgctgagcttccccgactgctacatcgccgagttcggcgacctggaggtggtgcaggagaaccagggcggcgtgcccctggagcacttcatcacctgcgtgcccggcgtgaacatcgccaccgcccagaacggcatcaaggtggtgaagtggatccacaacaagccccccccccccaacaccgacccctggctgctgagaagcaagagccccgtgggcaacccccagctgatccagttcagcagagaggtgatcgacctgctgaagagccagcccagctgcgtgatccccatcagccacttcatccccagctaccaccaccacttcgccaagcagtgcagagtgagcgactacggctacagcaagctgatcgagctgctggaggccgtgccccacgtgctgcagatcctgggcatgggcagcaagagactgctgaccctgacccacagagcccaggtgaagagattcacccaggacctgctgaagctgctgaagagccaggccagcaagcaggtgatcgtgagagagttcagccaggcctaccactggtgcttcagcaaggactgggacgtgaccgagtacggcgtgtgcgagctgatcgacatcgtgagcgagatccccgacaccaccatctgcctgagccagcaggacaacgagatggtgatctgcatccccaagagagagagaacccaggacgagatcgagagaaccaagcagttcagcaaggacgtggtggacctgctgagacaccagccccacttcagaatgcccttcaacaagttcatccccagctaccaccaccacttcggcagacagtgcaagctggcctactacggcttcaccaagctgctggagctgttcgaggccatccccgacaccctgcaggtgctggagtgcggcgaggagaagatcctgaccctgaccgaggtggagagattcaaggccctggccgcccagttcgtgaagctgctgagaagccagaaggacaactgcctgatgatgaccgacctgctgaccgagtacgccaagaccttcggctacaccttcagactgcaggactacgacgtgagcagcatcagcgccctgacccagaagctgtgccacgtggtgaaggtggccgacatcgagagcggcagacagatccagctgatcaacagaaagagcctgagaagcctgaccgcccagctgctggtgctgctgatgagctgggagggcaccacccacctgagcgtggaggagctgaagagacactacgagagcacccacaacacccccctgaacccctgcgagtacggcttcatgaccctgaccgagctgctgaagagcctgccctacctggtggaggtgttcaccaacgacaagatggaggagtgcgtgaagctgaccagcctgtacctgttcgccaagaacgtgagaagcctgctgcacacctaccactaccagcagatcttcctgcacgagttcagcatggcctacaccaagtacgtgggcgagaccctgcagcccaagacctacggccacagcagcgtggaggagctgctgggcgccatcccccaggtggtgtggatcaagggccacggccacaagagaatcgtggtgctgaagaacgacatgaagagcagactgagcagcctgagcctgagccccgccaaccacgagaaccagcccagcgagggcgagagaatcctggaggtgcccgagagccacaccgccagcgagctgaagctgggcgccgacggcagcggccccagccacaccgagcaggagctgctgagactgaccgacgacagccccgtggacctgctgtgcgcccccgtgcccagctgcctgcccagcccccagctgagacccgaccccgtgatcctgcagagcgccgacctgatccagttcgaggagagaccccaggagcccagcgagatcatgatcctgaaccaggaggagaagatggagatccccatccccggcaagagcaagaccctgaccagcgacagcagcagcagctgcatcagcgccgccgtgcccgtgcccccctgccccagcagcgagaccagcgagagcctgctgagcaaggaccccgtggagagccccgccaagaagcagcccaagaacagagtgaagctggccgccaacttcagcctggcccccatcaccaagctgtag

SEQ ID NO: 11462 - DNA, 831 bp, synthetic construct
  source 1..831: mol_type = other DNA; note = Synthetic coding sequence
atgtgcagcaccagcggctgcgacctggaggagatccccctggacgacgacgacctgaacaccatcgagttcaagatcctggcctactacaccagacaccacgtgttcaagagcacccccgccctgttcagccccaagctgctgagaaccagaagcctgagccagagaggcctgggcaactgcagcgccaacgagagctggaccgaggtgagctggccctgcagaaacagccagagcagcgagaaggccatcaacctgggcaagaagaagagcagctggaaggccttcttcggcgtggtggagaaggaggacagccagagcacccccgccaaggtgagcgcccagggccagagaaccctggagtaccaggacagccacagccagcagtggagcagatgcctgagcaacgtggagcagtgcctggagcacgaggccgtggaccccaaggtgatcagcatcgccaacagagtggccgagatcgtgtacagctggccccccccccaggccacccaggccggcggcttcaagagcaaggagatcttcgtgaccgagggcctgagcttccagctgcagggccacgtgcccgtggccagcagcagcaagaaggacgaggaggagcagatcctggccaagatcgtggagctgctgaagtacagcggcgaccagctggagagaaaggagaaggagtgggaggagagcgccaagaccaagatcaagatggccctgctgtggagaagcagcggcggcggccccagagtgctgagcatccccgaggccttcatgaagaacagcttcaccctgaccccccccggcttcagcgagcacaactag

SEQ ID NO: 11463 - DNA, 552 bp, synthetic construct; identical to SEQ ID NO: 10180
  source 1..552: mol_type = other DNA; note = Synthetic coding sequence

SEQ ID NO: 11464 - DNA, 960 bp, synthetic construct
  source 1..960: mol_type = other DNA; note = Synthetic coding sequence
atgctgagatgcggccagatgatcttcgcccaggccctggtgtgcagacacctgggcagagactggagatggacccagagaaagagacagcccgacagctacttcagcgtgctgaacgccttcatcgacagaaaggacagctactacagcatccaccagatcgcccagatgggcgtgggcgagggcaagagcatcggccagtggtacggccccaacaccgtggcccaggtgctgaagaagctggccgtgttcgacacctggagcagcctggccgtgcacatcgccatggacaacaccgtggtgatggaggagatcagaagactgtgcagaaccagcgtgccctgcgccggcgccaccgccttccccgccgacagcgacagacactgcaacggcttccccgccggcgccgaggtgaccaacagacccagcccctggagacccctggtgctgctgatccccctgagactgggcctgaccgacatcaacgaggcctacgtggagaccctgaagcactgcttcatgatgccccagagcctgggcgtgatcggcggcaagcccaacagcgcccactacttcatcggctacgtgggcgaggagctgatctacctggacccccacaccacccagcccgccgtggagcccaccgacggctgcttcatccccgacgagagcttccactgccagcaccccccctgcagaatgagcatcgccgagctggaccccagcatcgccgtgggcttcttctgcaagaccgaggacgacttcaacgactggtgccagcaggtgaagaagctgagcctgctgggcggcgccctgcccatgttcgagctggtggagctgcagcccagccacctggcctgccccgacgtgctgaacctgagcctggacagcagcgacgtggagagactggagagattcttcgacagcgaggacgaggacttcgagatcctgagcctgtag

SEQ ID NO: 11465 - DNA, 564 bp, synthetic construct
  source 1..564: mol_type = other DNA; note = Synthetic coding sequence
atgaacggcagagccgacttcagagagcccaacgccgaggtgcccagacccatcccccacatcggccccgactacatccccaccgaggaggagagaagagtgttcgccgagtgcaacgacgagagcttctggttcagaagcgtgcccctggccgccaccagcatgctgatcacccagggcctgatcagcaagggcatcctgagcagccaccccaagtacggcagcatccccaagctgatcctggcctgcatcatgggctacttcgccggcaagctgagctacgtgaagacctgccaggagaagttcaagaagctggagaacagccccctgggcgaggccctgagaagcggccaggccagaagaagcagcccccccggccactactaccagaagagcaagtacgacagcagcgtgagcggccagagcagcttcgtgaccagccccgccgccgacaacatcgagatgctgccccactacgagcccatccccttcagcagcagcatgaacgagagcgcccccaccggcatcaccgaccacatcgtgcagggcagaaacttcagctag

SEQ ID NO: 11466 - DNA, 270 bp, synthetic construct
  source 1..270: mol_type = other DNA; note = Synthetic coding sequence
atgagcgagcagggcgacctgaaccaggccatcgccgaggagggcggcaccgagcaggagaccgccacccccgagaacggcatcgtgaagagcgagagcctggacgaggaggagaagctggagctgcagagaagactggaggcccagaaccaggagagaagaaagagcaagagcggcgccggcaagggcaagctgaccagaagcctggccgtgtgcgaggagagcagcgccagacccggcggcgagagcctgcaggaccagaccctgtag

SEQ ID NO: 11467 - DNA, 270 bp, synthetic construct; identical to SEQ ID NO: 11466
  source 1..270: mol_type = other DNA; note = Synthetic coding sequence

SEQ ID NO: 11468 - DNA, 1473 bp, synthetic construct
  source 1..1473: mol_type = other DNA; note = Synthetic coding sequence
atggaggacagcgccagcgccagcctgagcagcgccgccgccaccggcaccagcaccagcacccccgccgcccccaccgccagaaagcagctggacaaggagcaggtgagaaaggccgtggacgccctgctgacccactgcaagagcagaaagaacaactacggcctgctgctgaacgagaacgagagcctgttcctgatggtggtgctgtggaagatccccagcaaggagctgagagtgagactgaccctgccccacagcatcagaagcgacagcgaggacatctgcctgttcaccaaggacgagcccaacagcacccccgagaagaccgagcagttctacagaaagctgctgaacaagcacggcatcaagaccgtgagccagatcatcagcctgcagaccctgaagaaggagtacaagagctacgaggccaagctgagactgctgagcagcttcgacttcttcctgaccgacgccagaatcagaagactgctgcccagcctgatcggcagacacttctaccagagaaagaaggtgcccgtgagcgtgaacctgctgagcaagaacctgagcagagagatcaacgactgcatcggcggcaccgtgctgaacatcagcaagagcggcagctgcagcgccatcagaatcggccacgtgggcatgcagatcgagcacatcatcgagaacatcgtggccgtgaccaagggcctgagcgagaagctgcccgagaagtgggagagcgtgaagctgctgttcgtgaagaccgagaagagcgccgccctgcccatcttcagcagcttcgtgagcaactgggacgaggccaccaagagaagcctgctgaacaagaagaagaaggaggccagaagaaagagaagagagagaaacttcgagaagcagaaggagagaaagaagaagagacagcaggccagaaagaccgccagcgtgctgagcaaggacgacgtggcccccgagagcggcgacaccaccgtgaagaagcccgagagcaagaaggagcagacccccgagcacggcaagaagaagagaggcagaggcaaggcccaggtgaaggccaccaacgagagcgaggacgagatcccccagctggtgcccatcggcaagaagacccccgccaacgagaaggtggagatccagaagcacgccaccggcaagaagagccccgccaagagccccaaccccagcacccccagaggcaagaagagaaaggccctgcccgccagcgagacccccaaggccgccgagagcgagacccccggcaagagccccgagaagaagcccaagatcaaggaggaggccgtgaaggagaagagccccagcctgggcaagaaggacgccagacagacccccaagaagcccgaggccaagttcttcaccacccccagcaagagcgtgagaaaggccagccacacccccaagaagtggcccaagaagcccaaggtgccccagagcacctag

SEQ ID NO: 11469 - DNA, 495 bp, synthetic construct
  source 1..495: mol_type = other DNA; note = Synthetic coding sequence
atggccgagcccgccagcgtggccgccgagagcctggccggcagcagagccagagccgccagaaccgtgctgggccaggtggtgctgcccggcgaggagctgctgctgcccgagcaggaggacgccgagggccccggcggcgccgtggagagacccctgagcctgaacgccagagcctgcagcagagtgagagtggtgtgcggccccggcctgagaagatgcggcgacagactgctggtgaccaagtgcggcagactgagacacaaggagcccggcagcggcagcggcggcggcgtgtactgggtggacagccagcagaagagatacgtgcccgtgaagggcgaccacgtgatcggcatcgtgaccgccaagagcggcgacatcttcaaggtggacgtgggcggcagcgagcccgccagcctgagctacctgagcttcgagggcgccaccaagagaaacagacccaacgtgcaggccatcagcagcagactgtag

SEQ ID NO: 11470 - DNA, 2508 bp, synthetic construct
  source 1..2508: mol_type = other DNA; note = Synthetic coding sequence
atgacctgcaacaagcacggctgcagacaggccttccacgtgacctgcgcccagttcgccggcctgctgtgcgaggaggagggcaacggcgccgacaacgtgcagtactgcggctactgcaagtaccacttcagcaagctgaagaagagcaagagaggcagcaacagaagctacgaccagagcctgagcgacagcagcagccacagccaggacaagcaccacgagaaggagaagaagaagtacaaggagaaggacaagcacaagcagaagcacaagaagcagcccgagcccagccccgccctggtgcccagcctgaccgtgaccaccgagaagacctacaccagcaccagcaacaacagcatcagcggcagcctgaagagactggaggacaccaccgccagattcaccaacgccaacttccaggaggtgagcgcccacaccagcagcggcaaggacgtgagcgagaccagaggcagcgagggcaagggcaagaagagcagcgcccacagcagcggccagagaggcagaaagcccggcggcggcagaaaccccggcaccaccgtgagcgccgccagccccttcccccagggcagcttcagcggcacccccggcagcgtgaagagcagcagcggcagcagcgtgcagagcccccaggacttcctgagcttcaccgacagcgacctgagaaacgacagctacagccacagccagcagagcagcgccaccaaggacgtgcacaagggcgagagcggcagccaggagggcggcgtgaacagcttcagcaccctgatcggcctgcccagcaccagcgccgtgaccagccagcccaagagcttcgagaacagccccggcgacctgggcaacagcagcctgcccaccgccggctacaagagagcccagaccagcggcatcgaggaggagaccgtgaaggagaagaagagaaagggcaacaagcagagcaagcacggccccggcagacccaagggcaacaagaaccaggagaacgtgagccacctgagcgtgagcagcgccagccccaccagcagcgtggccagcgccgccggcagcatcaccagcagcagcctgcagaagagccccaccctgctgagaaacggcagcctgcagagcctgagcgtgggcagcagccccgtgggcagcgagatcagcatgcagtacagacacgacggcgcctgccccaccaccagcatctacaacagcaacgacgtggccgtgagcttccccaacgtggtgagcggcagcggcagcagcacccccgtgagcagcagccacctgccccagcagagcagcggccacctgcagcaggtgggcgccctgagccccagcgccgtgagcagcgccgcccccgccgtggccaccacccaggccaacaccctgagcggcagcagcctgagccaggcccccagccacatgtacggcaacagaagcaacagcagcatggccgccctgatcgcccagagcgagaacaaccagaccgaccaggacctgggcgacaacagcagaaacctggtgggcagaggcagcagccccagaggcagcctgagccccagaagccccgtgagcagcctgcagatcagatacgaccagcccggcaacagcagcctggagaacctgccccccgtggccgccagcatcgagcagctgctggagagacagtggagcgagggccagcagttcctgctggagcagggcacccccagcgacatcctgggcatgctgaagagcctgcaccagctgcaggtggagaacagaagactggaggagcagatcaagaacctgaccgccaagaaggagagactgcagctgctgaacgcccagctgagcgtgcccttccccaccatcaccgccaaccccagccccagccaccagatccacaccttcagcgcccagaccgcccccaccaccgacagcctgaacagcagcaagagcccccacatcggcaacagcttcctgcccgacaacagcctgcccgtgctgaaccaggacctgaccagcagcggccagagcaccagcagcagcagcgccctgagcacccccccccccgccggccagagccccgcccagcagggcagcggcgtgagcggcgtgcagcaggtgaacggcgtgaccgtgggcgccctggccagcggcatgcagcccgtgaccagcaccatccccgccgtgagcgccgtgggcggcatcatcggcgccctgcccggcaaccagctggccatcaacggcatcgtgggcgccctgaacggcgtgatgcagacccccgtgaccatgagccagaaccccacccccctgacccacaccaccgtgccccccaacgccacccaccccatgcccgccaccctgaccaacagcgccagcggcctgggcctgctgagcgaccagcagagacagatcctgatccaccagcagcagttccagcagctgctgaacagccagcagctgacccccaacatggtgaaggagttcagcgcccagatcatcgcctggagaccctag

SEQ ID NO: 11471 - DNA, 1620 bp, synthetic construct; identical to SEQ ID NO: 10018
  source 1..1620: mol_type = other DNA; note = Synthetic coding sequence

SEQ ID NO: 11472 - DNA, 444 bp, synthetic construct; identical to SEQ ID NO: 9837
  source 1..444: mol_type = other DNA; note = Synthetic coding sequence

SEQ ID NO: 11473 - DNA, 951 bp, synthetic construct; identical to SEQ ID NO: 10366
  source 1..951: mol_type = other DNA; note = Synthetic coding sequence

SEQ ID NO: 11474 - DNA, 951 bp, synthetic construct; identical to SEQ ID NO: 10366
  source 1..951: mol_type = other DNA; note = Synthetic coding sequence

SEQ ID NO: 11475 - DNA, 810 bp, synthetic construct; identical to SEQ ID NO: 9299
  source 1..810: mol_type = other DNA; note = Synthetic coding sequence

SEQ ID NO: 11476 - DNA, 1173 bp, synthetic construct; identical to SEQ ID NO: 9682
  source 1..1173: mol_type = other DNA; note = Synthetic coding sequence

SEQ ID NO: 11477 - DNA, 381 bp, synthetic construct
  source 1..381: mol_type = other DNA; note = Synthetic coding sequence
atgcccttcttcggcaacaccttcagccccaagaagaccccccccagaaagagcgccagcctgagcaacctgcacagcctggacagaagcaccagagaggtggagctgggcctggagtacggcagccccaccatgaacctggccggccagagcctgaagttcgagaacggccagtggatcgccgagaccggcgtgagcggcggcgtggacagaagagaggtgcagagactgagaagaagaaaccagcagctggaggaggagaacaacctgctgagactgaaggtggacatcctgctggacatgctgagcgagagcaccgccgagagccacctgatggagaaggagctggacgagctgagaatcagcagaaagagaaagtag

SEQ ID NO: 11478 - DNA, 711 bp, synthetic construct
  source 1..711: mol_type = other DNA; note = Synthetic coding sequence
atgcaggtgcaggacgacggcgtgaacctgatccccttcgccaagtgcagcagagtggtgagcagaagccccccccccagactgcccagccagagcctgagacccatgccccagagatacggcgacgtgttctggaagaacctgaaccagagacccacccccacctggctggaggagcagcacatcccccccatgctgagagccaccggctgcagccagctgggcctgtacccccccgagcagctgcccccccccgagatgctgtggagaagaaagaagagaagaccctgcctggagggcatgcagcagcagggcctgggcggcgtgcccgccagagtgagagccgtgacctaccacctggaggacctgagaagaagacagagcatcatcaacgagctgaagaaggcccagtggggcagcagcggcgccgccagcgagcccgtggtgctgggcgaggagggctgcggcttccccagcaccaacgagtaccccgacctggaggaggagagagccacctacccccaggaggaggacagattcctgacccccggcagagcccagctgctgtggagcccctggagccccctggaccaggaggaggcctgcgccagcagacagctgcacagcctggccagcttcagcaccgtgaccgccagaagaaaccccctgcacaacccctggggcatggagctggccgccagcgaggagtag

SEQ ID NO: 11479 - DNA, 1680 bp, synthetic construct
  source 1..1680: mol_type = other DNA; note = Synthetic coding sequence
atgaaccccctgttcggccccaacctgttcctgctgcagcaggagcagcagggcctggccggccccctgggcgacagcctgggcggcgaccacttcgccggcggcggcgacctgccccccgcccccctgagccccgccggccccgccgcctacagcccccccggccccggccccgccccccccgccgccatggccctgagaaacgacctgggcagcaacatcaacgtgctgaagaccctgaacctgagattcagatgcttcctggccaaggtgcacgagctggagagaagaaacagactgctggagaagcagctgcagcaggccctggaggagggcaagcagggcagaagaggcctgggcagaagagaccaggccgtgcagaccggcttcgtgagccccatcagacccctgggcctgcagctgggcgccagacccgccgccgtgtgcagccccagcgccagagtgctgggcagccccgccagaagccccgccggccccctggcccccagcgccgccagcctgagcagcagcagcaccagcaccagcaccacctacagcagcagcgccagattcatgcccggcaccatctggagcttcagccacgccagaagactgggccccggcctggagcccaccctggtgcagggccccggcctgagctgggtgcaccccgacggcgtgggcgtgcagatcgacaccatcacccccgagatcagagccctgtacaacgtgctggccaaggtgaagagagagagagacgagtacaagagaagatgggaggaggagtacaccgtgagaatccagctgcaggacagagtgaacgagctgcaggaggaggcccaggaggccgacgcctgccaggaggagctggccctgaaggtggagcagctgaaggccgagctggtggtgttcaagggcctgatgagcaacaacctgagcgagctggacaccaagatccaggagaaggccatgaaggtggacatggacatctgcagaagaatcgacatcaccgccaagctgtgcgacgtggcccagcagagaaactgcgaggacatgatccagatgttccaggtgcccagcatgggcggcagaaagagagagagaaaggccgccgtggaggaggacaccagcctgagcgagagcgagggccccagacagcccgacggcgacgaggaggagagcaccgccctgagcatcaacgaggagatgcagagaatgctgaaccagctgagagagtacgacttcgaggacgactgcgacagcctgacctgggaggagaccgaggagaccctgctgctgtgggaggacttcagcggctacgccatggccgccgccgaggcccagggcgagcaggaggacagcctggagaaggtgatcaaggacaccgagagcctgttcaagaccagagagaaggagtaccaggagaccatcgaccagatcgagctggagctggccaccgccaagaacgacatgaacagacacctgcacgagtacatggagatgtgcagcatgaagagaggcctggacgtgcagatggagacctgcagaagactgatcacccagagcggcgacagaaagagccccgccttcaccgccgtgcccctgagcgaccccccccccccccccagcgaggccgaggacagcgacagagacgtgagcagcgacagcagcatgagatag

SEQ ID NO: 11480 - DNA, 1182 bp, synthetic construct
  source 1..1182: mol_type = other DNA; note = Synthetic coding sequence
atggccagcggcagagccagatgcaccagaaagctgagaaactgggtggtggagcaggtggagagcggccagttccccggcgtgtgctgggacgacaccgccaagaccatgttcagaatcccctggaagcacgccggcaagcaggacttcagagaggaccaggacgccgccttcttcaaggcctgggccatcttcaagggcaagtacaaggagggcgacaccggcggccccgccgtgtggaagaccagactgagatgcgccctgaacaagagcagcgagttcaaggaggtgcccgagagaggcagaatggacgtggccgagccctacaaggtgtaccagctgctgccccccggcatcgtgagcggccagcccggcacccagaaggtgcccagcaagagacagcacagcagcgtgagcagcgagagaaaggaggaggaggacgccatgcagaactgcaccctgagccccagcgtgctgcaggacagcctgaacaacgaggaggagggcgccagcggcggcgccgtgcacagcgacatcggcagcagcagcagcagcagcagccccgagccccaggaggtgaccgacaccaccgaggcccccttccagggcgaccagagaagcctggagttcctgctgccccccgagcccgactacagcctgctgctgaccttcatctacaacggcagagtggtgggcgaggcccaggtgcagagcctggactgcagactggtggccgagcccagcggcagcgagagcagcatggagcaggtgctgttccccaagcccggccccctggagcccacccagagactgctgagccagctggagagaggcatcctggtggccagcaaccccagaggcctgttcgtgcagagactgtgccccatccccatcagctggaacgccccccaggccccccccggccccggcccccacctgctgcccagcaacgagtgcgtggagctgttcagaaccgcctacttctgcagagacctggtgagatacttccagggcctgggccccccccccaagttccaggtgaccctgaacttctgggaggagagccacggcagcagccacaccccccagaacctgatcaccgtgaagatggagcaggccttcgccagatacctgctggagcagacccccgagcagcaggccgccatcctgagcctggtgtag

SEQ ID NO: 11481 - DNA, 2454 bp, synthetic construct
  source 1..2454: mol_type = other DNA; note = Synthetic coding sequence
atgtggagcctgaccgccagcgagggcgagagcaccaccgcccacttcttcctgggcgccggcgacgagggcctgggcaccagaggcatcggcatgagacccgaggagagcgacagcgagctgctggaggacgaggaggacgaggtgccccccgagccccagatcatcgtgggcatctgcgccatgaccaagaagagcaagagcaagcccatgacccagatcctggagagactgtgcagattcgactacctgaccgtggtgatcctgggcgaggacgtgatcctgaacgagcccgtggagaactggcccagctgccactgcctgatcagcttccacagcaagggcttccccctggacaaggccgtggcctacagcaagctgagaaaccccttcctgatcaacgacctggccatgcagtactacatccaggacagaagagaggtgtacagaatcctgcaggaggagggcatcgacctgcccagatacgccgtgctgaacagagaccccgccagacccgaggagtgcaacctgatcgagggcgaggaccaggtggaggtgaacggcgccgtgttccccaagcccttcgtggagaagcccgtgagcgccgaggaccacaacgtgtacatctactaccccagcagcgccggcggcggcagccagagactgttcagaaagatcggcagcagaagcagcgtgtacagccccgagagcagcgtgagaaagaccggcagctacatctacgaggagttcatgcccaccgacggcaccgacgtgaaggtgtacaccgtgggccccgactacgcccacgccgaggccagaaagagccccgccctggacggcaaggtggagagagacagcgagggcaaggagatccagtaccccgtgatgctgaccgccatggagaagctggtggccagaaaggtgtgcgtggccttcaagcagaccgtgtgcggcttcgacctgctgagagccaacggccacagcttcgtgtgcgacgtgaacggcttcagcttcgtgaagaacagcatgaagtactacgacgactgcgccaagatcctgggcaacaccatcatgagagagctggccccccagttccagatcccctggagcatccccaccgaggccgaggacatccccatcgtgcccaccaccagcggcaccatgatggagctgagatgcgtgatcgccatcatcagacacggcgacagaacccccaagcagaagatgaagatggaggtgaagcaccccagattcttcgccctgttcgagaagcacggcggctacaagaccggcaagctgaagctgaagagacccgagcagctgcaggaggtgctggacatcaccagactgctgctggccgagctggagaaggagcccggcggcgagatcgaggagaagaccggcaagctggagcagctgaagagcgtgctggagatgtacggccacttcagcggcatcaacagaaaggtgcagctgacctactacccccacggcgtgaaggccagcaacgagggccaggacccccagagagagaccctggcccccagcctgctgctggtgctgaagtggggcggcgagctgacccccgccggcagagtgcaggccgaggagctgggcagagccttcagatgcatgtaccccggcggccagggcgactacgccggcttccccggctgcggcctgctgagactgcacagcaccttcagacacgacctgaagatctacgccagcgacgagggcagagtgcagatgaccgccgccgccttcgccaagggcctgctggccctggagggcgagctgacccccatcctggtgcagatggtgaagagcgccaacatgaacggcctgctggacagcgacggcgacagcctgagcagctgccagcacagagtgaaggccagactgcaccacatcctgcagcaggacgcccccttcggccccgaggactacgaccagctggcccccaccagaagcaccagcctgctgaacagcatgaccatcatccagaaccccgtgaaggtgtgcgaccaggtgttcgccctgatcgagaacctgacccaccagatcagagagagaatgcaggaccccagaagcgtggacctgcagctgtaccacagcgagaccctggagctgatgctgcagagatggagcaagctggagagagacttcagacagaagagcggcagatacgacatcagcaagatccccgacatctacgactgcgtgaagtacgacgtgcagcacaacggcagcctgggcctgcagggcaccgccgagctgctgagactgagcaaggccctggccgacgtggtgatcccccaggagtacggcatcagcagagaggagaagctggagatcgccgtgggcttctgcctgcccctgctgagaaagatcctgctggacctgcagagaacccacgaggacgagagcgtgaacaagctgcaccccctgtag

SEQ ID NO: 11482 - DNA, 417 bp, synthetic construct; identical to SEQ ID NO: 9323
  source 1..417: mol_type = other DNA; note = Synthetic coding sequence

SEQ ID NO: 11483 - DNA, 4302 bp, synthetic construct; identical to SEQ ID NO: 9764
  source 1..4302: mol_type = other DNA; note = Synthetic coding sequence

SEQ ID NO: 11484 - DNA, 435 bp, synthetic construct
  source 1..435: mol_type = other DNA; note = Synthetic coding sequence
atggccgaggtgcaggtgctggtgctggacggcagaggccacctgctgggcagactggccgccatcgtggccaagcaggtgctgctgggcagaaaggtggtggtggtgagatgcgagggcatcaacatcagcggcaacttctacagaaacaagctgaagtacctggccttcctgagaaagagaatgaacaccaaccccagcagaggcccctaccacttcagagcccccagcagaatcttctggagaaccgtgagaggcatgctgccccacaagaccaagagaggccaggccgccctggacagactgaaggtgttcgacggcatcccccccccctacggcaacagacccagaagaacctggagaagaaagctgaccaacacccagagaagcagcagacccaccgacagctggagcgagcccaacaaggactgctag

SEQ ID NO: 11485 - DNA, 408 bp, synthetic construct
  source 1..408: mol_type = other DNA; note = Synthetic coding sequence
atggccgccctgagacccctggtgaagcccaagatcgtgaagaagagaaccaagaagttcatcagacaccagagcgacagatacgtgaagatcaagagaaactggagaaagcccagaggcatcgacaacagagtgagaagaagattcaagggccagatcctgatgcccaacatcggctacggcagcaacaagaagaccaagcacatgctgcccagcggcttcagaaagttcctggtgcacaacgtgaaggagctggaggtgctgctgatgtgcaacaagagctactgcgccgagatcgcccacaacgtgagcagcaagaacagaaaggccatcgtggagagagccgcccagctggccatcagagtgaccaaccccaacgccagactgagaagcgaggagaacgagtag

SEQ ID NO: 11486 - DNA, 408 bp, synthetic construct; identical to SEQ ID NO: 11485
  source 1..408: mol_type = other DNA; note = Synthetic coding sequence

SEQ ID NO: 11487 - DNA, 684 bp, synthetic construct
  source 1..684: mol_type = other DNA; note = Synthetic coding sequence
atggagccccagggctaccccgccttcggctgggaccacagcctgcacaagagaaagagactgccccccgtgaagagaagcctggtgtactacctgaagaacagagaggtgagactgcagaacgagaccagctacagcagagtgctgcacggctacgccgcccagcagctgcccagcctgctgaaggagagagagttccacctgggcaccctgaacaaggtgttcgccagccagtggctgaaccacagacaggtggtgtgcggcaccaagtgcaacaccctgttcgtggtggacgtgcagaccagccagatcaccaagatccccatcctgaaggacagagagcccggcggcgtgacccagcagggctgcggcatccacgccatcgagctgaaccccagcagaaccctgctggccaccggcggcgacaaccccaacagcctggccatctacagactgcccaccctggaccccgtgtgcgtgggcgacgacggccacaaggactggatcttcagcatcgcctggatcagcgacaccatggccgtgagcggcagcagagacggcagcatgggcctgtgggaggtgaccgacgacgtgctgaccaagagcgacgccagacacaacgtgagcagagtgcccgtgtacgcccacatcacccacaaggccctgaaggacatccccaagtag

SEQ ID NO: 11488 - DNA, 1554 bp, synthetic construct
  source 1..1554: mol_type = other DNA; note = Synthetic coding sequence
atgaccagactgggcaccgtgcccagaaaggccctggagatgagctgcgccatccagaaccagctggccagaatcctggccgagttcgagatgaccctggagagagacgtgctgcagcccctgagcagactgagcgaggaggagctgcccgccatcctgaagcacaagaagagcctgcagaagctggtgagcgactggaacaccctgaagagcagactgagccaggccaccaagaacagcggcagcagccagggcctgggcggcagccccggcagccacagccacaccaccatggccaacaaggtggagaccctgaaggaggaggaggaggagctgaagagaaaggtggagcagtgcagagacgagtacctggccgacctgtaccacttcgtgaccaaggaggacagctacgccaactacttcatcagactgctggagatccaggccgactaccacagaagaagcctgagcagcctggacaccgccctggccgagctgagagagaaccacggccaggccgaccacagccccagcatgaccgccacccacttccccagagtgtacggcgtgagcctggccacccacctgcaggagctgggcagagagatcgccctgcccatcgaggcctgcgtgatgatgctgctgagcgagggcatgaaggaggagggcctgttcagactggccgccggcgccagcgtgctgaagagactgaagcagaccatggccagcgacccccacagcctggaggagttctgcagcgacccccacgccgtggccggcgccctgaagagctacctgagagagctgcccgagcccctgatgaccttcgacctgtacgacgactggatgagagccgccagcctgaaggagcccggcgccagactgcaggccctgcaggaggtgtgcagcagactgccccccgagaacctgagcaacctgagatacctgatgaagttcctggccagactggccgaggagcaggaggtgaacaagatgacccccagcaacatcgccatcgtgctgggccccaacctgctgtggccccccgagaaggagggcgaccaggcccagctggacgccgccagcgtgagcagcatccaggtggtgggcgtggtggaggccctgatccagagcgccgacaccctgttccccggcgacatcaacttcaacgtgagcggcctgttcagcgccgtgaccctgcaggacaccgtgagcgacagactggccagcgaggagctgcccagcaccgccgtgcccacccccgccaccacccccgcccccgcccccgcccccgcccccgcccccgcccccgccctggccagcgccgccaccaaggagagaaccgagagcgaggtgccccccagacccgccagccccaaggtgaccagaagcccccccgagaccgccgcccccgtggaggacatggccagaagaagccccagaggcgccaccggcagaaaggagagattcgcctgcagctacggcaccgacagcagcctggccgacatgttcttcgtgagactggtgaacaagctgttctggaccaagctgtag

SEQ ID NO: 11489 - DNA, 918 bp, synthetic construct; identical to SEQ ID NO: 9729
  source 1..918: mol_type = other DNA; note = Synthetic coding sequence

SEQ ID NO: 11490 - DNA, 927 bp, synthetic construct
  source 1..927: mol_type = other DNA; note = Synthetic coding sequence
atgatccacgacgcccagatggactactacggcaccagactggccacctgcagcagcgacagaagcgtgaagatcttcgacgtgagaaacggcggccagatcctgatcgccgacctgagaggccacgagggccccgtgtggcaggtggcctgggcccaccccatgtacggcaacatcctggccagctgcagctacgacagaaaggtgatcatctggagagaggagaacggcacctgggagaagagccacgagcacgccggccacgacagcagcgtgaacagcgtgtgctgggccccccacgactacggcctgatcctggcctgcggcagcagcgacggcgccatcagcctgctgacctacaccggcgagggccagtgggaggtgaagaagatcaacaacgcccacaccatcggctgcaacgccgtgagctgggcccccgccgtggtgcccggcagcctgatcgaccaccccagcggccagaagcccaactacatcaagagattcgccagcggcggctgcgacaacctgatcaagctgtggaaggaggaggaggacggccagtggaaggaggagcagaagctggaggcccacagcgactgggtgagagacgtggcctgggcccccagcatcggcctgcccaccagcaccatcgccagctgcagccaggacggcagagtgttcatctggacctgcgacgacgccagcagcaacacctggagccccaagctgctgcacaagttcaacgacgtggtgtggcacgtgagctggagcatcaccgccaacatcctggccgtgagcggcggcgacaacaaggtgaccctgtggaaggagagcgtggacggccagtgggtgtgcatcagcgacgtgaacaagggccagggcagcgtgagcgccagcgtgaccgagggccagcagaacgagcagtag

SEQ ID NO: 11491 - DNA, 1542 bp, synthetic construct
  source 1..1542: mol_type = other DNA; note = Synthetic coding sequence
atgagcatcgagatcgagagcagcgacgtgatcagactgatcatgcagtacctgaaggagaacagcctgcacagagccctggccaccctgcaggaggagaccaccgtgagcctgaacaccgtggacagcatcgagagcttcgtggccgacatcaacagcggccactgggacaccgtgctgcaggccatccagagcctgaagctgcccgacaagaccctgatcgacctgtacgagcaggtggtgctggagctgatcgagctgagagagctgggcgccgccagaagcctgctgagacagaccgaccccatgatcatgctgaagcagacccagcccgagagatacatccacctggagaacctgctggccagaagctacttcgaccccagagaggcctaccccgacggcagcagcaaggagaagagaagagccgccatcgcccaggccctggccggcgaggtgagcgtggtgccccccagcagactgatggccctgctgggccaggccctgaagtggcagcagcaccagggcctgctgccccccggcatgaccatcgacctgttcagaggcaaggccgccgtgaaggacgtggaggaggagaagttccccacccagctgagcagacacatcaagttcggccagaagagccacgtggagtgcgccagattcagccccgacggccagtacctggtgaccggcagcgtggacggcttcatcgaggtgtggaacttcaccaccggcaagatcagaaaggacctgaagtaccaggcccaggacaacttcatgatgatggacgacgccgtgctgtgcatgtgcttcagcagagacaccgagatgctggccaccggcgcccaggacggcaagatcaaggtgtggaagatccagagcggccagtgcctgagaagattcgagagagcccacagcaagggcgtgacctgcctgagcttcagcaaggacagcagccagatcctgagcgccagcttcgaccagaccatcagaatccacggcctgaagagcggcaagaccctgaaggagttcagaggccacagcagcttcgtgaacgaggccaccttcacccaggacggccactacatcatcagcgccagcagcgacggcaccgtgaagatctggaacatgaagaccaccgagtgcagcaacaccttcaagagcctgggcagcaccgccggcaccgacatcaccgtgaacagcgtgatcctgctgcccaagaaccccgagcacttcgtggtgtgcaacagaagcaacaccgtggtgatcatgaacatgcagggccagatcgtgagaagcttcagcagcggcaagagagagggcggcgacttcgtgtgctgcgccctgagccccagaggcgagtggatctactgcgtgggcgaggacttcgtgctgtactgcttcagcaccgtgaccggcaagctggagagaaccctgaccgtgcacgagaaggacgtgatcggcatcgcccaccacccccaccagaacctgatcgccacctacagcgaggacggcctgctgaagctgtggaagccctag

SEQ ID NO: 11492 - DNA, 2136 bp, synthetic construct
  source 1..2136: mol_type = other DNA; note = Synthetic coding sequence
atgagcagcgtgcagagccagcaggagcagctgagccagagcgaccccagccccagccccaacagctgcagcagcttcgagctgatcgacatggacgccggcagcctgtacgagcccgtgagcccccactggttctactgcaagatcatcgacagcaaggagacctggatccccttcaacagcgaggacagccagcagctggaggaggcctacagcagcggcaagggctgcaacggcagagtggtgcccaccgacggcggcagatacgacgtgcacctgggcgagagaatgagatacgccgtgtactgggacgagctggccagcgaggtgagaagatgcacctggttctacaagggcgacaaggacaacaagtacgtgccctacagcgagagcttcagccaggtgctggaggagacctacatgctggccgtgaccctggacgagtggaagaagaagctggagagccccaacagagagatcatcatcctgcacaaccccaagctgatggtgcactaccagcccgtggccggcagcgacgactggggcagcacccccaccgagcagggcagacccagaaccgtgaagagaggcgtggagaacatcagcgtggacatccactgcggcgagcccctgcagatcgaccacctggtgttcgtggtgcacggcatcggccccgcctgcgacctgagattcagaagcatcgtgcagtgcgtgaacgacttcagaagcgtgagcctgaacctgctgcagacccacttcaagaaggcccaggagaaccagcagatcggcagagtggagttcctgcccgtgaactggcacagccccctgcacagcaccggcgtggacgtggacctgcagagaatcaccctgcccagcatcaacagactgagacacttcaccaacgacaccatcctggacgtgttcttctacaacagccccacctactgccagaccatcgtggacaccgtggccagcgagatgaacagaatctacaccctgttcctgcagagaaaccccgacttcaagggcggcgtgagcatcgccggccacagcctgggcagcctgatcctgttcgacatcctgaccaaccagaaggacagcctgggcgacatcgacagcgagaaggacagcctgaacatcgtgatggaccagggcgacacccccaccctggaggaggacctgaagaagctgcagctgagcgagttcttcgacatcttcgagaaggagaaggtggacaaggaggccctggccctgtgcaccgacagagacctgcaggagatcggcatccccctgggccccagaaagaagatcctgaactacttcagcaccagaaagaacagcatgggcatcaagagacccgccccccagcccgccagcggcgccaacatccccaaggagagcgagttctgcagcagcagcaacaccagaaacggcgactacctggacgtgggcatcggccaggtgagcgtgaagtaccccagactgatctacaagcccgagatcttcttcgccttcggcagccccatcggcatgttcctgaccgtgagaggcctgaagagaatcgaccccaactacagattccccacctgcaagggcttcttcaacatctaccaccccttcgaccccgtggcctacagaatcgagcccatggtggtgcccggcgtggagttcgagcccatgctgatcccccaccacaagggcagaaagagaatgcacctggagctgagagagggcctgaccagaatgagcatggacctgaagaacaacctgctgggcagcctgagaatggcctggaagagcttcaccagagccccctaccccgccctgcaggccagcgagacccccgaggagaccgaggccgagcccgagagcaccagcgagaagcccagcgacgtgaacaccgaggagaccagcgtggccgtgaaggaggaggtgctgcccatcaacgtgggcatgctgaacggcggccagagaatcgactacgtgctgcaggagaagcccatcgagagcttcaacgagtacctgttcgccctgcagagccacctgtgctactgggagagcgaggacaccgtgctgctggtgctgaaggagatctaccagacccagggcatcttcctggaccagcccctgcagtag

SEQ ID NO: 11493 - DNA, 3351 bp, synthetic construct; identical to SEQ ID NO: 10541
  source 1..3351: mol_type = other DNA; note = Synthetic coding sequence

SEQ ID NO: 11494 - DNA, 1233 bp, synthetic construct
  source 1..1233: mol_type = other DNA; note = Synthetic coding sequence
atgcagaacatccacggcaaggagatcgacctgctgagaaccaccgtgaaggtgcccggcaagagactgcccagagccacccccgccaccgcccccggcaccagccccagagccaacggcctgagcgtggagagaagcaacacccagctgggcggcggcaccgccagcggccccgccgaggtgctgagcagcagccccaagctggaccccccccccagcccccacagcaacagaaagaagcacagaagaaagaagagcaccggcacccccagacccgacggccccagcagcgccaccgaggaggccgaggagagcttcgagttcgtggtggtgagcctgaccggccagacctggcacttcgaggccagcaccgccgaggagagagagctgtgggtgcagagcgtgcaggcccagatcctggccagcctgcagggctgcagaagcgccaaggacaagaccagactgggcaaccagaacgccgccctggccgtgcaggccgtgagaaccgtgagaggcaacagcttctgcatcgactgcgacgcccccaaccccgactgggccagcctgaacctgggcgccctgatgtgcatcgagtgcagcggcatccacagacacctgggcgcccacctgagcagagtgagaagcctggacctggacgactggccccccgagctgctggccgtgatgaccgccatgggcaacgccctggccaacagcgtgtgggagggcgccctgggcggctacagcaagcccggccccgacgcctgcagagaggagaaggagagatggatcagagccaagtacgagcagaagctgttcctggcccccctgcccagcagcgacgtgcccctgggccagcagctgctgagagccgtggtggaggacgacctgagactgctggtgatgctgctggcccacggcagcaaggaggaggtgaacgagacctacggcgacggcgacggcagaaccgccctgcacctgagcagcgccatggccaacgtggtgttcacccagctgctgatctggtacggcgtggacgtgagaagcagagacgccagaggcctgacccccctggcctacgccagaagagccggcagccaggagtgcgccgacatcctgatccagcacggctgccccggcgagggctgcggcctggcccccacccccaacagagagcccgccaacggcaccaaccccagcgccgagctgcacagaagccccagcctgctgtag

SEQ ID NO: 11495 - DNA, 492 bp, synthetic construct
  source 1..492: mol_type = other DNA; note = Synthetic coding sequence
atgagcgacagccccgccggcagcaaccccagaacccccgagagcagcggcagcggcagcggcggcggcggcaagagacccgccgtgcccgccgccgtgagcctgctgccccccgccgaccccctgagacaggccaacagactgcccatcagagtgctgaagatgctgagcgcccacaccggccacctgctgcaccccgagtacctgcagcccctgagcagcacccccgtgagccccatcgagctggacgccaagaagagccccctggccctgctggcccagacctgcagccagatcggcagccccggcagcctgagcctgagaaacccccacaccctgggcctgagcagataccacccctacggcaagagccacctgagcaccgccggcggcctggccgtgcccagcctgcccaccgccggcccctactacagcccctacgccctgtacggccagagactggccagcgccagcgccctgggctaccagtag

SEQ ID NO: 11496 - DNA, 2736 bp, synthetic construct
  source 1..2736: mol_type = other DNA; note = Synthetic coding sequence
atgaacttccaggccggcggcggccagagcccccagcagcagcagagcctggccgcccccggcggcggcggcgccgccgcccagcagctggtgtgcggcggccagttcggcggcgccggccccggcgccggcggcggcggcggccccagccagcagctggccggcggccccccccagcagttcgccctgagcaacagcgccgccatcagagccgagatccagagattcgagagcgtgcaccccaacatctacgccatctacgacctgatcgagagaatcgaggacctggccctgcagaaccagatcagagagcacgtgatcagcatcgaggacagcttcgtgaacagccaggagtggaccctgagcagaagcgtgcccgagctgaaggtgggcatcgtgggcaacctgagcagcggcaagagcgccctggtgcacagatacctgaccggcacctacgtgcaggaggagagccccgagggcggcagattcaagaaggagatcgtggtggacggccagagctacctgctgctgatcagagacgagggcggcccccccgagctgcagttcgccgcctgggtggacgccgtggtgttcgtgttcagcctggaggacgagatcagcttccagaccgtgtacaactacttcctgagactgtgcagcttcagaaacgccagcgaggtgcccatggtgctggtgggcacccaggacgccatcagcgccgccaaccccagagtgatcgacgacagcagagccagaaagctgagcaccgacctgaagagatgcacctactacgagacctgcgccacctacggcctgaacgtggagagagtgttccaggacgtggcccagaaggtggtggccctgagaaagaagcagcagctggccatcggcccctgcaagagcctgcccaacagccccagccacagcgccgtgagcgccgccagcatccccgccgtgcacatcaaccaggccaccaacggcggcggcagcgccttcagcgactacagcagcagcgtgcccagcacccccagcatcagccagagagagctgagaatcgagaccatcgccgccagcagcacccccacccccatcagaaagcagagcaagagaagaagcaacatcttcaccagcagaaagggcgccgacctggacagagagaagaaggccgccgagtgcaaggtggacagcatcggcagcggcagagccatccccatcaagcagggcatcctgctgaagagaagcggcaagagcctgaacaaggagtggaagaagaagtacgtgaccctgtgcgacaacggcctgctgacctaccaccccagcctgcacgactacatgcagaacatccacggcaaggagatcgacctgctgagaaccaccgtgaaggtgcccggcaagagactgcccagagccacccccgccaccgcccccggcaccagccccagagccaacggcctgagcgtggagagaagcaacacccagctgggcggcggcaccggcgccccccacagcgccagcagcgccagcctgcacagcgagagacccctgagcagcagcgcctgggccggccccagacccgagggcctgcaccagagaagctgcagcgtgagcagcgccgaccagtggagcgaggccaccaccagcctgccccccggcatgcagcaccccgccagcggccccgccgaggtgctgagcagcagccccaagctggaccccccccccagcccccacagcaacagaaagaagcacagaagaaagaagagcaccggcacccccagacccgacggccccagcagcgccaccgaggaggccgaggagagcttcgagttcgtggtggtgagcctgaccggccagacctggcacttcgaggccagcaccgccgaggagagagagctgtgggtgcagagcgtgcaggcccagatcctggccagcctgcagggctgcagaagcgccaaggacaagaccagactgggcaaccagaacgccgccctggccgtgcaggccgtgagaaccgtgagaggcaacagcttctgcatcgactgcgacgcccccaaccccgactgggccagcctgaacctgggcgccctgatgtgcatcgagtgcagcggcatccacagacacctgggcgcccacctgagcagagtgagaagcctggacctggacgactggccccccgagctgctggccgtgatgaccgccatgggcaacgccctggccaacagcgtgtgggagggcgccctgggcggctacagcaagcccggccccgacgcctgcagagaggagaaggagagatggatcagagccaagtacgagcagaagctgttcctggcccccctgcccagcagcgacgtgcccctgggccagcagctgctgagagccgtggtggaggacgacctgagactgctggtgatgctgctggcccacggcagcaaggaggaggtgaacgagacctacggcgacggcgacggcagaaccgccctgcacctgagcagcgccatggccaacgtggtgttcacccagctgctgatctggtacggcgtggacgtgagaagcagagacgccagaggcctgacccccctggcctacgccagaagagccggcagccaggagtgcgccgacatcctgatccagcacggctgccccggcgagggctgcggcctggcccccacccccaacagagagcccgccaacggcaccaaccccagcgccgagctgcacagaagccccagcctgctgtag

SEQ ID NO: 11497 - DNA, 1059 bp, synthetic construct; identical to SEQ ID NO: 11224
  source 1..1059: mol_type = other DNA; note = Synthetic coding sequence

SEQ ID NO: 11498 - DNA, 507 bp, synthetic construct
  source 1..507: mol_type = other DNA; note = Synthetic coding sequence
atgaccgccaccctgagaccctacctgagcgccgtgagagccaccctgcaggccgccctgtgcctggagaacttcagcagccaggtggtggagagacacaacaagcccgaggtggaggtgagaagcagcaaggagctgctgctgcagcccgtgaccatcagcagaaacgagaaggagaaggtgctgatcgagggcagcatcaacagcgtgagagtgagcatcgccgtgaagcaggccgacgagatcgagaagatcctgtgccacaagttcatgagattcatgatgatgagagccgagaacttcttcatcctgagaagaaagcccgtggagggctacgacatcagcttcctgatcaccaacttccacaccgagcagatgtacaagcacaagctggtggacttcgtgatccacttcatggaggagatcgacaaggagatcagcgagatgaagctgagcgtgaacgccagagccagaatcgtggccgaggagttcctgaagaacttctag

SEQ ID NO: 11499 - DNA, 993 bp, synthetic construct
  source 1..993: mol_type = other DNA; note = Synthetic coding sequence
atggagagattcatggagcaggtggtgttcaagtacctgagagccgagcccgaggaccactacttcctgatgaccgagccccccctgaacacccccgagaacagagagtacctggccgagatcatgttcgagagcttcaacgtgcccggcctgtacatcgccgtgcaggccgtgctggccctggccgccagctggaccagcagacaggtgggcgagagaaccctgaccggcatcgtgatcgacagcggcgacggcgtgacccacgtgatccccgtggccgagggctacgtgatcggcagctgcatcaagcacatccccatcgccggcagagacatcacctacttcatccagcagctgctgagagagagagaggtgggcatcccccccgagcagagcctggagaccgccaaggccatcaaggagaagtactgctacatctgccccgacatcgtgaaggagttcgccaagtacgacgtggaccccagaaagtggatcaagcagtacaccggcatcaacgccatcaaccagaagaagttcgtgatcgacgtgggctacgagagattcctgggccccgagatcttcttccaccccgagttcgccaaccccgacttcatggagagcatcagcgacgtggtggacgaggtgatccagaactgccccatcgacgtgagaagacccctgtacaagaacgtggtgctgagcggcggcagcaccatgttcagagacttcggcagaagactgcagagagacctgaagagagtggtggacgccagactgagactgagcgaggagctgagcggcggcagaatcaagcccaagcccgtggaggtgcaggtggtgacccaccacatgcagagatacgccgtgtggttcggcggcagcatgctggccagcacccccgagttcttccaggtgtgccacaccaagaaggactacgaggagtacggccccagcatctgcagacacaaccccgtgttcggcgtgatgagctag

SEQ ID NO: 11500 - DNA, 894 bp, synthetic construct
  source 1..894: mol_type = other DNA; note = Synthetic coding sequence
atgaagaccctgagccccgacagaatccagccccacatcatgaccgacgtgcccgccaccttcacccaggccgagtgcaacggcgacaagccccccgagaacggccagcagaccatcaccaagatcagcgaggagctgaccgacgtggacagccccctgccccactacagagtggagcccagcctggagggcgccctgaccaagggcagccaggaggagagaagaaagctgcagggcaacatgctgctgaacagcagcatggaggacaagatgctgaaggagaaccccgaggagaagctgttcatcgtgcacaaggccatcaccgacctgagcctgcaggagaccagcgccgacgagatgaccttcagagagggccaccagtgggagaagatccccctgagcggcagcaaccaggagatcagaagacagaaggagagaatcaccgagcagcccctgaaggaggaggaggacgaggacagaaagaacaagggccaccaggccgccgagatcgagtggctgggcttcagaaagcccagccaggccgacatgctgcacagcaagcacgacgaggagcagaaggtgtgggacgaggagatcgacgacgacgacgacgacaactgcaacaacgacgaggacgaggtgagagtgatcgagttcaagaagaagcacgaggaggtgagccagttcaaggaggagggcgacgccagcgaggacagccccctgagcagcgccagcagccaggccgtgacccccgacgagcagcccaccctgggcaagaagagcgacatcagcagaaacgcctacagcagatacaacaccatcagctacagaaagatcagaaagggcaacaccaagcagagaatcgacgagttcgagagcatgatgcacctgtag

SEQ ID NO: 11501 - DNA, 1074 bp, synthetic construct
  source 1..1074: mol_type = other DNA; note = Synthetic coding sequence
atggtgcagcccttcaccaccatccccttccccccccccccccagaacggcatccccaccgagtacggcgtgccccacacccaggactacgccggccagaccggcgagcacaacctgaccctgtacggcagcacccaggcccacggcgagcagagcagcaacagccccagcacccagaacggcagcctgacccagaccgagggcggcgcccagaccgacggccagcagagccagacccagagcagcgagaacagcgagagcaagagcacccccaagagactgcacgtgagcaacatccccttcagattcagagaccccgacctgagacagatgttcggccagttcggcaagatcctggacgtggagatcatcttcaacgagagaggcagcaagggcttcggcttcgtgaccttcgagaacagcgccgacgccgacagagccagagagaagctgcacggcaccgtggtggagggcagaaagatcgaggtgaacaacgccaccgccagagtgatgaccaacaagaagatggtgaccccctacgccaacggctggaagctgagccccgtggtgggcgccgtgtacggccccgagctgtacgccgccagcagcttccaggccgacgtgagcctgggcaacgacgccgccgtgcccctgagcggcagaggcggcatcaacacctacatccccctgatcatccccggcttcccctaccccaccgccgccaccaccgccgccgccttcagaggcgcccacctgagaggcagaggcagaaccgtgtacggcgccgtgagagccgtgccccccaccgccatccccgcctaccccggcgtggtgtaccaggacggcttctacggcgccgacctgtacggcggctacgccgcctacagatacgcccagcccgccaccgccaccgccgccaccgccgccgccgccgccgccgccgcctacagcgacggctacggcagagtgtacaccgccgacccctaccacgccctggcccccgccgccagctacggcgtgggcgccgtggccagcctgtacagaggcggctacagcagattcgccccctactag

SEQ ID NO: 11502 - DNA, 387 bp, synthetic construct
  source 1..387: mol_type = other DNA; note = Synthetic coding sequence
atggtgcagcccttcaccaccatccccttccccccccccccccagaacggcatccccaccgagtacggcgtgccccacacccaggactacgccggccagaccggcgagcacaacctgaccctgtacggcagcacccaggcccacggcgagcagagcagcaacagccccagcacccagaacggcagcctgaccaccgagggcggcgcccagaccgacggccagcagagccagacccagagcagcgagaacagcgagagcaagagcacccccaagagactgcacgtgagcaacatccccttcagattcagagaccccgacctgagacagatgttcggcttcggcaagatcctggacgtggagatcatcttcaacgagagaggcagctag

SEQ ID NO: 11503 - DNA, 1071 bp, synthetic construct
  source 1..1071: mol_type = other DNA; note = Synthetic coding sequence
atgcagggcatcctgctgctggtgttcgccaagtaccagcacctgccctacatccagatcctgagcaccaagagcacccccaccggcctgttcggctactggggcaacaagggcggcgtgaacatctgcctgaagctgtacggctactacgtgagcatcatcaactgccacctgcccccccacatcagcaacaactaccagagactggagcacttcgacagaatcctggagatgcagaactgcgagggcagagacatccccaacatcctggaccacgacctgatcatctggttcggcgacatgaacttcagaatcgaggacttcggcctgcacttcgtgagagagagcatcaagaacagatgctacggcggcctgtgggagaaggaccagctgagcatcgccaagaagcacgaccccctgctgagagagttccaggagggcagactgctgttcccccccacctacaagttcgacagaaacagcaacgactacgacaccagcgagaagaagagaaagcccgcctggaccgacagaatcctgtggagactgaagagacagccctgcgccggccccgacacccccatcccccccgccagccacttcagcctgagcctgagaggctacagcagccacatgacctacggcatcagcgaccacaagcccgtgagcggcaccttcgacctggagctgaagcccctggtgagcgcccccctgatcgtgctgatgcccgaggacctgtggaccgtggagaacgacatgatggtgagctacagcagcaccagcgacttccccagcagcccctgggactggatcggcctgtacaaggtgggcctgagagacgtgaacgactacgtgagctacgcctgggtgggcgacagcaaggtgagctgcagcgacaacctgaaccaggtgtacatcgacatcagcaacatccccaccaccgaggacgagttcctgctgtgctactacagcaacagcctgagaagcgtggtgggcatcagcagacccttccagatcccccccggcagcctgagagaggaccccctgggcgaggcccagccccagatctag

SEQ ID NO: 11504 - DNA, 1752 bp, synthetic construct; identical to SEQ ID NO: 10452
  source 1..1752: mol_type = other DNA; note = Synthetic coding sequence

SEQ ID NO: 11505 - DNA, 1329 bp, synthetic construct
  source 1..1329: mol_type = other DNA; note = Synthetic coding sequence
atggccaacagcttcgccgccagaatcttcaccaccctgagcgacctgcagaccaacatggccaacctgaaggtgatcggcatcgtgatcggcaagaccgacgtgaagggcttccccgacagaaagaacatcggcagcgagagatacaccttcagcttcaccatcagagacagccccgcccacttcgtgaacgccgccagctggggcaacgaggactacatcaagagcctgagcgacagcttcagagtgggcgactgcgtgatcatcgagaaccccctgatccagagaaaggagatcgagagagaggagaagttcagccccgccacccccagcaactgcaagctgctgctgagcgagaaccacagcaccgtgaaggtgtgcagcagctacgaggtggacaccaagctgctgagcctgatccacctgcccgtgaaggagagccacgactactacagcctgggcgacatcgtggccaacggccacagcctgaacggcagaatcatcaacgtgctggccgccgtgaagagcgtgggcgagcccaagtacttcaccaccagcgacagaagaaagggccagagatgcgaggtgagactgtacgacgagaccgagagcagcttcgccatgacctgctgggacaacgagagcatcctgctggcccagagctggatgcccagagagaccgtgatcttcgccagcgacgtgagaatcaacttcgacaagttcagaaactgcatgaccgccaccgtgatcagcaagaccatcatcaccaccaaccccgacatccccgaggccaacatcctgctgaacttcatcagagagaacaaggagaccaacgtgctggacgacgagatcgacagctacttcaaggagagcatcaacctgagcaccatcgtggacgtgtacaccgtggagcagctgaagggcaaggccctgaagaacgagggcaaggccgaccccagctacggcatcctgtacgcctacatcagcaccctgaacatcgacgacgagaccaccaaggtggtgagaaacagatgcagcagctgcggctacatcgtgaacgaggccagcaacatgtgcaccacctgcaacaagaacagcctggacttcaagagcgtgttcctgagcttccacgtgctgatcgacctgaccgaccacaccggcaccctgcacagctgcagcctgaccggcagcgtggccgaggagaccctgggctgcaccttcgtgctgagccacagagccagaagcggcctgaagatcagcgtgctgagctgcaagctggccgaccccaccgaggccagcagaaacctgagcggccagaagcacgtgtag

SEQ ID NO: 11506 - DNA, 627 bp, synthetic construct
  source 1..627: mol_type = other DNA; note = Synthetic coding sequence
atggccggcaccgccagacacgacagagagatggccatccaggccaagaagaagctgaccaccgccaccgaccccatcgagagactgagactgcagtgcctggccagaggcagcgccggcatcaagggcctgggcagagtgttcagaatcatggacgacgacaacaacagaaccctggacttcaaggagttcatgaagggcctgaacgactacgccgtggtgatggagaaggaggaggtggaggagctgttcagaagattcgacaaggacggcaacggcaccatcgacttcaacgagttcctgctgaccctgagaccccccatgagcagagccagaaaggaggtgatcatgcaggccttcagaaagctggacaagaccggcgacggcgtgatcaccatcgaggacctgagagaggtgtacaacgccaagcaccaccccaagtaccagaacggcgagtggagcgaggagcaggtgttcagaaagttcctggacaacttcgacagcccctacgacaaggacggcctggtgacccccgaggagttcatgaactactacgccggcgtgagcgccagcatcgacaccgacgtgtacttcatcatcatgatgagaaccgcctggaagctgtag

SEQ ID NO: 11507 - DNA, 627 bp, synthetic construct; identical to SEQ ID NO: 11506
  source 1..627: mol_type = other DNA; note = Synthetic coding sequence

SEQ ID NO: 11508 - DNA, 789 bp, synthetic construct
  source 1..789: mol_type = other DNA; note = Synthetic coding sequence
cacagctacagcgagggcctgggccaccccagagtgagccaggccctggtgaccttccaccagcagaagcccatcgagcccagaagagagctgctgacccagccctgcagacagaaggaccccgccaacgtggactacgaggacctgttcctgtacagcaacgccgtggccgaggaggccgcctgccccgtgagcgcccccgaggaggccagccccaagcccgtgctgtgccaccagagcaaggagagaaagcccagcgccgagatgaacagaatcaccaccaaggaggccaccagcagctgcccccccaagagccccctgggcgagaccagacagaagctgtggagaagcctgaagatgctgcccgagagaggccagagagtgagacagcagaagagccacctggccaccgtgaacctgagcagcctgctggacgtgagaagaagcaccgtgatcagcggccccggcaccggcaagggcagccaggaccacagcggcgaccccaccagcggcgacagaggctacaccgacccctgcgtggccaccagcctgaagagccccagccagccccaggcccccaaggacagaaaggtgcccaccagaaaggccgagagaagcgtgagctgcatcgaggtgacccccggcgacagaagctggcaccagatggtggtgagagccctgagcagccaggagagcaagcccgagcaccagggcctggccgagcccgagaacgaccagctgcccgaggagtaccagcagcccccccccttcgcccccggctactgctag

SEQ ID NO: 11509 - DNA, 1941 bp, synthetic construct
  source 1..1941: mol_type = other DNA; note = Synthetic coding sequence
atgagctacaccggcttcgtgcagggcagcgagaccaccctgcagagcacctacagcgacaccagcgcccagcccacctgcgactacggctacggcacctggaacagcggcaccaacagaggctacgagggctacggctacggctacggctacggccaggacaacaccaccaactacggctacggcatggccaccagccacagctgggagatgcccagcagcgacaccaacgccaacaccagcgccagcggcagcgccagcgccgacagcgtgctgagcagaatcaaccagagactggacatggtgccccacctggagaccgacatgatgcagggcggcgtgtacggcagcggcggcgagagatacgacagctacgagagctgcgacagcagagccgtgctgagcgagagagacctgtacagaagcggctacgactacagcgagctggaccccgagatggagatggcctacgagggccagtacgacgcctacagagaccagttcagaatgagaggcaacgacaccttcggccccagagcccagggctgggccagagacgccagaagcggcagacccatggccagcggctacggcagaatgtgggaggaccccatgggcgccagaggccagtgcatgagcggcgccagcagactgcccagcctgttcagccagaacatcatccccgagtacggcatgttccagggcatgagaggcggcggcgccttccccggcggcagcagattcggcttcggcttcggcaacggcatgaagcagatgagaagaacctggaagacctggaccaccgccgacttcagaaccaagaagaagaagagaaagcagggcggcagccccgacgagcccgacagcaaggccaccagaaccgactgcagcgacaacagcgacagcgacaacgacgagggcaccgagggcgaggccaccgagggcctggagggcaccgaggccgtggagaagggcagcagagtggacggcgaggacgaggagggcaaggaggacggcagagaggagggcaaggaggaccccgagaagggcgccctgaccacccaggacgagaacggccagaccaagagaaagctgcaggccggcaagaagagccaggacaagcagaagaagagacagagagacagaatggtggagagaatccagttcgtgtgcagcctgtgcaagtacagaaccttctacgaggacgagatggccagccacctggacagcaagttccacaaggagcacttcaagtacgtgggcaccaagctgcccaagcagaccgccgacttcctgcaggagtacgtgaccaacaagaccaagaagaccgaggagctgagaaagaccgtggaggacctggacggcctgatccaccagatctacagagaccaggacctgacccaggagatcgccatggagcacttcgtgaagaaggtggaggccgcccactgcgccgcctgcgacctgttcatccccatgcagttcggcatcatccagaagcacctgaagaccatggaccacaacagaaacagaagactgatgatggagcagagcaagaagagcagcctgatggtggccagaagcatcctgaacaacaagctgatcagcaagaagctggagagatacctgaagggcgagaaccccttcaccgacagccccgaggaggagaaggagcaggaggaggccgagggcggcgccctggacgagggcgcccagggcgaggccgccggcatcagcgagggcgccgagggcgtgcccgcccagccccccgtgccccccgagcccgcccccggcgccgtgagccccccccccccccccccccccgaggaggaggaggagggcgccgtgcccctgctgggcggcgccctgcagagacagatcagaggcatccccggcctggacgtggaggacgacgaggagggcggcggcggcgccccctag

SEQ ID NO: 11510 - DNA, 1401 bp, synthetic construct
  source 1..1401: mol_type = other DNA; note = Synthetic coding sequence
atgagaggccccaacagcggcaccgagaagggcagactggtgatccccgagaagcagggcttcgacttcctgtgcatgcccgtgttccaccccagattcaagagagagttcatccaggagcccgccaagaacagacccggcccccagaccagaagcgacctgctgctgagcggcagagactggaacaccctgatcgtgggcaagctgagcccctggatcagacccgacagcaaggtggagaagatcagaagaaacagcgaggccctggaggtgcagttcatcatcaccggcaccaaccaccacagcgagaaggagttctgcagctacctgcagtacctggagtacctgagccagaacagacccccccccaacgcctacgagctgttcgccaagggctacgaggactacctgcagagccccctgcagcccctgatggacaacctggagagccagacctacgaggtgttcgagaaggaccccatcaagtacagccagtaccagcaggccatctacaagtgcctgctggacagagtgcccgaggaggagaaggacaccaacgtgcaggtgctgatggtgctgggcgccggcagaggccccctggtgaacgccagcctgagagccgccaagcaggccgacagaagaatcaagctgtacgccgtggagaagaaccccaacgccgtggtgaccctggagaactggcagttcgaggagtggggcagccaggtgaccgtggtgagcagcgacatgagagagtgggtggcccccgagaaggccgacatcatcgtgagcgagctgctgggcagcttcgccgacaacgagctgagccccgagtgcctggacggcgcccagcacttcctgaaggacgacggcgtgagcatccccggcgagtacaccagcttcctggcccccatcagcagcagcaagctgtacaacgaggtgagagcctgcagagagaaggacagagaccccgaggcccagttcgagatgccctacgtggtgagactgcacaacttccaccagctgagcgccccccagccctgcttcaccttcagccaccccaacagagaccccatgatcgacaacaacagatactgcaccctggagttccccgtggaggtgaacaccgtgctgcacggcttcgccggctacttcgagaccgtgctgtaccaggacatcaccctgagcatcagacccgagacccacagccccggcatgttcagctggttccccatcctgttccccatcaagcagcccatcaccgtgagagagggccagaccatctgcgtgagattctggagatgcagcaacagcaagaaggtgtggtacgagtgggccgtgaccgcccccgtgtgcagcgccatccacaaccccaccggcagaagctacaccatcggcctgtag

SEQ ID NO: 11511 - DNA, 1863 bp, synthetic construct
  source 1..1863: mol_type = other DNA; note = Synthetic coding sequence
atgagaggccccaacagcggcaccgagaagggcagactggtgatccccgagaagcagggcttcgacttcctgtgcatgcccgtgttccaccccagattcaagagagagttcatccaggagcccgccaagaacagacccggcccccagaccagaagcgacctgctgctgagcggcagagactggaacaccctgatcgtgggcaagctgagcccctggatcagacccgacagcaaggtggagaagatcagaagaaacagcgaggccgccatgctgcaggagctgaacttcggcgcctacctgggcctgcccgccttcctgctgcccctgaaccaggaggacaacaccaacctggccagagtgctgaccaaccacatccacaccggccaccacagcagcatgttctggatgagagtgcccctggtggcccccgaggacctgagagacgacatcatcgagaacgcccccaccacccacaccgaggagtacagcggcgaggagaagacctggatgtggtggcacaacttcagaaccctgtgcgactacagcaagagaatcgccgtggccctggagatcggcgccgacctgcccagcaaccacgtgatcgacagatggctgggcgagcccatcaaggccgccatcctgcccaccagcatcttcctgaccaacaagaagggcttccccgtgctgagcaagatgcaccagagactgatcttcagactgctgaagctggaggtgcagttcatcatcaccggcaccaaccaccacagcgagaaggagttctgcagctacctgcagtacctggagtacctgagccagaacagacccccccccaacgcctacgagctgttcgccaagggctacgaggactacctgcagagccccctgcagcccctgatggacaacctggagagccagacctacgaggtgttcgagaaggaccccatcaagtacagccagtaccagcaggccatctacaagtgcctgctggacagagtgcccgaggaggagaaggacaccaacgtgcaggtgctgatggtgctgggcgccggcagaggccccctggtgaacgccagcctgagagccgccaagcaggccgacagaagaatcaagctgtacgccgtggagaagaaccccaacgccgtggtgaccctggagaactggcagttcgaggagtggggcagccaggtgaccgtggtgagcagcgacatgagagagtgggtggcccccgagaaggccgacatcatcgtgagcgagctgctgggcagcttcgccgacaacgagctgagccccgagtgcctggacggcgcccagcacttcctgaaggacgacggcgtgagcatccccggcgagtacaccagcttcctggcccccatcagcagcagcaagctgtacaacgaggtgagagcctgcagagagaaggacagagaccccgaggcccagttcgagatgccctacgtggtgagactgcacaacttccaccagctgagcgccccccagccctgcttcaccttcagccaccccaacagagaccccatgatcgacaacaacagatactgcaccctggagttccccgtggaggtgaacaccgtgctgcacggcttcgccggctacttcgagaccgtgctgtaccaggacatcaccctgagcatcagacccgagacccacagccccggcatgttcagctggttccccatcctgttccccatcaagcagcccatcaccgtgagagagggccagaccatctgcgtgagattctggagatgcagcaacagcaagaaggtgtggtacgagtgggccgtgaccgcccccgtgtgcagcgccatccacaaccccaccggcagaagctacaccatcggcctgtag

SEQ ID NO: 11512 - DNA, 2271 bp, synthetic construct
  source 1..2271: mol_type = other DNA; note = Synthetic coding sequence
atgcccagcgtgagcaaggccgccgccgccgccctgagcggcagccccccccagaccgagaagcccacccactacagatacctgaaggagttcagaaccgagcagtgccccctgttcagccagcacaagtgcgcccagcacagacccttcacctgcttccactggcacttcctgaaccagagaagaagaagacccctgagaagaagagacggcaccttcaactacagccccgacgtgtactgcagcaagtacaacgaggccaccggcgtgtgccccgacggcgacgagagcctgctgggcgtgctgtaccccctgtgggcccccccccccgtgcccgcccccgtgggcgcccccaccgtgcaccccttcctggccagatggttcagccacgtgccctgggagcccgccggcagcgccgaccccagagccagcagcacccccgccggcggcaccacctgggccaccggcctgctgggcgacttcgacgcctgcggcagccagagcagagagtgcgtgaagggcgtgtggtggaccctgctgggcttcagatgcccctacctgcacagaaccaccggcgacaccgagagaaagtaccacctgagatactacaagaccggcacctgcatccacgagaccgacgccagaggccactgcgtgaagaacggcctgcactgcgccttcgcccacggccccctggacctgagaccccccgtgtgcgacgtgagagagctgcaggcccaggaggccctgcagaacggccagctgggcggcggcgagggcgtgcccgacctgcagcccggcgtgctggccagccaggccatgatcgagaagatcctgagcgaggaccccagatggcaggccctgctgcccgtggccctgctgagacacagagtggcccacttcagcgacgccaacttcgtgctgggcagctacaagaccgagcagtgccccaagccccccagactgtgcagacagggctacgcctgcccccactaccacaacagcagagacagaagaagaaaccccagaagattccagtacagaagcaccccctgccccagcgtgaagcacggcgacgagtggggcgagcccagcagatgcgacggcggcgacggctgccagtactgccacagcagaaccgagcagcagttccaccccgagggccccgtgggcagccccgtgagcggcgccttcagcgtgttcagccacgccggcctggtggccgaccccagcctgtggtaccccgccgagtggagctggcaccacgtgggccacagcagaaccatcaaccccgagggcgacaagcccagcagactgggccccgcccccgagaacatcaagagaggcaacgacttcgcctgcgacggcagagccgacgccgccggcatggccccccacgtgtgcgtgttccccatctacaagagcaccaagtgcaacgacatgagacagaccggctactgccccagaggccccttctgcgccttcgcccacgtggagaagagcctgggcatggtgaacgagtggggctgccacgacctgcacctgaccagccccagcagcaccggcagcggccagcccggcaacgccaagagaagagacagccccgccgagggcggccccagaggcagcgagcaggacagcaagcagggcgtgagagcccacggcgtgtacgtgttcgagcagaaccacctggccgtgttcgccgccgtgcacccccccgcccccagcgtgagcagcagcgtggccagcagcctggccagcagcgccggcagcggcagcagcagccccaccgccctgcccgccccccccgccagagccctgcccctgggccccgccagcagcaccgtggaggccgtgctggccctggagcccacccccagcagccccaccagcagcgccgtgcagggcgtggccggcgagctgggcatgggcagcggcggccagggctgctggagccacgtggtgggcgccctggccgccgtgcccgcctggacccacagcggcgacctggagtgggaccccagcaccatcagaaccagagtgaacgtgggcggcggccccgccgccagacccgccatgaccctggccagagagccccagctgctggtggtgggcggctgccccaccagaaactgcagcggccccgccgccagcccccagcagctgctggacgacgccggccagggcggcagaggcgagagagacagcagccagagacccctgagaccccagaccacccacagacaggacaccagacccgtgcccagctag

SEQ ID NO: 11513 - DNA, 549 bp, synthetic construct
  source 1..549: mol_type = other DNA; note = Synthetic coding sequence
atgacccccccccagcagcccccccccctgagaagcgagcccggcaccctgggcagcgccgccagcagctacagccccctgggcctgaacggcgtgcccggcagcatctgggacttcgtgagcggcagcttcagccccagccccagccccatcctgagcgccggcccccccagcagcagcagcgccagccccaacggcgccgagctggccagagtgagaagacagctggacgaggccaagagaaagatcagacagtgggaggagagctggcagcaggtgaagcaggtgtgcgacgcctggcagagagaggcccaggaggccaaggagagagccagagtggccgacagcgacagacagctggccctgcagaagaaggaggaggtggaggcccaggtgatcttccagctgagagccaagcagtgcgtggcctgcagagagagagcccacggcgccgtgctgagaccctgccagcaccacatcctgtgcgagccctgcgccgccaccgcccccgagtgcccctactgcaagggccagcccctgcagtggtag

SEQ ID NO: 11514 - DNA, 444 bp, synthetic construct
  source 1..444: mol_type = other DNA; note = Synthetic coding sequence
atggagggcgagcccccccccgtggaggagagaagaagactgcaggaggagctgaacgagttcgtggagagcggctgcagaaccctggaggaggtgaccgccagcctgggctgggacctggacagcctggaccccggcgaggaggaggccgccgaggacgaggtggtgatctgcccctacgacagcaaccaccacatgcccaagagcagcctggccaagcacatggccagctgcagactgagaaagatgggctacaccaaggaggaggaggacgagatgtacaaccccgagttcttctacgagaacgtgaagatccccagcatcaccctgaacaaggacagccagttccagatcatcaagcaggccagaaccgccgtgggcaaggacagcgactgctacaaccagatcatcggcgtgagcatcaagagaaactacaagatctag

SEQ ID NO: 11515 - DNA, 522 bp, synthetic construct
  source 1..522: mol_type = other DNA; note = Synthetic coding sequence
atgggcaccttcgacctgtggaccgactacctgggcctggcccacctggtgagagccctgagcggcaaggagggccccgagaccagactgagcccccagcccgagcccgagcccatgctggagcccgaccagaagagaagcctggagagcagccccgcccccgagagactgtgcagcttctgcaagcacaacggcgagagcagagccatctaccagagccacgtgctgaaggacgaggccggcagagtgctgtgccccatcctgagagactacgtgtgcccccagtgcggcgccaccagagagagagcccacaccagaagattctgccccctgaccggccagggctacaccagcgtgtacagccacaccaccagaaacagcgccggcaagaagctggtgagacccgacaaggccaagacccaggacaccggccacagaagaggcggcggcggcggcgccggcttcagaggcgccggcaagagcgagcccagccccagctgcagccccagcatgagcacctag

SEQ ID NO: 11516 - DNA, 1722 bp, synthetic construct
  source 1..1722: mol_type = other DNA; note = Synthetic coding sequence
atgagcgccttctgcctgggcctggtgggcagagccagcgcccccgccgagcccgacagcgcctgctgcatggagctgcccgccgccgccggcgacgccgtgagaagccccgccgccgccgccgccctgatcttccccggcggcagcggcgagctggagctggccctggaggaggagctggccctgctggccgccggcgagagacccagcgaccccggcgagcacccccaggccgagcccggcagcctggccgagggcgccggcccccagcccccccccagccaggaccccgagctgctgagcgtgatcagacagaaggagaaggacctggtgctggccgccagactgggcaaggccctgctggagagaaaccaggacatgagcagacagtacgagcagatgcacaaggagctgaccgacaagctggagcacctggagcaggagaagcacgagctgagaagaagattcgagaacagagagggcgagtgggagggcagagtgagcgagctggagagcgacgtgaagcagctgcaggacgagctggagagacagcagatccacctgagagaggccgacagagagaagagcagagccgtgcaggagctgagcgagcagaaccagagactgctggaccagctgagcagagccagcgaggtggagagacagctgagcatgcaggtgcacgccctgagagaggacttcagagagaagaacagcagcaccaaccagcacatcatcagactggagagcctgcaggccgagatcaagatgctgagcgacagaaagagagagctggagcacagactgagcgccaccctggaggagaacgacctgctgcagggcaccgtggaggagctgcaggacagagtgctgatcctggagagacagggccacgacaaggacctgcagctgcaccagagccagctggagctgcaggaggtgagactgagctgcagacagctgcaggtgaaggtggaggagctgaccgaggagagaagcctgcagagcagcgccgccaccagcaccagcctgctgagcgagatcgagcagagcatggaggccgaggagctggagcaggagagagagcagctgagactgcagctgtgggaggcctactgccaggtgagatacctgtgcagccacctgagaggcaacgacagcgccgacagcgccgtgagcaccgacagcagcatggacgagagcagcgagaccagcagcgccaaggacgtgcccgccggcagcctgagaaccgccctgaacgagctgaagagactgatccagagcatcgtggacggcatggagcccaccgtgaccctgctgagcgtggagatgaccgccctgaaggaggagagagacagactgagagtgaccagcgaggacaaggagcccaaggagcagctgcagaaggccatcagagacagagacgaggccatcgccaagaagaacgccgtggagctggagctggccaagtgcagaatggacatgatgagcctgaacagccagctgctggacgccatccagcagaagctgaacctgagccagcagctggaggcctggcaggacgacatgcacagagtgatcgacagacagctgatggacacccacctgaaggagagaagccagcccgccgccgccctgtgcagaggccacagcgccggcagaggcgacgagcccagcatcgccgagggcaagagactgttcagcttcttcagaaagatctag

SEQ ID NO: 11517 - DNA, 1086 bp, synthetic construct; identical to SEQ ID NO: 10271
  source 1..1086: mol_type = other DNA; note = Synthetic coding sequence

SEQ ID NO: 11518 - DNA, 3099 bp, synthetic construct
  source 1..3099: mol_type = other DNA; note = Synthetic coding sequence
atggccttcaccaactacagcagcctgaacagagcccagctgaccttcgagtacctgcacaccaacagcaccacccacgagttcctgttcggcgccctggccgagctggtggacaacgccagagacgccgacgccaccagaatcgacatctacgccgagagaagagaggacctgagaggcggcttcatgctgtgcttcctggacgacggcgccggcatggaccccagcgacgccgccagcgtgatccagttcggcaagagcgccaagagaacccccgagagcacccagatcggccagtacggcaacggcctgaagagcggcagcatgagaatcggcaaggacttcatcctgttcaccaagaaggaggacaccatgacctgcctgttcctgagcagaaccttccacgaggaggagggcatcgacgaggtgatcgtgcccctgcccacctggaacgccagaaccagagagcccgtgaccgacaacgtggagaagttcgccatcgagaccgagctgatctacaagtacagccccttcagaaccgaggaggaggtgatgacccagttcatgaagatccccggcgacagcggcaccctggtgatcatcttcaacctgaagctgatggacaacggcgagcccgagctggacatcatcagcaaccccagagacatccagatggccgagaccagccccgagggcaccaagcccgagagaagaagcttcagagcctacgccgccgtgctgtacatcgaccccagaatgagaatcttcatccacggccacaaggtgcagaccaagagactgagctgctgcctgtacaagcccagaatgtacaagtacaccagcagcagattcaagaccagagccgagcaggaggtgaagaaggccgagcacgtggccagaatcgccgaggagaaggccagagaggccgagagcaaggccagaaccctggaggtgagactgggcggcgacctgaccagagacagcagagtgatgctgagacaggtgcagaacagagccatcaccctgagaagagaggccgacgtgaagaagagaatcaaggaggccaagcagagagccctgaaggagcccaaggagctgaacttcgtgttcggcgtgaacatcgagcacagagacctggacggcatgttcatctacaactgcagcagactgatcaagatgtacgagaaggtgggcccccagctggagggcggcatggcctgcggcggcgtggtgggcgtggtggacgtgccctacctggtgctggagcccacccacaacaagcaggacttcgccgacgccaaggagtacagacacctgctgagagccatgggcgagcacctggcccagtactggaaggacatcgccatcgcccagagaggcatcatcaagttctgggacgagttcggctacctgagcgccaactggaaccagccccccagcagcgagctgagatacaagagaagaagagccatggagatccccaccaccatccagtgcgacctgtgcctgaagtggagaaccctgcccttccagctgagcagcgtggagaaggactaccccgacacctgggtgtgcagcatgaaccccgaccccgagcaggacagatgcgaggccagcgagcagaagcagaaggtgcccctgggcaccttcagaaaggacatgaagacccaggaggagaagcagaagcagctgaccgagaagatcagacagcagcaggagaagctggaggccctgcagaagaccacccccatcagaagccaggccgacctgaagaagctgcccctggaggtgaccaccagacccagcaccgaggagcccgtgagaagaccccagagacccagaagcccccccctgcccgccgtgatcagaaacgcccccagcagaccccccagcctgcccacccccagacccgccagccagcccagaaaggcccccgtgatcagcagcacccccaagctgcccgccctggccgccagagaggaggccagcaccagcagactgctgcagccccccgaggcccccagaaagcccgccaacaccctggtgaagaccgccagcagacccgcccccctggtgcagcagctgagccccagcctgctgcccaacagcaagagccccagagaggtgcccagccccaaggtgatcaagacccccgtggtgaagaagaccgagagccccatcaagctgagccccgccacccccagcagaaagagaagcgtggccgtgagcgacgaggaggaggtggaggaggaggccgagagaagaaaggagagatgcaagagaggcagattcgtggtgaaggaggagaagaaggacagcaacgagctgagcgacagcgccggcgaggaggacagcgccgacctgaagagagcccagaaggacaagggcctgcacgtggaggtgagagtgaacagagagtggtacaccggcagagtgaccgccgtggaggtgggcaagcacgtggtgagatggaaggtgaagttcgactacgtgcccaccgacaccacccccagagacagatgggtggagaagggcagcgaggacgtgagactgatgaagccccccagccccgagcaccagagcctggacacccagcaggagggcggcgaggaggaggtgggccccgtggcccagcaggccatcgccgtggccgagcccagcaccagcgagtgcctgagaatcgagcccgacaccaccgccctgagcaccaaccacgagaccatcgacctgctggtgcagatcctgagaaactgcctgagatacttcctgccccccagcttccccatcagcaagaagcagctgagcgccatgaacagcgacgagctgatcagcttccccctgaaggagtacttcaagcagtacgaggtgggcctgcagaacctgtgcaacagctaccagagcagagccgacagcagagccaaggccagcgaggagagcctgagaaccagcgagagaaagctgagagagaccgaggagaagctgcagaagctgagaaccaacatcgtggccctgctgcagaaggtgcaggaggacatcgacatcaacaccgacgacgagctggacgcctacatcgaggacctgatcaccaagggcgactag

SEQ ID NO: 11519 - DNA, 5943 bp, synthetic construct; identical to SEQ ID NO: 9642
  source 1..5943: mol_type = other DNA; note = Synthetic coding sequence

SEQ ID NO: 11520 - DNA, 513 bp, synthetic construct; identical to SEQ ID NO: 10286
  source 1..513: mol_type = other DNA; note = Synthetic coding sequence

SEQ ID NO: 11521 - DNA, 291 bp, synthetic construct
  source 1..291: mol_type = other DNA; note = Synthetic coding sequence
atgtgccacaccagctgcagccccgcctgccagcccacctgctgcatccacagcccctgccaggccagctgctacgtgcccgtgagctgccagagcagcgtgtgcatgcccgtgagctgcaccagaatcgtgtgcgtggcccccagctgccagcccagcgtgtgcgtgcccgtgagctgcagacccatcatctacgtgacccccagctgccagagcagcggctgctgccagcccccctgcaccaccgccctgtgcagacccatcagctgcagcacccccagctgctgctag

SEQ ID NO: 11522 - DNA, 879 bp, synthetic construct
  source 1..879: mol_type = other DNA; note = Synthetic coding sequence
atggccgccagcaccatgagcatcagaagcagcgcctacagcgacagctggcaggtggacgactgccccgagagctgctgcgagcccccctgctgcgccaccagctgctgcgcccccgccccctgcctgaccctggtgtgcacccccgtgagcagagtgagcagcccctgctgccaggtgacctgcgagcccagcccctgccagagcggctgcaccagcagctgcacccccagctgctgccagcagagcagctgccagcccgcctactgcaccagcagcccctgccagcaggcctgctgcgtgcccgtgtgctgcaagcccgtgtgctgcgtgcccgtgtgctgcggcgccagcagctgctgccagcagagcagctaccagcccgcctgctgcgccagcagcagctgccagcccgcctgctgcgtgcccgtgtgctgcaagcccgtgtgctgcgcccccacctgcagcgaggacagctacagctgctgccagcagagcagctgccagcccgcctgctgcaccagcagcccctgccagcagagctactgcgtgcccgtgtgctgcaagcccgtgtgctgcaagcccatctgctgcgtgcccgtgtgcagcggcgccagcagcctgtgctgccagcagagcggctgccagcccgcctgctgcaccaccagctgctgcagacccagcagcagcgtgagcctgctgtgcagacccgtgtgcagacccgcctgctgcgtgcccgtgagcagctgctgcgcccccaccagcagcagacagcccagctactgcagacaggccagctgcgtgagcctgctgtgcagacccgtgtgcagcagacccgcctgctacagcttcagcagcggccagaagagcagctgctag

SEQ ID NO: 11523 - DNA, 1608 bp, synthetic construct
  source 1..1608: mol_type = other DNA; note = Synthetic coding sequence
atgaagaagatcagcctgaagaccctgagaaagagcttcaacctgaacaagagcaaggaggagaccgacttcatggtggtgcagcagcccagcctggccagcgacttcggcaaggacgacagcctgttcggcagctgctacggcaaggacatggccagctgcgacatcaacggcgaggacgagaagggcggcaagaacagaagcaagagcgagagcctgatgggcaccctgaagagaagactgagcgccaagcagaagagcaagggcaaggccggcacccccagcggcagcagcgccgacgaggacaccttcagcagcagcagcgcccccatcgtgttcaaggacgtgagagcccagagacccatcagaagcaccagcctgagaagccaccactacagccccgccccctggcccctgagacccaccaacagcgaggagacctgcatcaagatggaggtgagagtgaaggccctggtgcacagcagcagccccagccccgccctgaacggcgtgagaaaggacttccacgacctgcagagcgagaccacctgccaggagcaggccaacagcctgaagagcagcgccagccacaacggcgacctgcacctgcacctggacgagcacgtgcccgtggtgatcggcctgatgccccaggactacatccagtacaccgtgcccctggacgagggcatgtaccccctggagggcagcagaagctactgcctggacagcagcagccccatggaggtgagcgccgtgcccccccaggtgggcggcagagccttccccgaggacgagagccaggtggaccaggacctggtggtggcccccgagatcttcgtggaccagagcgtgaacggcctgctgatcggcaccaccggcgtgatgctgcagagccccagagccggccacgacgacgtgccccccctgagccccctgctgccccccatgcagaacaaccagatccagagaaacttcagcggcctgaccggcaccgaggcccacgtggccgagagcatgagatgccacctgaacttcgaccccaacagcgcccccggcgtggccagagtgtacgacagcgtgcagagcagcggccccatggtggtgaccagcctgaccgaggagctgaagaagctggccaagcagggctggtactggggccccatcaccagatgggaggccgagggcaagctggccaacgtgcccgacggcagcttcctggtgagagacagcagcgacgacagatacctgctgagcctgagcttcagaagccacggcaagaccctgcacaccagaatcgagcacagcaacggcagattcagcttctacgagcagcccgacgtggagggccacaccagcatcgtggacctgatcgagcacagcatcagagacagcgagaacggcgccttctgctacagcagaagcagactgcccggcagcgccacctaccccgtgagactgaccaaccccgtgagcagattcatgcaggtgagaagcctgcagtacctgtgcagattcgtgatcagacagtacaccagaatcgacctgatccagaagctgcccctgcccaacaagatgaaggactacctgcaggagaagcactactag

SEQ ID NO: 11524 - DNA, 1260 bp, synthetic construct
  source 1..1260: mol_type = other DNA; note = Synthetic coding sequence
atggccgccagcagcctggagcagaagctgagcagactggaggccaagctgaagcaggagaacagagaggccagaagaagaatcgacctgaacctggacatcagcccccagagacccagacccaccctgcagctgcccctggccaacgacggcggcagcagaagccccagcagcgagagcagcccccagcaccccaccccccccgccagacccagacacatgctgggcctgcccagcaccctgttcacccccagaagcatggagagcatcgagatcgaccagaagctgcaggagatcatgaagcagaccggctacctgaccatcggcggccagagataccaggccgagatcaacgacctggagaacctgggcgagatgggcagcggcacctgcggccaggtgtggaagatgagattcagaaagaccggccacgtgatcgccgtgaagcagatgagaagaagcggcaacaaggaggagaacaagagaatcctgatggacctggacgtggtgctgaagagccacgactgcccctacatcgtgcagtgcttcggcaccttcatcaccaacaccgacgtgttcatcgccatggagctgatgggcacctgcgccgagaagctgaagaagagaatgcagggccccatccccgagagaatcctgggcaagatgaccgtggccatcgtgaaggccctgtactacctgaaggagaagcacggcgtgatccacagagacgtgaagcccagcaacatcctgctggacgagagaggccagatcaagctgtgcgacttcggcatcagcggcagactggtggacagcaaggccaagaccagaagcgccggctgcgccgcctacatggcccccgagagaatcgacccccccgaccccaccaagcccgactacgacatcagagccgacgtgtggagcctgggcatcagcctggtggagctggccaccggccagttcccctacaagaactgcaagaccgacttcgaggtgctgaccaaggtgctgcaggaggagccccccctgctgcccggccacatgggcttcagcggcgacttccagagcttcgtgaaggactgcctgaccaaggaccacagaaagagacccaagtacaacaagctgctggagcacagcttcatcaagagatacgagaccctggaggtggacgtggccagctggttcaaggacgtgatggccaagaccgagagccccagaaccagcggcgtgctgagccagccccacctgcccttcttcagatag

SEQ ID NO: 11525 - DNA, 963 bp, synthetic construct; identical to SEQ ID NO: 10260
  source 1..963: mol_type = other DNA; note = Synthetic coding sequence

SEQ ID NO: 11526 - DNA, 1737 bp, synthetic construct
  source 1..1737: mol_type = other DNA; note = Synthetic coding sequence
atggagctggagaacatcgtggccaacagcctgctgctgaaggccagacagggcggctacggcaagaagagcggcagaagcaagaagtggaaggagatcctgaccctgccccccgtgagccagtgcagcgagctgagacacagcatcgagaaggactacagcagcctgtgcgacaagcagcccatcggcagaagactgttcagacagttctgcgacaccaagcccaccctgaagagacacatcgagttcctggacgccgtggccgagtacgaggtggccgacgacgaggacagaagcgactgcggcctgagcatcctggacagattcttcaacgacaagctggccgcccccctgcccgagatcccccccgacgtggtgaccgagtgcagactgggcctgaaggaggagaaccccagcaagaaggccttcgaggagtgcaccagagtggcccacaactacctgagaggcgagcccttcgaggagtaccaggagagcagctacttcagccagttcctgcagtggaagtggctggagagacagcccgtgaccaagaacaccttcagacactacagagtgctgggcaagggcggcttcggcgaggtgtgcgcctgccaggtgagagccaccggcaagatgtacgcctgcaagaagctgcagaagaagagaatcaagaagagaaagggcgaggccatggccctgaacgagaagagaatcctggagaaggtgcagagcagattcgtggtgagcctggcctacgcctacgagaccaaggacgccctgtgcctggtgctgaccatcatgaacggcggcgacctgaagttccacatctacaacctgggcaaccccggcttcgacgagcagagagccgtgttctacgccgccgagctgtgctgcggcctggaggacctgcagagagagagaatcgtgtacagagacctgaagcccgagaacatcctgctggacgacagaggccacatcagaatcagcgacctgggcctggccaccgagatccccgagggccagagagtgagaggcagagtgggcaccgtgggctacatggcccccgaggtggtgaacaacgagaagtacaccttcagccccgactggtggggcctgggctgcctgatctacgagatgatccagggccacagccccttcaagaagtacaaggagaaggtgaagtgggaggaggtggaccagagaatcaagaacgacaccgaggagtacagcgagaagttcagcgaggacgccaagagcatctgcagaatgctgctgaccaagaaccccagcaagagactgggctgcagaggcgagggcgccgccggcgtgaagcagcaccccgtgttcaaggacatcaacttcagaagactggaggccaacatgctggagccccccttctgccccgacccccacgccgtgtactgcaaggacgtgctggacatcgagcagttcagcgtggtgaagggcatctacctggacaccgccgacgaggacttctacgccagattcgccaccggctgcgtgagcatcccctggcagaacgagatgatcgagagcggctgcttcaaggacatcaacaagagcgagagcgaggaggccctgcccctggacctggacaagaacatccacacccccgtgagcagacccaacagaggcttcttctacagactgttcagaagaggcggctgcctgaccatggtgcccagcgagaaggaggtggagcccaagcagtgctag

SEQ ID NO: 11527 - DNA, 2625 bp, synthetic construct
  source 1..2625: mol_type = other DNA; note = Synthetic coding sequence
atgaaccagagaagccacctgggcaccacctacctggacaccgccaagggcgccgtggagaccttcatgaagctgagagccagagaccccgccagcagaggcgacagatacatgctggtgaccttcgaggagcccccctacgccatcaaggccggctggaaggagaaccacgccaccttcatgaacgagctgaagaacctgcaggccgagggcctgaccaccctgggccagagcctgagaaccgccttcgacctgctgaacctgaacagactggtgaccggcatcgacaactacggccagggcagaaaccccttcttcctggagcccgccatcatcatcaccatcaccgacggcagcaagctgaccaccaccagcggcgtgcaggacgagctgcacctgcccctgaacagccccctgcccggcagcgagctgaccaaggagcccttcagatgggaccagagactgttcgccctggtgctgagactgcccggcaccatgagcgtggagagcgagcagctgaccggcgtgcccctggacgacagcgccatcacccccatgtgcgaggtgaccggcggcagaagctacagcgtgtgcagccccagaatgctgaaccagtgcctggagagcctggtgcagaaggtgcagagcggcgtggtgatcaacttcgagaaggccggccccgaccccagccccgtggaggacggccagcccgacatcagcagacccttcggcagccagccctggcacagctgccacaagctgatctacgtgagacccaaccccaagaccggcgtgcccatcggccactggcccgtgcccgagagcttctggcccgaccagaacagccccaccctgccccccagaaccagccaccccgtggtgaagttcagctgcaccgactgcgagcccatggtgatcgacaagctgcccttcgacaagtacgagctggagcccagccccctgacccagttcatcctggagagaaagagcccccagacctgctggcaggtgtacgtgagcaacagcgccaagtacagcgagctgggccaccccttcggctacctgaaggccagcaccgccctgaactgcgtgaacctgttcgtgatgccctacaactaccccgtgctgctgcccctgctggacgacctgttcaaggtgcacaaggccaagcccaccctgaagtggagacagagcttcgagagctacctgaagaccatgcccccctactacctgggccccctgaagaaggccgtgagaatgatgggcgcccccaacctgatcgccgacagcatggagtacggcctgagctacagcgtgatcagctacctgaagaagctgagccagcaggccaagatcgagagcgacagagtgatcggcagcgtgggcaagaaggtggtgcaggagaccggcatcaaggtgagaagcagaagccacggcctgagcatggcctacagaaaggacttccagcagctgctgcagggcatcagcgaggacgtgccccacagactgctggacctgaacatgaaggagtacaccggcttccaggtggccctgctgaacaaggacctgaagccccagaccttcagaaacgcctacgacatccccagaagaaacctgctggaccacctgaccagaatgagaagcaacctgctgaagagcaccagaagattcctgaagggccaggacgaggaccaggtgcacagcgtgcccatcgcccagatgggcaactaccaggagtacctgaagcaggtgcccagccccctgagagagctggaccccgaccagcccagaagactgcacaccttcggcaaccccttcaagctggacaagaagggcatgatgatcgacgaggccgacgagttcgtggccggcccccagaacaagcacaagagacccggcgagcccaacatgcagggcatccccaagagaagaagatgcatgagccccctgctgagaggcagacagcagaaccccgtggtgaacaaccacatcggcggcaagggcccccccgcccccaccacccaggcccagcccgacctgatcaagcccctgcccctgcacaagatcagcgagaccaccaacgacagcatcatccacgacgtggtggagaaccacgtggccgaccagctgagcagcgacatcacccccaacgccatggacaccgagttcagcgccagcagccccgccagcctgctggagagacccaccaaccacatggaggccctgggccacgaccacctgggcaccaacgacctgaccgtgggcggcttcctggagaaccacgaggagcccagagacaaggagcagtgcgccgaggagaacatccccgccagcagcctgaacaagggcaagaagctgatgcactgcagaagccacgaggaggtgaacaccgagctgaaggcccagatcatgaaggagatcagaaagcccggcagaaagtacgagagaatcttcaccctgctgaagcacgtgcagggcagcctgcagaccagactgatcttcctgcagaacgtgatcaaggaggccagcagattcaagaagagaatgctgatcgagcagctggagaacttcctggacgagatccacagaagagccaaccagatcaaccacatcaacagcaactag

SEQ ID NO: 11528 - DNA, 2340 bp, synthetic construct
  source 1..2340: mol_type = other DNA; note = Synthetic coding sequence
atggccgactacagcaacaagctgtactaccagctggagcaggagaccggcatccagaccggctacaccagaaccggcagcatcttcctggcccagacccaggacagactgatcagcctgaagagaatcaacgccggcctgaacgtgatcggcatccccagcgagatcatcagccccaagaaggtggccgagctgcaccacctgctgaacgtgcacgacctggtgggcgccatgcacgtgcccgaggacgccgtggtgagcagcgccgacgtggccctggccctggccagcgccgccagccagaacggcgtgcagatctacgacagaaccagcgtgctgcacgtgatggtgaagaagggccaggtgaccggcgtggagaccgacaagggccagatcgagtgccagtacttcgtgaactgcgccggccagtgggcctacgagctgggcctgagcaacgaggagcccgtgagcatccccctgcacgcctgcgagcacttctacctgctgaccagacccctggagacccccctgcagagcagcacccccaccatcgtggacgccgacggcagaatctacatcagaaactggcagggcggcatcctgagcggcggcttcgagaagaaccccaagcccatcttcaccgagggcaagaaccagctggagatccagaacctgcaggaggactgggaccacttcgagcccctgctgagcagcctgctgagaagaatgcccgagctggagaccctggagatcatgaagctggtgaactgccccgagaccttcacccccgacatgagatgcatcatgggcgagagccccgccgtgcagggctacttcgtgctggccggcatgaacagcgccggcctgagcttcggcggcggcgccggcaagtacctggccgagtggatggtgcacggctaccccagcgagaacgtgtgggagctggacctgaagagattcggcgccctgcagagcagcagaaccttcctgagacacagagtgatggaggtgatgcccctgatgtacgacctgaaggtgcccagatgggacttccagaccggcagacagctgagaaccagccccctgtacgacagactggacgcccagggcgccagatggatggagaagcacggcttcgagagacccaagtacttcgtgccccccgacaaggacctgctggccctggagcagagcaagaccttctacaagcccgactggttcgacatcgtggagagcgaggtgaagtgctgcaaggaggccgtgtgcgtgatcgacatgagcagcttcaccaagttcgagatcaccagcaccggcgaccaggccctggaggtgctgcagtacctgttcagcaacgacctggacgtgcccgtgggccacatcgtgcacaccggcatgctgaacgagggcggcggctacgagaacgactgcagcatcgccagactgaacaagagaagcttcttcatgatcagccccaccgaccagcaggtgcactgctgggcctggctgaagaagcacatgcccaaggacagcaacctgctgctggaggacgtgacctggaagtacaccgccctgaacctgatcggccccagagccgtggacgtgctgagcgagctgagctacgcccccatgacccccgaccacttccccagcctgttctgcaaggagatgagcgtgggctacgccaacggcatcagagtgatgagcatgacccacaccggcgagcccggcttcatgctgtacatccccatcgagtacgccctgcacgtgtacaacgaggtgatgagcgtgggccagaagtacggcatcagaaacgccggctactacgccctgagaagcctgagaatcgagaagttcttcgccttctggggccaggacatcaacaacctgaccacccccctggagtgcggcagagagagcagagtgaagctggagaagggcatggacttcatcggcagagacgccctgctgcagcagaagcagaacggcgtgtacaagagactgaccatgttcatcctggacgaccacgacagcgacctggacctgtggccctggtggggcgagcccatctacagaaacggccagtacgtgggcaagaccaccagcagcgcctacagctacagcctggagagacacgtgtgcctgggcttcgtgcacaacttcagcgaggacaccggcgaggagcaggtggtgaccgccgacttcatcaacagaggcgagtacgagatcgacatcgccggctacagattccaggccaaggccaagctgtaccccgtggccagcctgttcacccagaagagaagaaaggacgacatggagctgagcgacctgcacggcaagtag

SEQ ID NO: 11529 - DNA, 1191 bp, synthetic construct
  source 1..1191: mol_type = other DNA; note = Synthetic coding sequence
atggccaccagagtggaggaggccgccagaggcagaggcggcggcgccgaggaggccaccgaggccggcagaggcggcagaagaagaagccccagacagaagctggaggagagcagaagcgtgcagaagcagatgaagatcctgcagaagaagcaggcccagatcgtgaaggagaaggtgcacctgcagagcgagcacagcaaggccatcctggccagaagcaagctggagagcctgtgcagagagctgcagagacacaacaagaccctgaaggaggagaacatgcagcaggccagagaggaggaggagagaagaaaggaggccaccgcccacttccagatcaccctgaacgagatccaggcccagctggagcagcacgacatccacaacgccaagctgagacaggagaacatcgagctgggcgagaagctgaagaagctgatcgagcagtacgccctgagagaggagcacatcgacaaggtgttcaagcacaaggagctgcagcagcagctggtggacgccaagctgcagcagaccacccagctgatcaaggaggccgacgagaagcaccagagagagagagagttcctgctgaaggaggccaccgagagcagacacaagtacgagcagatgaagcagcaggaggtgcagctgaagcagcagctgagcctgtacatggacaagttcgaggagttccagaccaccatggccaagagcaacgagctgttcaccaccttcagacaggagatggagaagatgaccaagaagatcaagaagctggagaaggagaccatcatctggagaaccaagtgggagaacaacaacaaggccctgctgcagatggccgaggagaagaccgtgagagacaaggagtacaaggccctgcagatcaagctggagagactggagaagctgtgcagagccctgcagaccgagagaaacgagctgaacgagaaggtggaggtgctgaaggagcaggtgagcatcaaggccgccatcaaggccgccaacagagacctggccacccccgtgatgcagccctgcaccgccctggacagccacaaggagctgaacaccagcagcaagagagccctgggcgcccacctggaggccgagcccaagagccagagaagcgccgtgcagaagccccccagcaccggcagcgcccccgccatcgagagcgtggactag

SEQ ID NO: 11530 - DNA, 1443 bp, synthetic construct; identical to SEQ ID NO: 10873
  source 1..1443: mol_type = other DNA; note = Synthetic coding sequence

SEQ ID NO: 11531 - DNA, 3774 bp, synthetic construct
  source 1..3774: mol_type = other DNA; note = Synthetic coding sequence
atggcccacttcagcagcgaggaccaggccatgctgcaggccatgctgagaagactgttccagagcgtgaaggagaagatcaccggcgcccccagcctggagtgcgccgaggagatcctgctgcacctggaggagaccgacgagaacttccacaactacgagttcgtgaagtacctgagacagcacatcggcaacaccctgggcagcatgatcgaggaggagatggagaagtgcaccagcgacagaaaccagggcgaggagtgcggctacgacaccgtggtgcagcaggtgaccaagagaacccaggagagcaaggagtacaaggagatgatgcactacctgaagaacatcatgatcgccgtggtggagagcatgatcaacaagttcgaggaggacgagaccagaaaccaggagagacagaagaagatccagaaggagaagagccacagctacagaaccgacaactgcagcgacagcgacagcagcctgaaccagagctacaagttctgccagggcaagctgcagctgatcctggaccagctggaccccggccagcccaaggaggtgagatacgaggccctgcagaccctgtgcagcgccccccccagcgacgtgctgaactgcgagaactggaccaccctgtgcgagaagctgaccgtgagcctgagcgaccccgaccccgtgttcagcgacagaatcctgaagttctgcgcccagaccttcctgctgagccccctgcacatgaccaaggagatctacaccagcctggccaagtacctggagagctacttcctgagcagagagaaccacatccccaccctgagcgccggcgtggacatcaccaaccccaacatgaccagactgctgaagaaggtgagactgctgaacgagtaccagaaggaggcccccagcttctggatcagacaccccgagaagtacatggaggagatcgtggagagcaccctgagcctgctgaccgtgaagcacaaccagagccacgtggtgagccagaagatcctggaccccatctacttcttcgccctggtggacaccaaggccgtgtggttcaagaagtggatgcacgcccactacagcagaaccaccgtgctgagactgctggagaccaagtacaagagcctggtgaccaccgccatccagcagtgcgtgcagtacttcgagatgtgcaagaccagaaaggccgacgagaccctgggccacagcaagcactgcagaaacaagcagaagaccttctactacctgggccaggagctgcagtacatctacttcatccacagcctgtgcctgctgggcagactgctgatctacaagcagggcagaaagctgttccccatcaagctgaagaacaagaagggcctggtgagcctgatcgacctgctggtgctgttcacccagctgatctactacagccccagctgccccaagatgaccagcgccgcccacagcgagaactacagccccgccagcatggtgaccgaggtgctgtggatcctgagcgaccagaaggagtgcgccgtggagtgcctgtacaacaacatcgtgatcgagaccctgctgcagcccatccacaacctgatgaagggcaacgaggccagccccaactgcagcgagaccgccctgatccacatcgccggcatcctggccagaatcgccagcgtggaggagggcctgatcctgctgctgtacggcgccaacatgaacagcagcgaggagagccccaccggcgcccacatcatcgcccagttcagcaagaagctgctggacgaggacatcagcatcttcagcggcagcgagatgctgcccgtggtgaagggcgccttcatcagcgtgtgcagacacatctacagcacctgcgagggcctgcaggtgctgatcacctacaacctgcacgagagcatcgccaaggcctggaagaagaccagcctgctgagcgagagaatccccacccccgtggagggcagcgacagcgtgagcagcgtgagccaggagagccagaacatcatggcctgggaggacaacctgctggacgacctgctgcacttcgccgccacccccaagggcctgctgctgctgcagagaaccggcgccatcaacgagtgcgtgaccttcatcttcaacagatacgccaagaagctgcaggtgagcagacacaagaagttcggctacggcgtgctggtgaccagagtggccagcaccgccgccggcggcatcgccctgaagaagagcggcttcatcaacgagctgatcaccgagctgtggagcaacctggagtacggcagagacgacgtgagagtgacccaccccagaaccacccccgtggaccccatcgacagaagctgccagaagagcttcctggccctggtgaacctgctgagctaccccgccatctacgagctggtgagaaaccaggacctgcccaacaagaccgagtacagcctgagagaggtgcccacctgcgtgatcgacatcatcgacagactgatcatcctgaacagcgaggccaagatcagaagcctgttcaactacgagcagagccacatcttcggcctgagagacttcatcatcgacggcctgagcgtggagagaaaccacgtgctggtgagaatcaacctggtgggcggccccctggagagaatcctgccccccagactgctggagaagagcgacaacccctacccctggcccatgttcagcagctaccccctgcccaactgctacctgagcgacatcaccagaaacgccggcatcaagcaggacaacgacctggacaagctgctgctgtgcctgaagatcagcgacaagcagaccgagtggatcgagaactgccagagacagttctgcaagatgatgaaggccaagcccgacatcatcagcggcgaggccctgatcgagctgctggagaagttcgtgctgcacctgaccgagagccccagcgagtgctacttccccagcgtggagtacaccgccaccgacgccaacgtgaagaacgagagcctgagcagcgtgcagcagctgggcatcaagatgaccgtgagatacggcaagttcctgagcctgctgaaggacggcgccgagaacgacctgacctgggtgctgaagcactgcgagagattcctgaagcagcagcagaccagcatcaagagcagcctgctgtgcctgcagggcaactacgccggccacgactggttcgtgagcagcctgttcatgatcatgctgggcgacaaggagaagaccttccagttcctgcaccagttcagcagactgctgaccagcgccttcctgtggctgcccagactgcacatcagcagctacctgcccaacgacaccgtggagagcggcatccaccccgtgtacttctgcagcacccactacatcgagatgctgctgaaggccgagctgcccctggtgttcagcgccttccacatgagcggcttcgcccccagccagatctgcctgcagtggatcacccagtgcttctggaactacctggactggatcgagatctgccactacatcgccacctgcgtgttcctgggccccgactaccaggtgtacatctgcatcgccgtgttcaagcacctgcagcaggacatcctgcagcacacccagacccaggacctgcaggtgttcctgaaggaggaggccctgcacggcttcagagtgagcgactacttcgagtacatggagatcctggagcagaactacagaaccgtgctgctgagagacatgagaaacatcagactgcagagcacctag

SEQ ID NO: 11532 - DNA, 612 bp, synthetic construct
  source 1..612: mol_type = other DNA; note = Synthetic coding sequence
atggccaccccctacgtgaccgacgagaccggcggcaagtacatcgccagcacccagagacccgacggcacctggagaaagcagagaagagtgaaggagggctacgtgccccaggaggaggtgcccgtgtacgagaacaagtacgtgaagttcttcaagagcaagcccgagctgccccccggcctgagccccgaggccaccgcccccgtgacccccagcagacccgagggcggcgagcccggcctgagcaagaccgccaagagaaacctgaagagaaaggagaagagaagacagcagcaggagaagggcgaggccgaggccctgagcagaaccctggacaaggtgagcctggaggagaccgcccagctgcccagcgccccccagggcagcagagccgcccccaccgccgccagcgaccagcccgacagcgccgccaccaccgagaaggccaagaagatcaagaacctgaagaagaagctgagacaggtggaggagctgcagcagagaatccaggccggcgaggtgagccagcccagcaaggagcagctggagaagctggccagaagaagagccctggaggaggagctggaggacctggagctgggcctgtag

SEQ ID NO: 11533 - DNA, 729 bp, synthetic construct; identical to SEQ ID NO: 11148
  source 1..729: mol_type = other DNA; note = Synthetic coding sequence

SEQ ID NO: 11534 - DNA, 738 bp, synthetic construct; identical to SEQ ID NO: 9708
  source 1..738: mol_type = other DNA; note = Synthetic coding sequence

SEQ ID NO: 11535 - DNA, 1020 bp, synthetic construct
  source 1..1020: mol_type = other DNA; note = Synthetic coding sequence
atgatggacagccagctggtggccggcgtggccttcaagaagaccttcagctacgccggcttcgagatgcagcccaagaagtaccacaaccccaagatcgccctgctgaacgtggagctggagctgaaggccgagaaggacaacgccgagatcagagtgcacaccgtggaggactaccaggccatcgtggacgccgagtggaacatcctgtacgacaagctggagaagatccaccacagcggcgccaaggtggtgctgagcaagctgcccatcggcgacgtggccacccagtacttcgccgacagagacatgttctgcgccggcagagtgcccgaggaggacctgaagagaaccatgatggcctgcggcggcagcatccagaccagcgtgaacgccctgagcgccgacgtgctgggcagatgccaggtgttcgaggagacccagatcggcggcgagagatacaacttcttcaccggctgccccaaggccaagacctgcaccttcatcctgagaggcggcgccgagcagttcatggaggagaccgagagaagcctgcacgacgccatcatgatcgtgagaagagccatcaagaacgacagcgtggtggccggcggcggcgccatcgagatggagctgagcaagtacctgagagactacagcagaaccatccccggcaagcagcagctgctgatcggcgcctacgccaaggccctggagatcatccccagacagctgtgcgacaacgccggcttcgacgccaccaacatcctgaacaagctgagagccagacacgcccagggcggcacctggtacggcgtggacatcaacaacgaggacatcgccgacaacttcgaggccttcgtgtgggagcccgccatggtgagaatcaacgccctgaccgccgccagcgaggccgcctgcctgatcgtgagcgtggacgagaccatcaagaaccccagaagcaccgtggacgcccccaccgccgccggcagaggcagaggcagaggcagaccccactag

SEQ ID NO: 11536 - DNA, 768 bp, synthetic construct; identical to SEQ ID NO: 9605
  source 1..768: mol_type = other DNA; note = Synthetic coding sequence

SEQ ID NO: 11537 - DNA, 441 bp, synthetic construct
  source 1..441: mol_type = other DNA; note = Synthetic coding sequence
atggtgaacagctgctgcggcagcgtgtgcagcgaccagggctgcgaccagggcctgtgccaggagacctgctgcagacccagctgctgccagaccacctgctgctgccccagctgcgtggtgagcagctgctgcagacccagctgcagccagaccacctgctgccagaccacctgctgcagacccagctgctgccaccccgtgtgctgccagaccacctgcagacccagctgcggcgtgagcagctgctgcagacccctgtgctgccagaccacctgccaccccagctgcggcatgagcagctgctgcagacccctgtgctgccagaccacctgcagacccagctgcggcgtgagcagctgctgcagacccctgtgctgccagaccacctgctgcagagccacctgctgcagacccagctgctgcggcagcagctgctag

SEQ ID NO: 11538 - DNA, 1296 bp, synthetic construct; identical to SEQ ID NO: 11044
  source 1..1296: mol_type = other DNA; note = Synthetic coding sequence

SEQ ID NO: 11539 - DNA, 471 bp, synthetic construct
  source 1..471: mol_type = other DNA; note = Synthetic coding sequence
atgggctgctgcggctgcagcggcggctgcggcagcggctgcggcggctgcggcagcggcagcggcggctgcggcagcggctgcggcggctgcggcagcagctgctgcgtgcccatctgctgctgcaagcccgtgtgctgctgcgtgcccgcctgcagctgcagcagctgcggcagctgcggcggcagcaagggcggctgcggcagctgcggcagcagcaagggcggctgcggcagctgcggctgcagccagagcaactgctgcaagccctgctgcagcagcagcggctgcggcagcttctgctgccagagcagctgcagcaagccctgctgctgccagagcagctgctgccagagcagctgctgcaagccctgctgctgccagagcagctgctgccagagcagctgcttcaagccctgctgctgccagagcagctgctgcgtgcccgtgtgctgccagtgcaagatctag

SEQ ID NO: 11540 - DNA, 609 bp, synthetic construct
  source 1..609: mol_type = other DNA; note = Synthetic coding sequence
atgggctgctgcggctgcagcggcggctgcggcagcggctgcggcggctgcggcagcggctgcggcggctgcggcagcggctgcggcggctacggcagcggctgcggcggctgcggcagcagctgctgcgtgcccgtgtgctgctgcaagcccgtgtgctgctgcgtgcccgcctgcagctgcagcagctgcggcagctgcggcggcagcaagggcgactgcggcagctgcggcggcagcaagggcggctgcggcagctgcggcggcagcaagggcggctgcggcagctgcggcggcagcaagggcggctgcggcagctgcggcggcagcaagggcggctgcggcagctgcggcggcagcaagggcggctgcggcagctgcggcggcagcaagggcggctgcggcagctgcggctgcagccagtgcaactgctgcaagccctgctgctgcagcagcggctgcggcagctgctgccagagcagctgctgcaacccctgctgctgccagagcagctgctgcgtgcccgtgtgctgccagagcagctgctgcaagccctgctgctgccagagcagctgctgcgtgcccgtgtgctgccagtgcaagatctag

SEQ ID NO: 11541 - DNA, 498 bp, synthetic construct
  source 1..498: mol_type = other DNA; note = Synthetic coding sequence
atgggctgctgcggctgcagcgagggctgcggcagcggctgcggcggctgcggcagcggctgcggcggctgcggcagcggctgcggcggctgcggcagcagctgctgcgtgcccgtgtgctgctgcaagcccgtgtgctgctgcgtgcccgcctgcagctgcagcagctgcggcagctgcggcggcagcaagggcggctgcggcagctgcggcggcagcaagggcggctgcggcagctgcggcggcagcaagggcggctgcggcagctgcggctgcagccagtgcagctgctacaagccctgctgctgcagcagcggctgcggcagcagctgctgccagagcagctgctgcaagccctgctgctgccagagcagctgctgcaagccctgctgctgcagcagcggctgcggcagcagctgctgccagagcagctgctgcaacccctgctgcagccagagcagctgctgcgtgcccgtgtgctgccagtgcaagatctag

SEQ ID NO: 11542 - DNA, 3105 bp, synthetic construct
  source 1..3105: mol_type = other DNA; note = Synthetic coding sequence
atggccagcgtgttcatgtgcggcgtggaggacctgctgttcagcggcagcagattcgtgtggaacctgaccgtgagcaccctgagaagatggtacaccgagagactgagagcctgccaccaggtgctgagaacctggtgcggcctgcaggacgtgtaccagatgaccgagggcagacactgccaggtgcacctgctggacgacagaagactggagctgctggtgcagcccaagctgctggccagagagctgctggacctggtggccagccacttcaacctgaaggagaaggagtacttcggcatcaccttcatcgacgacaccggccagcagaactggctgcagctggaccacagagtgctggaccacgacctgcccaagaagcccggccccaccatcctgcacttcgccgtgagattctacatcgagagcatcagcttcctgaaggacaagaccaccgtggagctgttcttcctgaacgccaaggcctgcgtgcacaagggccagatcgaggtggagagcgagaccatcttcaagctggccgccttcatcctgcaggaggccaagggcgactacaccagcgacgagaacgccagaaaggacctgaagaccctgcccgccttccccaccaagaccctgcaggagcaccccagcctggcctactgcgaggacagagtgatcgagcactacctgaagatcaagggcctgaccagaggccaggccgtggtgcagtacatgaagatcgtggaggccctgcccacctacggcgtgcactactacgccgtgaaggacaagcagggcctgccctggtggctgggcatcagctacaagggcatcggccagtacgacatccaggacaaggtgaagcccagaaagctgttccagtggaagcagctggagaacctgtacttcagagagaagaagttcgccgtggaggtgcacgaccccagaagaatcagcgtgagcagaagaaccttcggccagagcggcctgttcgtgcagacctggtacgccaacagcagcctgatcaagagcatctgggtgatggccatcagccagcaccagttctacctggacagaaagcagagcaaggccaagatccccagcgccagaagcctggacgagatcgccatggacctgaccgagaccggcacccagagagccagcaagctggtgaccctggagaccaagagccagttcatcatggccagcaacggcagcctgatcagcagcggcagccaggacagcgaggtgagcgaggagcagaagagagagaagatcctggagctgaagaagaaggagaagctgctgcaggagaagctgctgaagaaggtggaggagctgaagaagatctgcctgagagaggccgagctgaccggcaagatgcccaaggagtaccccctgaacatcggcgagaagcccccccaggtgagaagaagagtgggcaccgccttcaagctggacgacaacctgctgcccagcgaggaggaccccgccctgcaggagctggagagcaacttcctgatccagcagaagctggtggaggccgccaagaagctggccaacgagcccgacctgtgcaagaccgtgaagaagaagagaaagcaggactacaccgacgccatgaagaagctgcaggagatcgagaacgccatcaacgagtacagaatcagatgcggcaagaagcccagccagaaggccaccgtgctgcccgaggacatcatccccagcgagagcagcagcctgagcgacaccaccacctacgacgaccccagcgacgccttcaccttccccggccagagaagcagcagcgtgccccacagccccagaatcctgccccccaagagcctgggcatcgagagaatccacttcagaaagagcagcatcaacgagcagttcgtggacaccagacagagcagagagatgctgagcacccacagcagcccctacaagaccctggagagaagaccccagggcggcagaagcatgcccaccacccccgtgctgaccagaaacgcctacagcagcagccacctggagcccgagagcagcagccagcactgcagacagagaagcggcagcctggagagccagagccacctgctgagcgagatggacagcgacaagcccttcttcagcctgagcaagagccagagaagcagcagcaccgagatcctggacgacggcagcagctacaccagccagagcagcaccgagtactactgcgtgacccccgtgaccggcccctactacaccacccagaccctggacaccagaaccagaggcagaagaagaagcaagaagcagaacgtgagcaccagcaacagcggcagcatgcccaacctggcccagaaggacagcctgagaaacggcgtgtacagcaagagccaggagccccccagcagcagctactacatcgccggctacaccccctacgccgagtgcgacttctactacagcggcggctacgtgtacgagaacgacaccgagggccagtacagcgtgaaccccagctacagaagcagcgcccactacggctacgagagacagagagactacagcagaagcttccacgaggacgaggtggacagagtgccccacaacccctacgccaccctgagactgcccagaaaggccgccgccaagagcgagcacatcaccaagaacatccacaaggccctggtggccgagcacctgagaggctggtaccagagagccagcggccagaaggaccagggccacagcccccagaccagcttcgacagcgacagaggcagccagagatgcctgggcttcgccggcctgcaggtgccctgcagccccagcagcagagccagcagctacagcagcgtgagcagcaccaacgccagcggcaactggagaacccagctgaccatcggcctgagcgactacgagacccccgcccacagcagctacaccagctgctacggcaacgtgtacaaccccctgcccagccccagcagacagtacaccgagatcagccagctggacggcaccgacggcaaccagctggaggacaacctggagagcagcgagcagagactgttctggcacgaggacagcaagcccggcaccctggtgtag

SEQ ID NO: 11543 - DNA, 501 bp, synthetic construct
  source 1..501: mol_type = other DNA; note = Synthetic coding sequence
atgctgagccagagctgcaacctggaccccctgaccgagacctacggcatccccttctacctgcagtacctggcccactggcccgagtacttcatcgtggccgaggcccccggcggcgagctgatgggctacatcatgggcaaggccgagggcagcgtggccagagaggagtggcacggccacgtgaccgccctgagcgtggcccccgagttcagaagactgggcctggccgccaagctgatggagctgctggaggagatcagcgagagaaagggcggcttcttcgtggacctgttcgtgagagtgagcaaccaggtggccgtgaacatgtacaagcagctgggctacagcgtgtacagaaccgtgatcgagtactacagcgccagcaacggcgagcccgacgaggacgcctacgacatgagaaaggccctgagcagagacaccgagaagaagagcatcatccccctgccccaccccgtgagacccgaggacatcgagtag

SEQ ID NO: 11544 - DNA, 399 bp, synthetic construct; identical to SEQ ID NO: 11136
  source 1..399: mol_type = other DNA; note = Synthetic coding sequence

SEQ ID NO: 11545 - DNA, 375 bp, synthetic construct; identical to SEQ ID NO: 10236
  source 1..375: mol_type = other DNA; note = Synthetic coding sequence

SEQ ID NO: 11546 - DNA, 336 bp, synthetic construct
  source 1..336: mol_type = other DNA; note = Synthetic coding sequence
ctgatggacctggacagcggcgacgtgaagagaagagtgcacctgttcgagacccagagaagaaccaaggaggaggaccccatcatccccttcagcgacggccccatcatcagcaagtggggcgccatcagcagaagcagcagaaccggctaccacaccaccgaccccgtgcaggccaccgccagccagggcagcgccaccaagcccatcagcgtgagcggcggcgtgcacatggccaccagaccccaccaccagcacaccatgctgaagggcaccgacagcctgctgctgatctacctggtgatcgagagcatccccgtgctgggcaccttctag

SEQ ID NO: 11547 - DNA, 399 bp, synthetic construct; identical to SEQ ID NO: 11136
  source 1..399: mol_type = other DNA; note = Synthetic coding sequence

SEQ ID NO: 11548 - DNA, 375 bp, synthetic construct; identical to SEQ ID NO: 10236
  source 1..375: mol_type = other DNA; note = Synthetic coding sequence

SEQ ID NO: 11549 - DNA, 1038 bp, synthetic construct
  source 1..1038: mol_type = other DNA; note = Synthetic coding sequence
atgctgcccaacaccggcagactggccggctgcaccgtgttcatcaccggcgccagcagaggcatcggcaaggccatcgccctgaaggccgccaaggacggcgccaacatcgtgatcgccgccaagaccgcccagccccaccccaagctgctgggcaccatctacaccgccgccgaggagatcgaggccgtgggcggcaaggccctgccctgcatcgtggacgtgagagacgagcagcagatcagcgccgccgtggagaaggccatcaagaagttcggcgcctacaccatcgccaagtacggcatgagcatgtacgtgctgggcatggccgaggagttcaagggcgagatcgccgtgaacgccctgtggcccaagaccgccatccacaccgccgccatggacatgctgggcggccccggcatcgagagccagtgcagaaaggtggacatcatcgccgacgccgcctacagcatcttccagaagcccaagagcttcaccggcaacttcgtgatcgacgagaacatcctgaaggaggagggcatcgagaacttcgacgtgtacgccatcaagcccggccaccccctgcagcccgacttcttcctggacgagtaccccgaggccgtgagcaagaaggtggagagcaccggcgccgtgcccgagttcaaggaggagaagctgcagctgcagcccaagcccagaagcggcgccgtggaggagaccttcagaatcgtgaaggacagcctgagcgacgacgtggtgaaggccacccaggccatctacctgttcgagctgagcggcgaggacggcggcacctggttcctggacctgaagagcaagggcggcaacgtgggctacggcgagcccagcgaccaggccgacgtggtgatgagcatgaccaccgacgacttcgtgaagatgttcagcggcaagctgaagcccaccatggccttcatgagcggcaagctgaagatcaagggcaacatggccctggccatcaagctggagaagctgatgaaccagatgaacgccagactgtag

SEQ ID NO: 11550 - DNA, 1257 bp, synthetic construct
  source 1..1257: mol_type = other DNA; note = Synthetic coding sequence
atgctgcccaacaccggcagactggccggctgcaccgtgttcatcaccggcgccagcagaggcatcggcaaggccatcgccctgaaggccgccaaggacggcgccaacatcgtgatcgccgccaagaccgcccagccccaccccaagctgctgggcaccatctacaccgccgccgaggagatcgaggccgtgggcggcaaggccctgccctgcatcgtggacgtgagagacgagcagcagatcagcgccgccgtggagaaggccatcaagaagttcggcggcatcgacatcctggtgaacaacgccagcgccatcagcctgaccaacaccctggacacccccaccaagagactggacctgatgatgaacgtgaacaccagaggcacctacctggccagcaaggcctgcatcccctacctgaagaagagcaaggtggcccacatcctgaacatcagcccccccctgaacctgaaccccgtgtggttcaagcagcactgcgcctacaccatcgccaagtacggcatgagcatgtacgtgctgggcatggccgaggagttcaagggcgagatcgccgtgaacgccctgtggcccaagaccgccatccacaccgccgccatggacatgctgggcggccccggcatcgagagccagtgcagaaaggtggacatcatcgccgacgccgcctacagcatcttccagaagcccaagagcttcaccggcaacttcgtgatcgacgagaacatcctgaaggaggagggcatcgagaacttcgacgtgtacgccatcaagcccggccaccccctgcagcccgacttcttcctggacgagtaccccgaggccgtgagcaagaaggtggagagcaccggcgccgtgcccgagttcaaggaggagaagctgcagctgcagcccaagcccagaagcggcgccgtggaggagaccttcagaatcgtgaaggacagcctgagcgacgacgtggtgaaggccacccaggccatctacctgttcgagctgagcggcgaggacggcggcacctggttcctggacctgaagagcaagggcggcaacgtgggctacggcgagcccagcgaccaggccgacgtggtgatgagcatgaccaccgacgacttcgtgaagatgttcagcggcaagctgaagcccaccatggccttcatgagcggcaagctgaagatcaagggcaacatggccctggccatcaagctggagaagctgatgaaccagatgaacgccagactgtag

SEQ ID NO: 11551 - DNA, 1077 bp, synthetic construct
  source 1..1077: mol_type = other DNA; note = Synthetic coding sequence
atgcccggctgcgagctgcccgtgggcacctgccccgacatgtgccccgccgccgagagagcccagagagagagagagcacagactgcacagactggaggtggtgcccggctgcagacaggacccccccagagccgacccccagagagccgtgaaggagtacagcagacccgccgccggcaagcccagacccccccccagccagctgagaccccccagcgtgctgctggccaccgtgagatacctggccggcgaggtggccgagagcgccgacatcgccagagccgaggtggccagcttcgtggccgacagactgagagccgtgctgctggacctggccctgcagggcgccggcgacgccgaggccgccgtggtgctggaggccgccctggccaccctgctgaccgtggtggccagactgggccccgacgccgccagaggccccgccgaccccgtgctgctgcaggcccaggtgcaggagggcttcggcagcctgagaagatgctacgccagaggcgccggcccccaccccagacagcccgccttccagggcctgttcctgctgtacaacctgggcagcgtggaggccctgcacgaggtgctgcagctgcccgccgccctgagagcctgcccccccctgagaaaggccctggccgtggacgccgccttcagagagggcaacgccgccagactgttcagactgctgcagaccctgccctacctgcccagctgcgccgtgcagtgccacgtgggccacgccagaagagaggccctggccagattcgccagagccttcagcacccccaagggccagaccctgcccctgggcttcatggtgaacctgctggccctggacggcctgagagaggccagagacctgtgccaggcccacggcctgcccctggacggcgaggagagagtggtgttcctgagaggcagatacgtggaggagggcctgccccccgccagcacctgcaaggtgctggtggagagcaagctgagaggcagaaccctggaggaggtggtgatggccgaggaggaggacgagggcaccgacagacccggcagccccgcctag

SEQ ID NO: 11552 - DNA, 150 bp, synthetic construct
  source 1..150: mol_type = other DNA; note = Synthetic coding sequence
atgagcagctgcgtgagcagccagcccagcagcaacagagccgccccccaggacgagctgggcggcagaggcagcagcagcagcgagagccagaagccctgcgaggccctgagaggcctgagcagcctgagcatccacctgggcatgtag

SEQ ID NO: 11553 - DNA, 2598 bp, synthetic construct
  source 1..2598: mol_type = other DNA; note = Synthetic coding sequence
atgcccgccgtgagcctgccccccaaggagaacgccctgttcaagagaatcctgagatgctacgagcacaagcagtacagaaacggcctgaagttctgcaagcagatcctgagcaaccccaagttcgccgagcacggcgagaccctggccatgaagggcctgaccctgaactgcctgggcaagaaggaggaggcctacgagctggtgagaagaggcctgagaaacgacctgaagagccacgtgtgctggcacgtgtacggcctgctgcagagaagcgacaagaagtacgacgaggccatcaagtgctacagaaacgccctgaagtgggacaaggacaacctgcagatcctgagagacctgagcctgctgcagatccagatgagagacctggagggctacagagagaccagataccagctgctgcagctgagacccgcccagagagccagctggatcggctacgccatcgcctaccacctgctggaggactacgagatggccgccaagatcctggaggagttcagaaagacccagcagaccagccccgacaaggtggactacgagtacagcgagctgctgctgtaccagaaccaggtgctgagagaggccggcctgtacagagaggccctggagcacctgtgcacctacgagaagcagatctgcgacaagctggccgtggaggagaccaagggcgagctgctgctgcagctgtgcagactggaggacgccgccgacgtgtacagaggcctgcaggagagaaaccccgagaactgggcctactacaagggcctggagaaggccctgaagcccgccaacatgctggagagactgaagatctacgaggaggcctggaccaagtaccccagaggcctggtgcccagaagactgcccctgaacttcctgagcggcgagaagttcaaggagtgcctggacaagttcctgagaatgaacttcagcaagggctgcccccccgtgttcaacaccctgagaagcctgtacaaggacaaggagaaggtggccatcatcgaggagctggtggtgggctacgagaccagcctgaagagctgcagactgttcaaccccaacgacgacggcaaggaggagccccccaccaccctgctgtgggtgcagtactacctggcccagcactacgacaagatcggccagcccagcatcgccctggagtacatcaacaccgccatcgagagcacccccaccctgatcgagctgttcctggtgaaggccaagatctacaagcacgccggcaacatcaaggaggccgccagatggatggacgaggcccaggccctggacaccgccgacagattcatcaacagcaagtgcgccaagtacatgctgaaggccaacctgatcaaggaggccgaggagatgtgcagcaagttcaccagagagggcaccagcgccgtggagaacctgaacgagatgcagtgcatgtggttccagaccgagtgcgcccaggcctacaaggccatgaacaagttcggcgaggccctgaagaagtgccacgagatcgagagacacttcatcgagatcaccgacgaccagttcgacttccacacctactgcatgagaaagatcaccctgagaagctacgtggacctgctgaagctggaggacgtgctgagacagcaccccttctacttcaaggccgccagaatcgccatcgagatctacctgaagctgcacgacaaccccctgaccgacgagaacaaggagcacgaggccgacaccgccaacatgagcgacaaggagctgaagaagctgagaaacaagcagagaagagcccagaagaaggcccagatcgaggaggagaagaagaacgccgagaaggagaagcagcagagaaaccagaagaagaagaaggacgacgacgacgaggagatcggcggccccaaggaggagctgatccccgagaagctggccaaggtggagacccccctggaggaggccatcaagttcctgacccccctgaagaacctggtgaagaacaagatcgagacccacctgttcgccttcgagatctacttcagaaaggagaagttcctgctgatgctgcagagcgtgaagagagccttcgccatcgacagcagccacccctggctgcacgagtgcatgatcagactgttcaacaccgtgtgcgagagcaaggacctgagcgacaccgtgagaaccgtgctgaagcaggagatgaacagactgttcggcgccaccaaccccaagaacttcaacgagaccttcctgaagagaaacagcgacagcctgccccacagactgagcgccgccaagatggtgtactacctggaccccagcagccagaagagagccatcgagctggccaccaccctggacgagagcctgaccaacagaaacctgcagacctgcatggaggtgctggaggccctgtacgacggcagcctgggcgactgcaaggaggccgccgagatctacagagccaactgccacaagctgttcccctacgccctggccttcatgccccccggctacgaggaggacatgaagatcaccgtgaacggcgacagcagcgccgaggccgaggagctggccaacgagatctag

SEQ ID NO: 11554 - DNA, 1797 bp, synthetic construct; identical to SEQ ID NO: 10093
  source 1..1797: mol_type = other DNA; note = Synthetic coding sequence

SEQ ID NO: 11555 - DNA, 1818 bp, synthetic construct
  source 1..1818: mol_type = other DNA; note = Synthetic coding sequence
atgggcggctgcttcagcaagcccaagcccgtggagctgaagatcgaggtggtgctgcccgagaaggagagaggcaaggaggagctgagcgccagcggcaagggcagccccagagcctaccagggcaacggcaccgccagacacttccacaccgaggagagactgagcaccccccacccctaccccagcccccaggactgcgtggaggccgccgtgtgccacgtgaaggacctggagaacggccagatgagagaggtggagctgggctggggcaaggtgctgctggtgaaggacaacggcgagttccacgccctgggccacaagtgcccccactacggcgcccccctggtgaagggcgtgctgagcagaggcagagtgagatgcccctggcacggcgcctgcttcaacatcagcaccggcgacctggaggacttccccggcctggacagcctgcacaagttccaggtgaagatcgagaaggagaaggtgtacgtgagagccagcaagcaggccctgcagctgcagagaagaaccaaggtgatggccaagtgcatcagccccagcgccggctacagcagcagcaccaacgtgctgatcgtgggcgccggcgccgccggcctggtgtgcgccgagaccctgagacaggagggcttcagcgacagaatcgtgctgtgcaccctggacagacacctgccctacgacagacccaagctgagcaagagcctggacacccagcccgagcagctggccctgagacccaaggagttcttcagagcctacggcatcgaggtgctgaccgaggcccaggtggtgaccgtggacgtgagaaccaagaaggtggtgttcaaggacggcttcaagctggagtacagcaagctgctgctggcccccggcagcagccccaagaccctgagctgcaagggcaaggaggtggagaacgtgttcaccatcagaacccccgaggacgccaacagagtggtgagactggccagaggcagaaacgtggtggtggtgggcgccggcttcctgggcatggaggtggccgcctacctgaccgagaaggcccacagcgtgagcgtggtggagctggaggagacccccttcagaagattcctgggcgagagagtgggcagagccctgatgaagatgttcgagaacaacagagtgaagttctacatgcagaccgaggtgagcgagctgagaggccaggagggcaagctgaaggaggtggtgctgaagagcagcaaggtggtgagagccgacgtgtgcgtggtgggcatcggcgccgtgcccgccaccggcttcctgagacagagcggcatcggcctggacagcagaggcttcatccccgtgaacaagatgatgcagaccaacgtgcccggcgtgttcgccgccggcgacgccgtgaccttccccctggcctggagaaacaacagaaaggtgaacatcccccactggcagatggcccacgcccagggcagagtggccgcccagaacatgctggcccaggaggccgagatgagcaccgtgccctacctgtggaccgccatgttcggcaagagcctgagatacgccggctacggcgagggcttcgacgacgtgatcatccagggcgacctggaggagctgaagttcgtggccttctacaccaagggcgacgaggtgatcgccgtggccagcatgaactacgaccccatcgtgagcaaggtggccgaggtgctggccagcggcagagccatcagaaagagagaggtggagctgttcgtgctgcacagcaagaccggcgacatgagctggctgaccggcaagggcagctag

SEQ ID NO: 11556 - DNA, 1374 bp, synthetic construct
  source 1..1374: mol_type = other DNA; note = Synthetic coding sequence
atgaaccagccctgcaacagcatggagcccagagtgatggacgacgacatgctgaagctggccgtgggcgaccagggcccccaggaggaggccggccagctggccaagcaggagggcatcctgttcaaggacgtgctgagcctgcagctggacttcagaaacatcctgagaatcgacaacctgtggcagttcgagaacctgagaaagctgcagctggacaacaacatcatcgagaagatcgagggcctggagaacctggcccacctggtgtggctggacctgagcttcaacaacatcgagaccatcgagggcctggacaccctggtgaacctggaggacctgagcctgttcaacaacagaatcagcaagatcgacagcctggacgccctggtgaagctgcaggtgctgagcctgggcaacaacagaatcgacaacatgatgaacatcatctacctgagaagattcaagtgcctgagaaccctgagcctgagcagaaaccccatcagcgaggccgaggactacaagatgttcatctgcgcctacctgcccgacctgatgtacctggactacagaagaatcgacgaccacaccaagaagctggccgaggccaagcaccagtacagcatcgacgagctgaagcaccaggagaacctgatgcaggcccagctggaggacgagcaggcccagagagaggagctggagaagcacaagaccgccttcgtggagcacctgaacggcagcttcctgttcgacagcatgtacgccgaggacagcgagggcaacaacctgagctacctgcccggcgtgggcgagctgctggagacctacaaggacaagttcgtgatcatctgcgtgaacatcttcgagtacggcctgaagcagcaggagaagagaaagaccgagctggacaccttcagcgagtgcgtgagagaggccatccaggagaaccaggagcagggcaagagaaagatcgccaagttcgaggagaagcacctgagcagcctgagcgccatcagagaggagctggagctgcccaacatcgagaagatgatcctggagtgcagcgccgacatcagcgagctgttcgacgccctgatgaccctggagatgcagctggtggagcagctggaggagaccatcaacatgttcgagagaaacatcgtggacatggtgggcctgttcatcgagaacgtgcagagcctgatggcccagtgcagagacctggagaaccaccaccacgagaagctgctggagatcagcatcagcaccctggagaagatcgtggagggcgacctggacgaggacctgcccaacgacctgagagccggcagattccagaagttcaactacgtggaggccagcggcaccttctag

SEQ ID NO: 11557 - DNA, 1374 bp, synthetic construct; identical to SEQ ID NO: 11556
  source 1..1374: mol_type = other DNA; note = Synthetic coding sequence

SEQ ID NO: 11558 - DNA, 1572 bp, synthetic construct; identical to SEQ ID NO: 9871
  source 1..1572: mol_type = other DNA; note = Synthetic coding sequence

SEQ ID NO: 11559 - DNA, 1572 bp, synthetic construct; identical to SEQ ID NO: 9871
  source 1..1572: mol_type = other DNA; note = Synthetic coding sequence

SEQ ID NO: 11560 - DNA, 1842 bp, synthetic construct; identical to SEQ ID NO: 9548
  source 1..1842: mol_type = other DNA; note = Synthetic coding sequence

SEQ ID NO: 11561 - DNA, 390 bp, synthetic construct; identical to SEQ ID NO: 10956
  source 1..390: mol_type = other DNA; note = Synthetic coding sequence

SEQ ID NO: 11562 - DNA, 390 bp, synthetic construct; identical to SEQ ID NO: 10956
  source 1..390: mol_type = other DNA; note = Synthetic coding sequence

SEQ ID NO: 11563 - DNA, 4128 bp, synthetic construct
  source 1..4128: mol_type = other DNA; note = Synthetic coding sequence
atggtgcccggcgaggagaaccagctggtgcccaaggaggacgtgttctggagatgcagacagaacatcttcgacgagatgaagaagaagttcctgcagatcgagaacgccgccgaggagcccagagtgctgtgcatcatccaggacaccaccaacagcaagaccgtgaacgagagaatcaccctgaacctgcccgccagcacccccgtgagaaagctgttcgaggacgtggccaacaaggtgggctacatcaacggcaccttcgacctggtgtggggcaacggcatcaacaccgccgacatggcccccctggaccacaccagcgacaagagcctgctggacgccaacttcgagcccggcaagaagaacttcctgcacctgaccgacaaggacggcgagcagccccagatcctgctggaggacagcagcgccggcgaggacagcgtgcacgacagattcatcggccccctgcccagagagggcagcggcggcagcaccagcgactacgtgagccagagctacagctacagcagcatcctgaacaagagcgagaccggctacgtgggcctggtgaaccaggccatgacctgctacctgaacagcctgctgcagaccctgttcatgacccccgagttcagaaacgccctgtacaagtgggagttcgaggagagcgaggaggaccccgtgaccagcatcccctaccagctgcagagactgttcgtgctgctgcagaccagcaagaagagagccatcgagaccaccgacgtgaccagaagcttcggctgggacagcagcgaggcctggcagcagcacgacgtgcaggagctgtgcagagtgatgttcgacgccctggagcagaagtggaagcagaccgagcaggccgacctgatcaacgagctgtaccagggcaagctgaaggactacgtgagatgcctggagtgcggctacgagggctggagaatcgacacctacctggacatccccctggtgatcagaccctacggcagcagccaggccttcgccagcgtggaggaggccctgcacgccttcatccagcccgagatcctggacggccccaaccagtacttctgcgagagatgcaagaagaagtgcgacgccagaaagggcctgagattcctgcacttcccctacctgctgaccctgcagctgaagagattcgacttcgactacaccaccatgcacagaatcaagctgaacgacagaatgaccttccccgaggagctggacatgagcaccttcatcgacgtggaggacgagaagagcccccagaccgagagctgcaccgacagcggcgccgagaacgagggcagctgccacagcgaccagatgagcaacgacttcagcaacgacgacggcgtggacgagggcatctgcctggagaccaacagcggcaccgagaagatcagcaagagcggcctggagaagaacagcctgatctacgagctgttcagcgtgatggtgcacagcggcagcgccgccggcggccactactacgcctgcatcaagagcttcagcgacgagcagtggtacagcttcaacgaccagcacgtgagcagaatcacccaggaggacatcaagaagacccacggcggcagcagcggcagcagaggctactacagcagcgccttcgccagcagcaccaacgcctacatgctgatctacagactgaaggaccccgccagaaacgccaagttcctggaggtggacgagtaccccgagcacatcaagaacctggtgcagaaggagagagagctggaggagcaggagaagagacagagagagatcgagagaaacacctgcaagatcaagctgttctgcctgcaccccaccaagcaggtgatgatggagaacaagctggaggtgcacaaggacaagaccctgaaggaggccgtggagatggcctacaagatgatggacctggaggaggtgatccccctggactgctgcagactggtgaagtacgacgagttccacgactacctggagagaagctacgagggcgaggaggacacccccatgggcctgctgctgggcggcgtgaagagcacctacatgttcgacctgctgctggagaccagaaagcccgaccaggtgttccagagctacaagcccggcgaggtgatggtgaaggtgcacgtggtggacctgaaggccgagagcgtggccgcccccatcaccgtgagagcctacctgaaccagaccgtgaccgagttcaagcagctgatcagcaaggccatccacctgcccgccgagaccatgagaatcgtgctggagagatgctacaacgacctgagactgctgagcgtgagcagcaagaccctgaaggccgagggcttcttcagaagcaacaaggtgttcgtggagagcagcgagaccctggactaccagatggccttcgccgacagccacctgtggaagctgctggacagacacgccaacaccatcagactgttcgtgctgctgcccgagcagagccccgtgagctacagcaagagaaccgcctaccagaaggccggcggcgacagcggcaacgtggacgacgactgcgagagagtgaagggccccgtgggcagcctgaagagcgtggaggccatcctggaggagagcaccgagaagctgaagagcctgagcctgcagcagcagcaggacggcgacaacggcgacagcagcaagagcaccgagaccagcgacttcgagaacatcgagagccccctgaacgagagagacagcagcgccagcgtggacaacagagagctggagcagcacatccagaccagcgaccccgagaacttccagagcgaggagagaagcgacagcgacgtgaacaacgacagaagcaccagcagcgtggacagcgacatcctgagcagcagccacagcagcgacaccctgtgcaacgccgacaacgcccagatccccctggccaacggcctggacagccacagcatcaccagcagcagaagaaccaaggccaacgagggcaagaaggagacctgggacaccgccgaggaggacagcggcaccgacagcgagtacgacgagagcggcaagagcagaggcgagatgcagtacatgtacttcaaggccgagccctacgccgccgacgagggcagcggcgagggccacaagtggctgatggtgcacgtggacaagagaatcaccctggccgccttcaagcagcacctggagcccttcgtgggcgtgctgagcagccacttcaaggtgttcagagtgtacgccagcaaccaggagttcgagagcgtgagactgaacgagaccctgagcagcttcagcgacgacaacaagatcaccatcagactgggcagagccctgaagaagggcgagtacagagtgaaggtgtaccagctgctggtgaacgagcaggagccctgcaagttcctgctggacgccgtgttcgccaagggcatgaccgtgagacagagcaaggaggagctgatcccccagctgagagagcagtgcggcctggagctgagcatcgacagattcagactgagaaagaagacctggaagaaccccggcaccgtgttcctggactaccacatctacgaggaggacatcaacatcagcagcaactgggaggtgttcctggaggtgctggacggcgtggagaagatgaagagcatgagccagctggccgtgctgagcagaagatggaagcccagcgagatgaagctggaccccttccaggaggtggtgctggagagcagcagcgtggacgagctgagagagaagctgagcgagatcagcggcatccccctggacgacatcgagttcgccaagggcagaggcaccttcccctgcgacatcagcgtgctggacatccaccaggacctggactggaaccccaaggtgagcaccctgaacgtgtggcccctgtacatctgcgacgacggcgccgtgatcttctacagagacaagaccgaggagctgatggagctgaccgacgagcagagaaacgagctgatgaagaaggagagcagcagactgcagaagaccggccacagagtgacctacagccccagaaaggagaaggccctgaagatctacctggacggcgcccccaacaaggacctgacccaggactag

SEQ ID NO: 11564 - DNA, 600 bp, synthetic construct
  source 1..600: mol_type = other DNA; note = Synthetic coding sequence
atgagaaccgccgacagagaggccagacccggcctgcccagcctgctgctgctgctgctggccggcgccggcctgagcgccgccagcccccccgccgcccccagattcaacgtgagcctggacagcgtgcccgagctgagatggctgcccgtgctgagacactacgacctggacctggtgagagccgccatggcccaggtgatcggcgacagagtgcccaagtgggtgcacgtgctgatcggcaaggtggtgctggagctggagagattcctgccccagcccttcaccggcgagatcagaggcatgtgcgacttcatgaacctgagcctggccgactgcctgctggtgaacctggcctacgagagcagcgtgttctgcaccagcatcgtggcccaggacagcagaggccacatctaccacggcagaaacctggactaccccttcggcaacgtgctgagaaagctgaccgtggacgtgcagttcctgaagaacggccagatcgccttcaccggcaccaccttcatcggctacgtgggcctgtggaccggccagagcccccacaagttcaccgtgagcggcgacgagagagacccccactag

SEQ ID NO: 11565 - DNA, 972 bp, synthetic construct
  source 1..972: mol_type = other DNA; note = Synthetic coding sequence
atgagaaccgccgacagagaggccagacccggcctgcccagcctgctgctgctgctgctggccggcgccggcctgagcgccgccagcccccccgccgcccccagattcaacgtgagcctggacagcgtgcccgagctgagatggctgcccgtgctgagacactacgacctggacctggtgagagccgccatggcccaggtgatcggcgacagagtgcccaagtgggtgcacgtgctgatcggcaaggtggtgctggagctggagagattcctgccccagcccttcaccggcgagatcagaggcatgtgcgacttcatgaacctgagcctggccgactgcctgctggtgaacctggcctacgagagcagcgtgttctgcaccagcatcgtggcccaggacagcagaggccacatctaccacggcagaaacctggactaccccttcggcaacgtgctgagaaagctgaccgtggacgtgcagttcctgaagaacggccagatcgccttcaccggcaccaccttcatcggctacgtgggcctgtggaccggccagagcccccacaagttcaccgtgagcggcgacgagagagacaagggctggtggtgggagaacgccatcgccgccctgttcagaagacacatccccgtgagctggctgatcagagccaccctgagcgagagcgagaacttcgaggccgccgtgggcaagctggccaagacccccctgatcgccgacgtgtactacatcgtgggcggcaccagccccagagagggcgtggtgatcaccagaaacagagacggccccgccgacatctggcccctggaccccctgaacggcgcctggttcagagtggagaccaactacgaccactggaagcccgcccccaaggaggacgacagaagaaccagcgccatcaaggccctgaacgccaccggccaggccaacctgagcctggaggccctgttccagtag

SEQ ID NO: 11566 - DNA, 4539 bp, synthetic construct
  source 1..4539: mol_type = other DNA; note = Synthetic coding sequence
atggccgccgccgccggcaacagagccagcagcagcggcttccccggcgccagagccaccagccccgaggccggcggcggcggcggcgccctgaaggccagcagcgcccccgccgccgccgccggcctgctgagagaggccggcagcggcggcagagagagagccgactggagaagaagacagctgagaaaggtgagaagcgtggagctggaccagctgcccgagcagcccctgttcctggccgccagcccccccgccagcagcaccagccccagccccgagcccgccgacgccgccggcagcggcaccggcttccagcccgtggccgtgccccccccccacggcgccgccagcagaggcggcgcccacctgaccgagagcgtggccgcccccgacagcggcgccagcagccccgccgccgccgagcccggcgagaagagagcccccgccgccgagcccagccccgccgccgcccccgccggcagagagatggagaacaaggagaccctgaagggcctgcacaagatggacgacagacccgaggagagaatgatcagagagaagctgaaggccacctgcatgcccgcctggaagcacgagtggctggagagaagaaacagaagaggccccgtggtggtgaagcccatccccgtgaagggcgacggcagcgagatgaaccacctggccgccgagagccccggcgaggtgcaggccagcgccgccagccccgccagcaagggcagaagaagccccagccccggcaacagccccagcggcagaaccgtgaagagcgagagccccggcgtgagaagaaagagagtgagccccgtgcccttccagagcggcagaatcaccccccccagaagagcccccagccccgacggcttcagcccctacagccccgaggagaccaacagaagagtgaacaaggtgatgagagccagactgtacctgctgcagcagatcggccccaacagcttcctgatcggcggcgacagccccgacaacaagtacagagtgttcatcggcccccagaactgcagctgcgccagaggcaccttctgcatccacctgctgttcgtgatgctgagagtgttccagctggagcccagcgaccccatgctgtggagaaagaccctgaagaacttcgaggtggagagcctgttccagaagtaccacagcagaagaagcagcagaatcaaggcccccagcagaaacaccatccagaagttcgtgagcagaatgagcaacagccacaccctgagcagcagcagcaccagcaccagcagcagcgagaacagcatcaaggacgaggaggagcagatgtgccccatctgcctgctgggcatgctggacgaggagagcctgaccgtgtgcgaggacggctgcagaaacaagctgcaccaccactgcatgagcatctgggccgaggagtgcagaagaaacagagagcccctgatctgccccctgtgcagaagcaagtggagaagccacgacttctacagccacgagctgagcagccccgtggacagccccagcagcctgagagccgcccagcagcagaccgtgcagcagcagcccctggccggcagcagaagaaaccaggagagcaacttcaacctgacccactacggcacccagcagatcccccccgcctacaaggacctggccgagccctggatccaggtgttcggcatggagctggtgggctgcctgttcagcagaaactggaacgtgagagagatggccctgagaagactgagccacgacgtgagcggcgccctgctgctggccaacggcgagagcaccggcaacagcggcggcagcagcggcagcagccccagcggcggcgccaccagcggcagcagccagaccagcatcagcggcgacgtggtggaggcctgctgcagcgtgctgagcatggtgtgcgccgaccccgtgtacaaggtgtacgtggccgccctgaagaccctgagagccatgctggtgtacaccccctgccacagcctggccgagagaatcaagctgcagagactgctgcagcccgtggtggacaccatcctggtgaagtgcgccgacgccaacagcagaaccagccagctgagcatcagcaccctgctggagctgtgcaagggccaggccggcgagctggccgtgggcagagagatcctgaaggccggcagcatcggcatcggcggcgtggactacgtgctgaactgcatcctgggcaaccagaccgagagcaacaactggcaggagctgctgggcagactgtgcctgatcgacagactgctgctggagttccccgccgagttctacccccacatcgtgagcaccgacgtgagccaggccgagcccgtggagatcagatacaagaagctgctgagcctgctgaccttcgccctgcagagcatcgacaacagccacagcatggtgggcaagctgagcagaagaatctacctgagcagcgccagaatggtgaccaccgtgccccacgtgttcagcaagctgctggagatgctgagcgtgagcagcagcacccacttcaccagaatgagaagaagactgatggccatcgccgacgaggtggagatcgccgaggccatccagctgggcgtggaggacaccctggacggccagcaggacagcttcctgcaggccagcgtgcccaacaactacctggagaccaccgagaacagcagccccgagtgcaccgtgcacctggagaagaccggcaagggcctgtgcgccaccaagctgagcgccagcagcgaggacatcagcgagagactggccagcatcagcgtgggccccagcagcagcaccaccaccaccaccaccaccaccgagcagcccaagcccatggtgcagaccaagggcagaccccacagccagtgcctgaacagcagccccctgagccaccacagccagctgatgttccccgccctgagcacccccagcagcagcacccccagcgtgcccgccggcaccgccaccgacgtgagcaagcacagactgcagggcttcatcccctgcagaatccccagcgccagcccccagacccagagaaagttcagcctgcagttccacagaaactgccccgagaacaaggacagcgacaagctgagccccgtgttcacccagagcagacccctgcccagcagcaacatccacagacccaagcccagcagacccacccccggcaacaccagcaagcagggcgaccccagcaagaacagcatgaccctggacctgaacagcagcagcaagtgcgacgacagcttcggctgcagcagcaacagcagcaacgccgtgatccccagcgacgagaccgtgttcacccccgtggaggagaagtgcagactggacgtgaacaccgagctgaacagcagcatcgaggacctgctggaggccagcatgcccagcagcgacaccaccgtgaccttcaagagcgaggtggccgtgctgagccccgagaaggccgagaacgacgacacctacaaggacgacgtgaaccacaaccagaagtgcaaggagaagatggaggccgaggaggaggaggccctggccatcgccatggccatgagcgccagccaggacgccctgcccatcgtgccccagctgcaggtggagaacggcgaggacatcatcatcatccagcaggacacccccgagaccctgcccggccacaccaaggccaagcagccctacagagaggacaccgagtggctgaagggccagcagatcggcctgggcgccttcagcagctgctaccaggcccaggacgtgggcaccggcaccctgatggccgtgaagcaggtgacctacgtgagaaacaccagcagcgagcaggaggaggtggtggaggccctgagagaggagatcagaatgatgagccacctgaaccaccccaacatcatcagaatgctgggcgccacctgcgagaagagcaactacaacctgttcatcgagtggatggccggcggcagcgtggcccacctgctgagcaagtacggcgccttcaaggagagcgtggtgatcaactacaccgagcagctgctgagaggcctgagctacctgcacgagaaccagatcatccacagagacgtgaagggcgccaacctgctgatcgacagcaccggccagagactgagaatcgccgacttcggcgccgccgccagactggccagcaagggcaccggcgccggcgagttccagggccagctgctgggcaccatcgccttcatggcccccgaggtgctgagaggccagcagtacggcagaagctgcgacgtgtggagcgtgggctgcgccatcatcgagatggcctgcgccaagcccccctggaacgccgagaagcacagcaaccacctggccctgatcttcaagatcgccagcgccaccaccgcccccagcatccccagccacctgagccccggcctgagagacgtggccctgagatgcctggagctgcagccccaggacagaccccccagcagagagctgctgaagcaccccgtgttcagaaccacctggtag

SEQ ID NO: 11567 - DNA, 2274 bp, synthetic construct
  source 1..2274: mol_type = other DNA; note = Synthetic coding sequence
gccgacggcggcgacagccaggccttcagatgcaccagctgcggccacgccggcaccacccccgcccccagagaggccctgagccccgccgacgcccacgtgggcagaggcttcgccgagagagagcccatccccgcccagggcctgctggtgctggccgtgctgagcgacggcgccggcgaccacatcagacagagactgctgccccccctgctgcagatcgtgtgcaagggcctggaggaccccagccaggtggtgagaaacgccgccctgttcgccctgggccagttcagcgagaacctgcagccccacatcagcagctacagcagagaggtgatgcccctgctgctggcctacctgaagagcgtgcccctgggccacacccaccacctggccaaggcctgctacgccctggagaacttcgtggagaacctgggccccaaggtgcagccctacctgcccgagctgatggagtgcatgctgcagctgctgagaaaccccagcagccccagagccaaggagctggccgtgagcgccctgggcgccatcgccaccgccgcccaggccagcctgctgccctacttccccgccatcatggagcacctgagagagttcctgctgaccggcagagaggacctgcagcccgtgcagatccagagcctggagaccctgggcgtgctggccagagccgtgggcgagcccatgagacccctggccgaggagtgctgccagctgggcctgggcctgtgcgaccaggtggacgaccccgacctgagaagatgcacctacagcctgttcgccgccctgagcggcctgatgggcgagggcctggccccccacctggagcagatcaccaccctgatgctgctgagcctgagaagcaccgagggcatcgtgccccagtacgacggcagcagcagcttcctgctgttcgacgacgagagcgacggcgaggaggaggaggagctgatggacgaggacgtggaggaggaggacgacagcgagatcagcggctacagcgtggagaacgccttcttcgacgagaaggaggacacctgcgccgccgtgggcgagatcagcgtgaacaccagcgtggccttcctgccctacatggagagcgtgttcgaggaggtgttcaagctgctggagtgcccccacctgaacgtgagaaaggccgcccacgaggccctgggccagttctgctgcgccctgcacaaggcctgccagagctgccccagcgagcccaacaccgccgccctgcaggccgccctggccagagtggtgcccagctacatgcaggccgtgaacagagagagagagagacaggtggtgatggccgtgctggaggccctgaccggcgtgctgagaagctgcggcaccctgaccctgaagccccccggcagactggccgagctgtgcggcgtgctgaaggccgtgctgcagagaaagaccgcctgccaggacaccgacgaggaggaggaggaggaggacgacgaccaggccgagtacgacgccatgctgctggagcacgccggcgaggccatccccgccctggccgccgccgccggcggcgacagcttcgcccccttcttcgccggcttcctgcccctgctggtgtgcaagaccaagcagggctgcaccgtggccgagaagagcttcgccgtgggcaccctggccgagaccatccagggcctgggcgccgccagcgcccagttcgtgagcagactgctgcccgtgctgctgagcaccgcccaggaggccgaccccgaggtgagaagcaacgccatcttcggcatgggcgtgctggccgagcacggcggccaccccgcccaggagcacttccccaagctgctgggcctgctgttccccctgctggccagagagagacacgacagagtgagagacaacatctgcggcgccctggccagactgctgatggccagccccaccagaaagcccgagccccaggtgctggccgccctgctgcacgccctgcccctgaaggaggacctggaggagtgggtgaccatcggcagactgttcagcttcctgtaccagagcagccccgaccaggtgatcgacgtggcccccgagctgctgagaatctgcagcctgatcctggccgacaacaagatcccccccgacaccaaggccgccctgctgctgctgctgaccttcctggccaagcagcacaccgacagcttccaggccgccctgggcagcctgcccgtggacaaggcccaggagctgcaggccgtgctgggcctgagctag

SEQ ID NO: 11568 - DNA, 1812 bp, synthetic construct
  source 1..1812: mol_type = other DNA; note = Synthetic coding sequence
atgggcgtgatccccgagggccccctgtgggtgagcggcagcgacgacaacctgagcggcaccagcggcatggaggtggacgacagagtgagcgccctggagcagagactgcagctgcaggaggacgagctggccgtgctgaaggccgccctggccgacgccctgagaagactgagagcctgcgaggagcagggcgccgccctgagagccagaggcacccccaagggcagagccccccccagactgggcaccaccgccagcgtgtgccagctgctgaagggcctgcccaccagaacccccctgaacggcagcggcccccccagaagagtgggcggctacgccaccagccccagcagccccaagaaggaggccaccagcggcagaagcagcgtgagaagatacctgagccccgagagactggccagcgtgagaagagaggaccccagaagcagaaccaccagcagcagcagcaactgcagcgccaagaaggagggcaagaccaaggaggtgatcttcagcgtggaggacggcagcgtgaagatgttcctgagaggcagacccgtgcccatgatgatccccgacgagctggcccccacctacagcctggacaccagaagcgagctgcccagctgcagactgaagctggagtgggtgtacggctacagaggcagagactgcagagccaacctgtacctgctgcccaccggcgagatcgtgtacttcgtggccagcgtggccgtgctgtacagcgtggaggagcagagacagagacactacctgggccacaacgacgacatcaagtgcctggccatccaccccgacatggtgaccatcgccaccggccaggtggccggcaccaccaaggagggcaagcccctgcccccccacgtgagaatctgggacagcgtgagcctgagcaccctgcacgtgctgggcctgggcgtgttcgacagagccgtgtgctgcgtgggcttcagcaagagcaacggcggcaacctgctgtgcgccgtggacgagagcaacgaccacatgctgagcgtgtgggactgggccaaggagaccaaggtggtggacgtgaagtgcagcaacgaggccgtgctggtggccaccttccaccccaccgaccccaccgtgctgatcacctgcggcaagagccacatctacttctggaccctggagggcggcagcctgagcaagagacagggcctgttcgagaagcacgagaagcccaagtacgtgctgtgcgtgaccttcctggagggcggcgacgtggtgaccggcgacagcggcggcaacctgtacgtgtggggcaagggcggcaacagaatcacccaggccgtgctgggcgcccacgacggcggcgtgttcggcctgtgcgccctgagagacggcaccctggtgagcggcggcggcagagacagaagagtggtgctgtggggcagcgactacagcaagctgcaggaggtggaggtgcccgaggacttcggccccgtgagaaccgtggccgagggccacggcgacaccctgtacgtgggcaccaccagaaacagcatcctgcagggcagcgtgcacaccggcttcagcctgctggtgcagggccacgtggaggagctgtggggcctggccacccaccccagcagagcccagttcgtgacctgcggccaggacaagctggtgcacctgtggagcagcgacagccaccagcccctgtggagcagaatcatcgaggtggagagcagaagcgtgacccaggccggcggccagtggcacgacctgggcagcctgcagccccccccccccggcttcaagtag

SEQ ID NO: 11569 - DNA, 996 bp, synthetic construct
  source 1..996: mol_type = other DNA; note = Synthetic coding sequence
atggccgagggcggcggccccgagcccggcgagcaggagagaagaagcagcggccccagaccccccagcgccagagacctgcagctggccctggccgagctgtacgaggacgaggtgaagtgcaagagcagcaagagcaacagacccaaggccaccgtgttcaagagccccagaacccccccccagagattctacagcagcgagcacgagtacagcggcctgaacatcgtgagacccagcaccggcaagatcgtgaacgagctgttcaaggaggccagagagcacggcgccgtgcccctgaacgaggccaccagagccagcggcgacgacaagagcaagagcttcaccggcggcggctacagactgggcagcagcttctgcaagagaagcgagtacatctacggcgagaaccagctgcaggacgtgcagatcctgctgaagctgtggagcaacggcttcagcctggacgacggcgagctgagaccctacaacgagcccaccaacgcccagttcctggagagcgtgaagagaggcgagatccccctggagctgcagagactggtgcacggcggccaggtgaacctggacatggaggaccaccaggaccaggagtacatcaagcccagactgagattcaaggccttcagcggcgagggccagaagctgggcagcctgacccccgagatcgtgagcacccccagcagccccgaggaggaggacaagagcatcctgaacgccgtggtgctgatcgacgacagcgtgcccaccaccaagatccagatcagactggccgacggcagcagactgatccagagattcaacagcacccacagaatcctggacgtgagaaacttcatcgtgcagagcagacccgagttcgccgccctggacttcatcctggtgaccagcttccccaacaaggagctgaccgacgagagcctgaccctgctggaggccgacatcctgaacaccgtgctgctgcagcagctgaagtag

SEQ ID NO: 11570 - DNA, 2064 bp, synthetic construct
  source 1..2064: mol_type = other DNA; note = Synthetic coding sequence
atggacggcggcgccctgaccgacaccagcctgaccgacagctacttcagcaccagcttcatcggcgtgaacggcttcggcagccccgtggagaccaagtaccccctgatgcagagaatgaccaacagcagcagcagccccagcctgctgaacgacagcgccaagccctacagcgcccacgaccccctgaccagccccgccagcagcctgttcaacgacttcggcgccctgaacatcagccagagaagaaagacccccaaccccaccgccagcgagttcatccccaagggcggcagcaccagcagactgagcaacgtgagccagagcaacatgagcgccttcagccaggtgttcagccaccccagcatgggcagccccgccaccgccggcctggcccccggcatgagcctgagcgccggcagcagccccctgcacagccccaagatcaccccccacaccagccccgcccccagaagaagaagccacacccccaaccccgccagctacatggtgcccagcagcgccagcaccagcgtgaacaaccccgtgagccagacccccagcagcggccaggtgatccagaaggagaccgtgggcggcaccacctacttctacaccgacaccacccccgcccccctgaccggcatggtgttccccaactaccacatctacccccccaccgccccccacgtggcctacatgcagcccaaggccaacgcccccagcttcttcatggccgacgagctgagacaggagctgatcaacagacacctgatcaccatggcccagatcgaccaggccgacatgcccgccgtgcccaccgaggtggacagctaccacagcctgttccccctggagcccctgcccccccccaacagaatccagaagagcagcaacttcggctacatcaccagctgctacaaggccgtgaacagcaaggacgacctgccctactgcctgagaagaatccacggcttcagactggtgaacaccaagtgcatggtgctggtggacatgtggaagaagatccagcacagcaacatcgtgaccctgagagaggtgttcaccaccaaggccttcgccgagcccagcctggtgttcgcctacgacttccacgccggcggcgagaccatgatgagcagacacttcaacgaccccaacgccgacgcctacttcaccaagagaaagtggggccagcacgagggccccctgcccagacagcacgccggcctgctgcccgagagcctgatctgggcctacatcgtgcagctgagcagcgccctgagaaccatccacaccgccggcctggcctgcagagtgatggaccccaccaagatcctgatcaccggcaagaccagactgagagtgaactgcgtgggcgtgttcgacgtgctgaccttcgacaacagccagaacaacaaccccctggccctgatggcccagtaccagcaggccgacctgatcagcctgggcaaggtggtgctggccctggcctgcaacagcctggccggcatccagagagagaacctgcagaaggccatggagctggtgaccatcaactacagcagcgacctgaagaacctgatcctgtacctgctgaccgaccagaacagaatgagaagcgtgaacgacatcatgcccatgatcggcgccagattctacacccagctggacgccgcccagatgagaaacgacgtgatcgaggaggacctggccaaggaggtgcagaacggcagactgttcagactgctggccaagctgggcaccatcaacgagagacccgagttccagaaggaccccacctggagcgagaccggcgacagatacctgctgaagctgttcagagaccacctgttccaccaggtgaccgaggccggcgccccctggatcgacctgagccacatcatcagctgcctgaacaagctggacgccggcgtgcccgagaagatcagcctgatcagcagagacgagaagagcgtgctggtggtgacctacagcgacctgaagagatgcttcgagaacaccttccaggagctgatcgccgccgccaacggccagctgtag

SEQ ID NO: 11571 - DNA, 6951 bp, synthetic construct
  source 1..6951: mol_type = other DNA; note = Synthetic coding sequence
atggacggcgtgagcagcgaggccaacgaggagaacgacaacatcgagagacccgtgagaagaagacacagcagcatcctgaagccccccagaagccccctgcaggacctgagaggcggcaacgagagagtgcaggagagcaacgccctgagaaacaagaagaacagcagaagagtgagcttcgccgacaccatcaaggtgttccagaccgagagccacatgaagatcgtgagaaagagcgagatggaggagaccgagaccggcgagaacctgctgctgatccagaacaagaagctggaggacaactactgcgagatcaccggcatgaacaccctgctgagcgcccccatccacacccagatgcagcagaaggagttcagcatcatcgagcacaccagagagagaaagcacgccaacgaccagaccgtgatcttcagcgacgagaaccagatggacctgaccagcagccacaccgtgatgatcaccaagggcctgctggacaaccccatcagcgagaagagcaccaagatcgacaccaccagcttcctggccaacctgaagctgcacaccgaggacagcagaatgaagaaggaggtgaacttcagcgtggaccagaacaccagcagcgagaacaagatcgacttcaacgacttcatcaagagactgaagaccggcaagtgcagcgccttccccgacgtgcccgacaaggagaacttcgagatccccatctacagcaaggagcccaacagcgccagcagcacccaccagatgcacgtgagcctgaaggaggacgagaacaacagcaacatcaccagactgttcagagagaaggacgacggcatgaacttcacccagtgccacaccgccaacatccagaccctgatccccaccagcagcgagaccaacagcagagagagcaagggcaacgacatcaccatctacggcaacgacttcatggacctgaccttcaaccacaccctgcagatcctgcccgccaccggcaacttcagcgagatcgagaaccagacccagaacgccatggacgtgaccaccggctacggcaccaaggccagcggcaacaagaccgtgttcaagagcaagcagaacaccgccttccaggacctgagcatcaacagcgccgacaagatccacatcaccagaagccacatcatgggcgccgagacccacatcgtgagccagacctgcaaccaggacgccagaatcctggccatgacccccgagagcatctacagcaaccccagcatccagggctgcaagaccgtgttctacagcagctgcaacgacgccatggagatgaccaagtgcctgagcaacatgagagaggagaagaacctgctgaagcacgacagcaactacgccaagatgtactgcaaccccgacgccatgagcagcctgaccgagaagaccatctacagcggcgaggagaacatggacatcaccaagagccacaccgtggccatcgacaaccagatcttcaagcaggaccagagcaacgtgcagatcgccgccgcccccacccccgagaaggagatgatgctgcagaacctgatgaccaccagcgaggacggcaagatgaacgtgaactgcaacagcgtgccccacgtgagcaaggagagaatccagcagagcctgagcaaccccctgagcatcagcctgaccgacagaaagaccgagctgctgagcggcgagaacatggacctgaccgagagccacaccagcaacctgggcagccaggtgcccctggccgcctacaacctggcccccgagagcaccagcgagagccacagccagagcaagagcagcagcgacgagtgcgaggagatcaccaagagcagaaacgagcccttccagagaagcgacatcatcgccaagaacagcctgaccgacacctggaacaaggacaaggactgggtgctgaagatcctgccctacctggacaaggacagcccccagagcgccgactgcaaccaggagatcgccaccagccacaacatcgtgtactgcggcggcgtgctggacaagcagatcaccaacagaaacaccgtgagctgggagcagagcctgttcagcaccaccaagcccctgttcagcagcggccagttcagcatgaagaaccacgacaccgccatcagcagccacaccgtgaagagcgtgctgggccagaacagcaagctggccgagcccctgagaaagagcctgagcaaccccacccccgactactgccacgacaagatgatcatctgcagcgaggaggagcagaacatggacctgaccaagagccacaccgtggtgatcggcttcggccccagcgagctgcaggagctgggcaagaccaacctggagcacaccaccggccagctgaccaccatgaacagacagatcgccgtgaaggtggagaagtgcggcaagagccccatcgagaagagcggcgtgctgaagagcaactgcatcatggacgtgctggaggacgagagcgtgcagaagcccaagttccccaaggagaagcagaacgtgaagatctggggcagaaagagcgtgggcggccccaagatcgacaagaccatcgtgttcagcgaggacgacaagaacgacatggacatcaccaagagctacaccatcgagatcaaccacagacccctgctggagaagagagactgccacctggtgcccctggccggcaccagcgagaccatcctgtacacctgcagacaggacgacatggagatcaccagaagccacaccaccgccctggagtgcaagaccgtgagccccgacgagatcaccaccagacccatggacaagaccgtggtgttcgtggacaaccacgtggagctggagatgaccgagagccacaccgtgttcatcgactaccaggagaaggagagaaccgacagacccaacttcgagctgagccagagaaagagcctgggcacccccaccgtgatctgcacccccaccgaggagagcgtgttcttccccggcaacggcgagagcgacagactggtggccaacgacagccagctgacccccctggaggagtggagcaacaacagaggccccgtggaggtggccgacaacatggagctgagcaagagcgccacctgcaagaacatcaaggacgtgcagagccccggcttcctgaacgagcccctgagcagcaagagccagagaagaaagagcctgaagctgaagaacgacaagaccatcgtgttcagcgagaaccacaagaacgacatggacatcacccagagctgcatggtggagatcgacaacgagagcgccctggaggacaaggaggacttccacctggccggcgccagcaagaccatcctgtacagctgcggccaggacgacatggagatcaccagaagccacaccaccgccctggagtgcaagaccctgctgcccaacgagatcgccatcagacccatggacaagaccgtgctgttcaccgacaactacagcgacctggaggtgaccgacagccacaccgtgttcatcgactgccaggccaccgagaagatcctggaggagaaccccaagttcggcatcggcaagggcaagaacctgggcgtgagcttccccaaggacaacagctgcgtgcaggagatcgccgagaagcaggccctggccgtgggcaacaagatcgtgctgcacaccgagcagaagcagcagctgttcgccgccaccaacagaaccaccaacgagatcatcaagttccacagcgccgccatggacgagaaggtgatcggcaaggtggtggaccaggcctgcaccctggagaaggcccaggtggagagctgccagctgaacaacagagacagaagaaacgtggacttcaccagcagccacgccaccgccgtgtgcggcagcagcgacaactacagctgcctgcccaacgtgatcagctgcaccgacaacctggagggcagcgccatgctgctgtgcgacaaggacgaggagaaggccaactactgccccgtgcagaacgacctggcctacgccaacgacttcgccagcgagtactacctggagagcgagggccagcccctgagcgccccctgccccctgctggagaaggaggaggtgatccagaccagcaccaagggccagctggactgcgtgatcaccctgcacaaggaccaggacctgatcaaggaccccagaaacctgctggccaaccagaccctggtgtacagccaggacctgggcgagatgaccaagctgaacagcaagagagtgagcttcaagctgcccaaggaccagatgaaggtgtacgtggacgacatctacgtgatcccccagccccacttcagcaccgaccagccccccctgcccaagaagggccagagcagcatcaacaaggaggaggtgatcctgagcaaggccggcaacaagagcctgaacatcatcgagaacagcagcgcccccatctgcgagaacaagcccaagatcctgaacagcgaggagtggttcgccgccgcctgcaagaaggagctgaaggagaacatccagaccaccaactacaacaccgccctggacttccacagcaacagcgacgtgaccaagcaggtgatccagacccacgtgaacgccggcgaggcccccgaccccgtgatcaccagcaacgtgccctgcttccacagcatcaagcccaacctgaacaacctgaacggcaagaccggcgagttcctggccttccagaccgtgcacctgccccccctgcccgagcagctgctggagctgggcaacaaggcccacaacgacatgcacatcgtgcaggccaccgagatccacaacatcaacatcatcagcagcaacgccaaggacagcagagacgaggagaacaagaagagccacaacggcgccgagaccaccagcctgccccccaagaccgtgttcaaggacaaggtgagaagatgcagcctgggcatcttcctgcccagactgcccaacaagagaaactgcagcgtgaccggcatcgacgacctggagcagatccccgccgacaccaccgacatcaaccacctggagacccagcccgtgagcagcaaggacagcggcatcggcagcgtggccggcaagctgaacctgagccccagccagtacatcaacgaggagaacctgcccgtgtaccccgacgagatcaacagcagcgacagcatcaacatcgagaccgaggagaaggccctgatcgagacctaccagaaggagatcagcccctacgagaacaagatgggcaagacctgcaacagccagaagagaacctgggtgcaggaggaggaggacatccacaaggagaagaagatcagaaagaacgagatcaagttcagcgacaccacccaggacagagagatcttcgaccaccacaccgaggaggacatcgacaagagcgccaacagcgtgctgatcaagaacctgagcagaacccccagcagctgcagcagcagcctggacagcatcaaggccgacggcaccagcctggacttcagcacctacagaagcagccagatggagagccagttcctgagagacaccatctgcgaggagagcctgagagagaagctgcaggacggcagaatcaccatcagagagttcttcatcctgctgcaggtgcacatcctgatccagaagcccagacagagcaacctgcccggcaacttcaccgtgaacaccccccccacccccgaggacctgatgctgagccagtacgtgtacagacccaagatccagatctacagagaggactgcgaggccagaagacagaagatcgaggagctgaagctgagcgccagcaaccaggacaagctgctggtggacatcaacaagaacctgtgggagaagatgagacactgcagcgacaaggagctgaaggccttcggcatctacctgaacaagatcaagagctgcttcaccaagatgaccaaggtgttcacccaccagggcaaggtggccctgtacggcaagctggtgcagagcgcccagaacgagagagagaagctgcagatcaagatcgacgagatggacaagatcctgaagaagatcgacaactgcctgaccgagatggagaccgagaccaagaacctggaggacgaggagaagaacaaccccgtggaggagtgggacagcgagatgagagccgccgagaaggagctggagcagctgaagaccgaggaggaggagctgcagagaaacctgctggagctggaggtgcagaaggagcagaccctggcccagatcgacttcatgcagaagcagagaaacagaaccgaggagctgctggaccagctgagcctgagcgagtgggacgtggtggagtggagcgacgaccaggccgtgttcaccttcgtgtacgacaccatccagctgaccatcaccttcgaggagagcgtggtgggcttccccttcctggacaagagatacagaaagatcgtggacgtgaacttccagagcctgctggacgaggaccaggccccccccagcagcctgctggtgcacaagctgatcttccagtacgtggaggagaaggagagctggaagaagacctgcaccacccagcaccagctgcccaagatgctggaggagttcagcctggtggtgcaccactgcagactgctgggcgaggagatcgagtacctgaagagatggggccccaactacaacctgatgaacatcgacatcaacaacaacgagctgagactgctgttcagcagcagcgccgccttcgccaagttcgagatcaccctgttcctgagcgcctactaccccagcgtgcccctgcccagcaccatccagaaccacgtgggcaacaccagccaggacgacatcgccaccatcctgagcaaggtgcccctggagaacaactacctgaagaacgtggtgaagcagatctaccaggacctgttccaggactgccacttctaccactag

SEQ ID NO: 11572 - DNA, 714 bp, synthetic construct
  source 1..714: mol_type = other DNA; note = Synthetic coding sequence
atgggctgctgcggctgcagcggcggctgcggcagcggctgcggcggcagaggcagcggctgcggcggctgcggcagcggctgcggcggctgcggcagcggctgcggcggctgcggcagcggctgcggcggctgcggcggctgcggcagcggctgcgccggctgcggcggctgcggcagcggctgctgcgtgcccgtgtgctgctgcaagcccatgtgctgctgcgtgcccgcctgcagctgcagcagctgcggcaagggcggctgcggcagctgcggcggcagcaagagaggctgcgtgagctgcggcgtgagcaagggcgcctgcggcagctgcggcggcagcaagggcggctgcggcagctgcggcggcagcaagggcggctgcggcagctgcggcggcagcaagggcggctgcggcagctgcggcggcagcaagggcggctgcggcagctacggctgcagccagagcagctgctgcaagccctgctgctgcagcagcggctgcggcagcagctgctgccagagcagctgctgcaagccctactgctgccagagcagctgctgcaagccctactgctgccagagcagctgctgcaagccctgcagctgcttcagcggctgcggcagcagctgctgccagagcagctgctacaagccctgctgctgccagagcagctgctgcgtgcccgtgtgctgccagtgcaagatctag

SEQ ID NO: 11573 - DNA, 717 bp, synthetic construct
  source 1..717: mol_type = other DNA; note = Synthetic coding sequence
atgggctgcagcggctgcagcggcggctgcggcagcagctgcggcggctgcggcagcagctgcggcggctgcggcagcggctacggcggctgcggcagcggctgctgcgtgcccgtgtgctgctgcaagcccgtgtgctgctgcgtgcccgcctgcagctgcagcagctgcggcagctgcggcggcagcaagggcgtgtgcggcagctgcggcggctgcaagggcggctgcggcagctgcggcggcagcaagggcggctgcggcagcagctgctgcgtgcccgtgtgctgcagcagcagctgcggcagctgcggcggcagcaagggcgtgtgcggcttcagaggcggcagcaagggcggctgcggcagctgcggctgcagccagtgcagctgctacaagccctgctgctgcagcagcggctgcggcagcagctgctgccagagcagctgctgcaagcccagctgcagccagagcagctgctgcaagccctgctgcagccagagcagctgctgcaagccctgctgctgcagcagcggctgcggcagcagctgctgccagagcagctgctgcaagccctgctgcagccagagcagctgctgcaagccctgctgctgcagcagcggctgcggcagcagctgctgccagagcagctgctgcaagccctgcagcagccagagcagctgctgcgtgcccatctgctgccagtgcaagatctag

SEQ ID NO: 11574 - DNA, 1473 bp, synthetic construct; identical to SEQ ID NO: 9885
  source 1..1473: mol_type = other DNA; note = Synthetic coding sequence

SEQ ID NO: 11575 - DNA, 5826 bp, synthetic construct
  source 1..5826: mol_type = other DNA; note = Synthetic coding sequence
ctgctgaccagcgtgctgatgcccagcttcggctacttcatcagaagccccgagaagagagagcccatcgccctgatcagaaagagcgacgtgagcagaggcaacctggagaaggagatggcccacctgaaccacgacctgtacagcggcgacctgaacgagcagagccaggcccagctgagcgagggcagcatcaccctgcaggtggaggccgtggagagcaccagccaggtggacgagaacgacgtgaccctgaccgccgacaagggcaagaccgaggacaccttcttcatgagcaacaagccccagagatacaaggacaagctgcccgacagcggcgacagcatgctgagaatcagcaccatcgccagcgccatcgccgaggccagcgtgaacaccgaccccagccagctggccgccatgatcaaggccctgagcaacaagaccagagacaagaccttccaggaggacgagaagcagaaggactacagccacgtgagacacttcctgcccaacgacctggagaagagcaacggcagcaacgccctggacatggagaagtacctgaagaagaccgaggtgagcagatacgagagcgccctggagaacttcagcagagccagcatgagcgacacctgggacctgagcctgcccaaggagcagaccacccaggacatccaccccgtggacctgagcgccaccagcgtgagcgtgagagcccccgaggagaacaccgccgccatcgtgtacgtggagaacggcgagagcgagaaccaggagagcttcagaaccatcaacagcagcaacagcgtgaccaacagagagaacaacagcgccgtggtggacgtgaagacctgcagcatcgacaacaagctgcaggacgtgggcaacgacgagaaggccaccagcatcagcacccccagcgacagctacagcagcgtgagaaaccccagaatcaccagcctgtgcctgctgaaggactgcgaggagatcagagacaacagagagaaccagagacagaacgagtgcgtgagcgagatcagcaacagcgagaagcacgtgaccttcgagaaccacagaatcgtgagccccaagaacagcgacctgaagaacaccagccccgagcacggcggcagaggcagcgaggacgagcaggagagcttcagacccagcaccagccccctgagccacagcagccccagcgagatcagcggcaccagcagcagcggctgcgccctggagagcttcggcagcgccgcccagcagcagcagcccccctgcgagcaggagctgagccccctggtgtgcagccccgccggcgtgagcagactgacctacgtgagcgagcccgagagcagctaccccaccaccgccaccgacgacgccctggaggacagaaagagcgacatcaccagcgagctgagcaccaccatcatccagggcagccccgccgccctggaggagagagccatggagaagctgagagagaaggtgcccttccagaacagaggcaagggcaccctgagcagcatcatccagaacaacagcgacaccagaaaggccaccgagaccaccagcctgagcagcaagcccgagtacgtgaagcccgacttcagatggagcaaggaccccagcagcaagagcggcaacctgctggagaccagcgaggtgggctggaccagcaaccccgaggagctggaccccatcagactggccctgctgggcaagagcggcctgagctgccaggtgggcagcgccaccagccaccccgtgagctgccaggagcccatcgacgaggaccagagaatcagccccaaggacaagagcaccgccggcagagagttcagcggccaggtgagccaccagaccaccagcgagaaccagtgcacccccatccccagcagcaccgtgcacagcagcgtggccgacatgcagaacatgcccgccgccgtgcacgccctgctgacccagcccagcctgagcgccgcccccttcgcccagagatacctgggcaccctgcccagcaccggcagcaccaccctgccccagtgccacgccggcaacgccaccgtgtgcggcttcagcggcggcctgccctaccccgccgtggccggcgagcccgtgcagaacagcgtggccgtgggcatctgcctgggcagcaacatcggcagcggctggatgggcaccagcagcctgtgcaacccctacagcaacaccctgaaccagaacctgctgagcaccaccaagcccttccccgtgcccagcgtgggcaccaactgcggcatcgagccctgggacagcggcgtgaccagcggcctgggcagcgtgagagtgcccgaggagctgaagctgccccacgcctgctgcgtgggcatcgccagccagaccctgctgagcgtgctgaaccccaccgacagatggctgcaggtgagcatcggcgtgctgagcatcagcgtgaacggcgagaaggtggacctgagcacctacagatgcctggtgttcaagaacaaggccatcatcagaccccacgccaccgaggagatcaaggtgctgttcatccccagcagccccggcgtgttcagatgcaccttcagcgtggccagctggccctgcagcaccgacgccgagaccatcgtgcaggccgaggccctggccagcaccgtgaccctgaccgccatcgccgagagccccgtgatcgaggtggagaccgagaagaaggacgtgctggacttcggcgacctgacctacggcggctggaaggccctgcccctgaagctgatcaacagaacccacgccaccgtgcccatcagactgatcatcaacgccaacgccgtggcctggagatgcttcaccttcagcaaggagagcgtgagagcccccgtggaggtggccccctgcgccgacgtggtgaccagactggccggccccagcgtggtgaaccacatgatgcccgccagctacgacggccaggaccccgagttcctgatgatctgggtgctgttccacagccccaagaagcagatcagcagcagcgacatcctggacagcgccgaggagttcagcgccaaggtggacatcgaggtggacagccccaaccccacccccgtgctgagaagcgtgagcctgagagccagagccggcatcgccagaatccacgcccccagagacctgcagaccatgcacttcctggccaaggtggccagcagcagaaagcagcacctgcccctgaagaacgccggcaacatcgaggtgtacctggacatcaaggtgcccgagcagggcagccacttcagcgtggaccccaagaacctgctgctgaagcccggcgaggagcacgaggtgatcgtgagcttcacccccaaggaccccgaggcctgcgaggagagaatcctgaagatcttcgtgcagcccttcggcccccagtacgaggtggtgctgaagggcgaggtgatcagcagcggcagcaagcccctgagccccggcccctgcctggacatccccagcatcctgagcaacaagcagttcctggcctggggcggcgtgcccctgggcagaacccagctgcagaagctggccctgagaaacaacagcgccagcaccacccagcacctgagactgctgatcagaggccaggaccaggactgcttccagctgcagaacaccttcggcagcgagcagagactgaccagcaactgcgagatcagaatccaccccaaggaggacatcttcatcagcgtgctgttcgcccccaccagactgagctgcatgctggccagactggagatcaagcagctgggcaacagaagccagcccggcatcaagttcaccatccccctgagcggctacggcggcaccagcaacctgatcctggagggcgtgaagaagctgagcgacagctacatggtgaccgtgaacggcctggtgcccggcaaggagagcaagatcgtgttcagcgtgagaaacaccggcagcagagccgccttcgtgaaggccgtgggcttcaaggacagccagaagaaggtgctgctggaccccaaggtgctgagaatcttccccgacaagttcgtgctgaaggagagaacccaggagaacgtgaccctgatctacaaccccagcgacagaggcatcaacaacaagaccgccaccgagctgagcaccgtgtacctgttcggcggcgacgagatcagcagacagcagtacagaagagccctgctgcacaagcccgagatgatcaagcagatcctgcccgagcacagcgtgctgcagaacatcaacttcgtggaggccttccaggacgagctgctggtgaccgaggtgtacgacctgccccagagacccaacgacgtgcagctgttctacggcagcatgtgcaagatcatcctgagcgtgatcggcgagttcagagactgcatcagcagcagagagttcctgcagcccagcagcaaggccagcctggagagcaccagcgacctgggcgccagcggcaagcacggcggcaacgtgagcctggacgtgctgcccgtgaagggcccccagggcagccccctgctgagcagagccgccagaccccccctggaccagctggccagcgaggagccctggaccgtgctgcccgagcacctgatcctggtggcccccagcccctgcgacatggccaagaccggcagattccagatcgtgaacaacagcgtgagactgctgagattcgagctgtgctggcccgcccactgcctgaccgtgaccccccagcacggctgcgtggcccccgagagcaagctgcagatcctggtgagccccaacagcagcctgagcaccaagcagagcatgttcccctggagcggcctgatctacatccactgcgacgacggccagaagaagatcgtgaaggtgcagatcagagaggacctgacccaggtggagctgctgaccagactgaccagcaagcccttcggcatcctgagccccgtgagcgagcccagcgtgagccacctggtgaagcccatgaccaagccccccagcaccaaggtggagatcagaaacaagagcatcaccttccccaccaccgagcccggcgagaccagcgagagctgcctggagctggagaaccacggcaccaccgacgtgaagtggcacctgagcagcctggcccccccctacgtgaagggcgtggacgagagcggcgacgtgttcagagccacctacgccgccttcagatgcagccccatcagcggcctgctggagagccacggcatccagaaggtgagcatcaccttcctgcccagaggcagaggcgactacgcccagttctgggacgtggagtgccaccccctgaaggagccccacatgaagcacaccctgagattccagctgagcggccagagcatcgaggccgagaacgagcccgagaacgcctgcctgagcaccgacagcctgatcaagatcgaccacctggtgaagcccagaagacaggccgtgagcgaggccagcgccagaatccccgagcagctggacgtgaccgccagaggcgtgtacgcccccgaggacgtgtacagattcagacccaccagcgtgggcgagagcagaaccctgaaggtgaacctgagaaacaacagcttcatcacccacagcctgaagttcctgagccccagagagcccttctacgtgaagcacagcaagtacagcctgagagcccagcactacatcaacatgcccgtgcagttcaagcccaagagcgccggcaagttcgaggccctgctggtgatccagaccgacgagggcaagagcatcgccatcagactgatcggcgaggccctgggcaagaactag

SEQ ID NO: 11576 - DNA, 111 bp, synthetic construct
  source 1..111: mol_type = other DNA; note = Synthetic coding sequence
atgtgctactacggcaactactacggcggctacggctacggcggcctgggctgcggctacggcagctgctgcggctgcggcttcagaagactgggctgcggctacggctag

SEQ ID NO: 11577 - DNA, 528 bp, synthetic construct
  source 1..528: mol_type = other DNA; note = Synthetic coding sequence
atgagctacaactgctgcagcggcaacttcagcagcagaagctgcggcgactacctgagataccccgccagcagcagaggcttcagctaccccagcaacctggtgtacagcaccgacctgtgcagccccagcacctgccagctgggcagcagcctgtacagaggctgccaggagatctgctgggagcccaccagctgccagaccagctacgtggagagcagcccctgccagaccagctgctacagacccagaaccagcctgctgtgcagcccctgcaagaccacctacagcggcagcctgggcttcggcagcagcagctgcagaagcctgggctacggcagcagaagctgctacagcgtgggctgcggcagcagcggcgtgagaagcctgggctacggcagctgcggcttccccagcctgggctacggcagcggcttctgcagacccacctacctggccagcagaagctgccagagcccctgctacagacccgcctacggcagcaccttctgcagaagcacctgctag

SEQ ID NO: 11578 - DNA, 324 bp, synthetic construct
  source 1..324: mol_type = other DNA; note = Synthetic coding sequence
atgggcaagaagagaaccaagggcaagaccgtgcccatcgacgacagcagcgagaccctggagcccgtgtgcagacacatcagaaagggcctggagcagggcaacctgaagaaggccctggtgaacgtggagtggaacatctgccaggactgcaagaccgacaacaaggtgaaggacaaggccgaggaggagaccgaggagaagcccagcgtgtggctgtgcctgaagtgcggccaccagggctgcggcagaaacagccaggagcagcacgccctgaagcactacctgacccccagaagcgagccccactgcctggtgctgtag

SEQ ID NO: 11579 - DNA, 2469 bp, synthetic construct
  source 1..2469: mol_type = other DNA; note = Synthetic coding sequence
atgggcaagaagagaaccaagggcaagaccgtgcccatcgacgacagcagcgagaccctggagcccgtgtgcagacacatcagaaagggcctggagcagggcaacctgaagaaggccctggtgaacgtggagtggaacatctgccaggactgcaagaccgacaacaaggtgaaggacaaggccgaggaggagaccgaggagaagcccagcgtgtggctgtgcctgaagtgcggccaccagggctgcggcagaaacagccaggagcagcacgccctgaagcactacctgacccccagaagcgagccccactgcctggtgctgagcctggacaactggagcgtgtggtgctacgtgtgcgacaacgaggtgcagtactgcagcagcaaccagctgggccaggtggtggactacgtgagaaagcaggccagcatcaccacccccaagcccgagaaggacaacggcaacatcgagctggagaacaagaagctggagaaggagagcaagaacgagcaggagagagagaagaaggagaacatggccaaggagaacccccccatgaacagcccctgccagatcaccgtgaagggcctgagcaacctgggcaacacctgcttcttcaacgccgtgatgcagaacctgagccagacccccgtgctgagagagctgctgaaggaggtgaagatgagcggcaccatcgtgaagatcgagccccccgacctggccctgaccgagcccctggagatcaacctggagccccccggccccctgaccctggccatgagccagttcctgaacgagatgcaggagaccaagaagggcgtggtgacccccaaggagctgttcagccaggtgtgcaagaaggccgtgagattcaagggctaccagcagcaggacagccaggagctgctgagatacctgctggacggcatgagagccgaggagcaccagagagtgagcaagggcatcctgaaggccttcggcaacagcaccgagaagctggacgaggagctgaagaacaaggtgaaggactacgagaagaagaagagcatgcccagcttcgtggacagaatcttcggcggcgagctgaccagcatgatcatgtgcgaccagtgcagaaccgtgagcctggtgcacgagagcttcctggacctgagcctgcccgtgctggacgaccagagcggcaagaagagcgtgaacgacaagaacctgaagaagaccgtggaggacgaggaccaggacagcgaggaggagaaggacaacgacagctacatcaaggagagaagcgacatccccagcggcaccagcaagcacctgcagaagaaggccaagaagcaggccaagaagcaggccaagaaccagagaagacagcagaagatccagggcaaggtgctgcacctgaacgacatctgcaccatcgaccaccccgaggacagcgagtacgaggccgagatgagcctgcagggcgaggtgaacatcaagagcaaccacatcagccaggagggcgtgatgcacaaggagtactgcgtgaaccagaaggacctgaacggccaggccaagatgatcgagagcgtgaccgacaaccagaagagcaccgaggaggtggacatgaagaacatcaacatggacaacgacctggaggtgctgaccagcagccccaccagaaacctgaacggcgcctacctgaccgagggcagcaacggcgaggtggacatcagcaacggcttcaagaacctgaacctgaacgccgccctgcaccccgacgagatcaacatcgagatcctgaacgacagccacacccccggcaccaaggtgtacgaggtggtgaacgaggaccccgagaccgccttctgcaccctggccaacagagaggtgttcaacaccgacgagtgcagcatccagcactgcctgtaccagttcaccagaaacgagaagctgagagacgccaacaagctgctgtgcgaggtgtgcaccagaagacagtgcaacggccccaaggccaacatcaagggcgagagaaagcacgtgtacaccaacgccaagaagcagatgctgatcagcctggccccccccgtgctgaccctgcacctgaagagattccagcaggccggcttcaacctgagaaaggtgaacaagcacatcaagttccccgagatcctggacctggcccccttctgcaccctgaagtgcaagaacgtggccgaggagaacaccagagtgctgtacagcctgtacggcgtggtggagcacagcggcaccatgagaagcggccactacaccgcctacgccaaggccagaaccgccaacagccacctgagcaacctggtgctgcacggcgacatcccccaggacttcgagatggagagcaagggccagtggttccacatcagcgacacccacgtgcaggccgtgcccaccaccaaggtgctgaacagccaggcctacctgctgttctacgagagaatcctgtag

SEQ ID NO: 11580 - DNA, 2472 bp, synthetic construct; identical to SEQ ID NO: 10121
  source 1..2472: mol_type = other DNA; note = Synthetic coding sequence

SEQ ID NO: 11581 - DNA, 1167 bp, synthetic construct
  source 1..1167: mol_type = other DNA; note = Synthetic coding sequence
atggaccccatcagaagcttctgcggcaagctgagaagcctggccagcaccctggactgcgagaccgccagactgcagagagccctggacggcgaggagagcgacttcgaggactaccccatgagaatcctgtacgacctgcacagcgaggtgcagaccctgaaggacgacgtgaacatcctgctggacaaggccagactggagaaccaggagggcatcgacttcatcaaggccaccaaggtgctgatggagaagaacagcatggacatcatgaagatcagagagtacttccagaagtacggctacagccccagagtgaagaagaacagcgtgcacgagcaggaggccatcaacagcgaccccgagctgagcaactgcgagaacttccagaagaccgacgtgaaggacgacctgagcgacccccccgtggccagcagctgcatcagcgagaagagccccagaagcccccagctgagcgacttcggcctggagagatacatcgtgagccaggtgctgcccaaccccccccaggccgtgaacaactacaaggaggagcccgtgatcgtgaccccccccaccaagcagagcctggtgaaggtgctgaagacccccaagtgcgccctgaagatggacgacttcgagtgcgtgacccccaagctggagcacttcggcatcagcgagtacaccatgtgcctgaacgaggactacaccatgggcctgaagaacgccagaaacaacaagagcgaggaggccatcgacaccgagagcagactgaacgacaacgtgttcgccacccccagccccatcatccagcagctggagaagagcgacgccgagtacaccaacagccccctggtgcccaccttctgcacccccggcctgaagatccccagcaccaagaacagcatcgccctggtgagcaccaactaccccctgagcaagaccaacagcagcagcaacgacctggaggtggaggacagaaccagcctggtgctgaacagcgacacctgcttcgagaacctgaccgaccccagcagccccaccatcagcagctacgagaacctgctgagaacccccaccccccccgaggtgaccaagatccccgaggacatcctgcagaagttccagtggatctaccccacccagaagctgaacaagatgagatag

SEQ ID NO: 11582 - DNA, 1353 bp, synthetic construct; identical to SEQ ID NO: 9948
  source 1..1353: mol_type = other DNA; note = Synthetic coding sequence

SEQ ID NO: 11583 - DNA, 3378 bp, synthetic construct
  source 1..3378: mol_type = other DNA; note = Synthetic coding sequence
atgaccgtggagcagaacgtgctgcagcagagcgccgcccagaagcaccagcagaccttcctgaaccagctgagagagatcaccggcatcaacgacacccagatcctgcagcaggccctgaaggacagcaacggcaacctggagctggccgtggccttcctgaccgccaagaacgccaagaccccccagcaggaggagaccacctactaccagaccgccctgcccggcaacgacagatacatcagcgtgggcagccaggccgacaccaacgtgatcgacctgaccggcgacgacaaggacgacctgcagagagccatcgccctgagcctggccgagagcaacagagccttcagagagaccggcatcaccgacgaggagcaggccatcagcagagtgctggaggccagcatcgccgagaacaaggcctgcctgaagagaacccccaccgaggtgtggagagacagcagaaacccctacgacagaaagagacaggacaaggcccccgtgggcctgaagaacgtgggcaacacctgctggttcagcgccgtgatccagagcctgttcaacctgctggagttcagaagactggtgctgaactacaagccccccagcaacgcccaggacctgcccagaaaccagaaggagcacagaaacctgcccttcatgagagagctgagatacctgttcgccctgctggtgggcaccaagagaaagtacgtggaccccagcagagccgtggagatcctgaaggacgccttcaagagcaacgacagccagcagcaggacgtgagcgagttcacccacaagctgctggactggctggaggacgccttccagatgaaggccgaggaggagaccgacgaggagaagcccaagaaccccatggtggagctgttctacggcagattcctggccgtgggcgtgctggagggcaagaagttcgagaacaccgagatgttcggccagtaccccctgcaggtgaacggcttcaaggacctgcacgagtgcctggaggccgccatgatcgagggcgagatcgagagcctgcacagcgagaacagcggcaagagcggccaggagcactggttcaccgagctgccccccgtgctgaccttcgagctgagcagattcgagttcaaccaggccctgggcagacccgagaagatccacaacaagctggagttcccccaggtgctgtacctggacagatacatgcacagaaacagagagatcaccagaatcaagagagaggagatcaagagactgaaggactacctgaccgtgctgcagcagagactggagagatacctgagctacggcagcggccccaagagattccccctggtggacgtgctgcagtacgccctggagttcgccagcagcaagcccgtgtgcaccagccccgtggacgacatcgacgccagcagcccccccagcggcagcatccccagccagaccctgcccagcaccaccgagcagcagggcgccctgagcagcgagctgcccagcaccagccccagcagcgtggccgccatcagcagcagaagcgtgatccacaagcccttcacccagagcagaatcccccccgacctgcccatgcaccccgcccccagacacatcaccgaggaggagctgagcgtgctggagagctgcctgcacagatggagaaccgagatcgagaacgacaccagagacctgcaggagagcatcagcagaatccacagaaccatcgagctgatgtacagcgacaagagcatgatccaggtgccctacagactgcacgccgtgctggtgcacgagggccaggccaacgccggccactactgggcctacatcttcgaccacagagagagcagatggatgaagtacaacgacatcgccgtgaccaagagcagctgggaggagctggtgagagacagcttcggcggctacagaaacgccagcgcctactgcctgatgtacatcaacgacaaggcccagttcctgatccaggaggagttcaacaaggagaccggccagcccctggtgggcatcgagaccctgccccccgacctgagagacttcgtggaggaggacaaccagagattcgagaaggagctggaggagtgggacgcccagctggcccagaaggccctgcaggagaagctgctggccagccagaagctgagagagagcgagaccagcgtgaccaccgcccaggccgccggcgaccccgagtacctggagcagcccagcagaagcgacttcagcaagcacctgaaggaggagaccatccagatcatcaccaaggccagccacgagcacgaggacaagagccccgagaccgtgctgcagagcaagcccgagaacaccaccagccagcccctgagcaaccagagagtggtggaggtggccatcccccacgtgggcaagttcatgatcgagagcaaggagggcggctacgacgacgagatcatgatgacccccaacatgcagggcatcatcatggccatcggcaagagcagaagcgtgtacgacagatgcggccccgaggccggcttcttcaaggccatcaagctggagtacgccagactggtgaagctggcccaggaggacaccccccccgagaccgactacagactgcaccacgtggtggtgtacttcatccagaaccaggcccccaagaagatcatcgagaagaccctgctggagcagttcggcgacagaaacctgagcttcgacgagagatgccacaacatcatgaaggtggcccaggccaagctggagatgatcaagcccgaggaggtgaacctggaggagtacgaggagtggcaccaggactacagaaagttcagagagaccaccatgtacctgatcatcggcctggagaacttccagagagagagctacatcgacagcctgctgttcctgatctgcgcctaccagaacaacaaggagctgctgagcaagggcctgtacagaggccacgacgaggagctgatcagccactacagaagagagtgcctgctgaagctgaacgagcaggccgccgagctgttcgagagcggcgaggacagagaggtgaacaacggcctgatcatcatgaacgagttcatcgtgcccttcctgcccctgctgctggtggacgagatggaggagaaggacatcctggccgtggaggacatgagaaacagatggtgcagctacctgggccaggagatggagccccacctgcaggagaagctgaccgacttcctgcccaagctgctggactgcagcatggagatcaagagcttccacgagccccccaagctgcccagctacagcacccacgagctgtgcgagagattcgccagaatcatgctgagcctgagcagaacccccgccgacggcagatag

SEQ ID NO: 11584 - DNA, 1608 bp, synthetic construct
  source 1..1608: mol_type = other DNA; note = Synthetic coding sequence
atggacctgagacaggcctgcagaacccccagcagagacgaggccggcgtggagctgctgatgacctacttcatccagctgggcttcgtggagagcagattcttcccccccaccagacagatgggcctgctgttcacctggtacgacagcctgaccggcgtgcccgtgagccagcagaacctgctgctggagaaggccagcgtgctgttcaacaccggcgccctgtacacccagatcggcaccagatgcgacagacagacccaggccggcctggagagcgccatcgacgccttccagagagccgccggcgtgctgaactacctgaaggacaccttcacccacacccccagctacgacatgagccccgccatgctgagcgtgctggtgaagatgatgctggcccaggcccaggagagcgtgttcgagaagatcagcctgcccggcatcagaaacgagttcttcatgctggtgaaggtggcccaggaggccgccaaggtgggcgaggtgtaccagcagctgcacgccgccatgagccaggcccccgtgaaggagaacatcccctacagctgggccagcctggcctgcgtgaaggcccaccactacgccgccctggcccactacttcaccgccatcctgctgatcgaccaccaggtgaagcccggcaccgacctggaccaccaggagaagtgcctgagccagctgtacgaccacatgcccgagggcctgacccccctggccaccctgaagaacgaccagcagagaagacagctgggcaagagccacctgagaagagccatggcccaccacgaggagagcgtgagagaggccagcctgtgcaagaagctgagaagcatcgaggtgctgcagaaggtgctgtgcgccgcccaggagagaagcagactgacctacgcccagcaccaggaggaggacgacctgctgaacctgatcgacgcccccagcgtggtggccaagaccgagcaggaggtggacatcatcctgccccagttcagcaagctgaccgtgaccgacttcttccagaagctgggccccctgagcgtgttcagcgccaacaagagatggaccccccccagaagcatcagattcaccgccgaggagggcgacctgggcttcaccctgagaggcaacgcccccgtgcaggtgcacttcctggacccctactgcagcgccagcgtggccggcgccagagagggcgactacatcgtgagcatccagctggtggactgcaagtggctgaccctgagcgaggtgatgaagctgctgaagagcttcggcgaggacgagatcgagatgaaggtggtgagcctgctggacagcaccagcagcatgcacaacaagagcgccacctacagcgtgggcatgcagaagacctacagcatgatctgcctggccatcgacgacgacgacaagaccgacaagaccaagaagatcagcaagaagctgagcttcctgagctggggcaccaacaagaacagacagaagagcgccagcaccctgtgcctgcccagcgtgggcgccgccagaccccaggtgaagaagaagctgcccagccccttcagcctgctgaacagcgacagcagctggtactag

SEQ ID NO: 11585 - DNA, 2952 bp, synthetic construct
  source 1..2952: mol_type = other DNA; note = Synthetic coding sequence
atggcccccagactgcagctggagaaggccgcctggagatgggccgagaccgtgagacccgaggaggtgagccaggagcacatcgagaccgcctacagaatctggctggagccctgcatcagaggcgtgtgcagaagaaactgcaagggcaaccccaactgcctggtgggcatcggcgagcacatctggctgggcgagatcgacgagaacagcttccacaacatcgacgaccccaactgcgagagaagaaagaagaacagcttcgtgggcctgaccaacctgggcgccacctgctacgtgaacaccttcctgcaggtgtggttcctgaacctggagctgagacaggccctgtacctgtgccccagcacctgcagcgactacatgctgggcgacggcatccaggaggagaaggactacgagccccagaccatctgcgagcacctgcagtacctgttcgccctgctgcagaacagcaacagaagatacatcgaccccagcggcttcgtgaaggccctgggcctggacaccggccagcagcaggacgcccaggagttcagcaagctgttcatgagcctgctggaggacaccctgagcaagcagaagaaccccgacgtgagaaacatcgtgcagcagcagttctgcggcgagtacgcctacgtgaccgtgtgcaaccagtgcggcagagagagcaagctgctgagcaagttctacgagctggagctgaacatccagggccacaagcagctgaccgactgcatcagcgagttcctgaaggaggagaagctggagggcgacaacagatacttctgcgagaactgccagagcaagcagaacgccaccagaaagatcagactgctgagcctgccctgcaccctgaacctgcagctgatgagattcgtgttcgacagacagaccggccacaagaagaagctgaacacctacatcggcttcagcgagatcctggacatggagccctacgtggagcacaagggcggcagctacgtgtacgagctgagcgccgtgctgatccacagaggcgtgagcgcctacagcggccactacatcgcccacgtgaaggacccccagagcggcgagtggtacaagttcaacgacgaggacatcgagaagatggagggcaagaagctgcagctgggcatcgaggaggacctggccgagcccagcaagagccagaccagaaagcccaagtgcggcaagggcacccactgcagcagaaacgcctacatgctggtgtacagactgcagacccaggagaagcccaacaccaccgtgcaggtgcccgccttcctgcaggagctggtggacagagacaacagcaagttcgaggagtggtgcatcgagatggccgagatgagaaagcagagcgtggacaagggcaaggccaagcacgaggaggtgaaggagctgtaccagagactgcccgccggcgccgagccctacgagttcgtgagcctggagtggctgcagaagtggctggacgagagcacccccaccaagcccatcgacaaccacgcctgcctgtgcagccacgacaagctgcaccccgacaagatcagcatcatgaagagaatcagcgagtacgccgccgacatcttctacagcagatacggcggcggccccagactgaccgtgaaggccctgtgcaaggagtgcgtggtggagagatgcagaatcctgagactgaagaaccagctgaacgaggactacaagaccgtgaacaacctgctgaaggccgccgtgaagggcagcgacggcttctgggtgggcaagagcagcctgagaagctggagacagctggccctggagcagctggacgagcaggacggcgacgccgagcagagcaacggcaagatgaacggcagcaccctgaacaaggacgagagcaaggaggagagaaaggaggaggaggagctgaacttcaacgaggacatcctgtgcccccacggcgagctgtgcatcagcgagaacgagagaagactggtgagcaaggaggcctggagcaagctgcagcagtacttccccaaggcccccgagttccccagctacaaggagtgctgcagccagtgcaagatcctggagagagagggcgaggagaacgaggccctgcacaagatgatcgccaacgagcagaagaccagcctgcccaacctgttccaggacaagaacagaccctgcctgagcaactggcccgaggacaccgacgtgctgtacatcgtgagccagttcttcgtggaggagtggagaaagttcgtgagaaagcccaccagatgcagccccgtgagcagcgtgggcaacagcgccctgctgtgcccccacggcggcctgatgttcaccttcgccagcatgaccaaggaggacagcaagctgatcgccctgatctggcccagcgagtggcagatgatccagaagctgttcgtggtggaccacgtgatcaagatcaccagaatcgaggtgggcgacgtgaaccccagcgagacccagtacatcagcgagcccaagctgtgccccgagtgcagagagggcctgctgtgccagcagcagagagacctgagagagtacacccaggccaccatctacgtgcacaaggtggtggacaacaagaaggtgatgaaggacagcgcccccgagctgaacgtgagcagcagcgagaccgaggaggacaaggaggaggccaagcccgacggcgagaaggaccccgacttcaaccagatcatgcacgccttcagcgtggcccccttcgaccagaacctgagcatcgacggcaagatcctgagcgacgactgcgccaccctgggcaccctgggcgtgatccccgagagcgtgatcctgctgaaggccgacgagcccatcgccgactacgccgccatggacgacgtgatgcaggtgtgcatgcccgaggagggcttcaagggcaccggcctgctgggccactag

SEQ ID NO: 11586 - DNA, 738 bp, synthetic construct
  source 1..738: mol_type = other DNA; note = Synthetic coding sequence
atgagcgtgtgcagcagcgacctgagctacggcagcagagtgtgcctgcccggcagctgcgacagctgcagcgacagctggcaggtggacgactgccccgagagctgctgcgagcccccctgctgcgcccccgccccctgcctgagcctggtgtgcacccccgtgagcagagtgagcagcccctgctgcagagtgacctgcgagcccagcccctgccagagcggctgcaccagcagctgcacccccagctgctgccagcagagcagctgccagcccgcctgctgcaccagcagcccctgccagcaggcctgctgcgtgcccgtgtgctgcaagaccgtgtgctgcaagcccgtgtgctgcatgcccgtgtgctgcggccccagcagcagctgctgccagcagagcagctgccagcccgcctgctgcatcagcagcccctgccagcagagctgctgcgtgcccgtgtgctgcaagcccatctgctgcgtgcccgtgtgcagcggcgccagcagcctgtgctgccagcagagcagctgccagcccgcctgctgcaccaccagctgctgcagacccagcagcagcgtgagcctgctgtgcagacccgtgtgcagacccgccagaagagtgcccgtgcccagctgctgcgtgcccaccagcagctgccagcccagctgcggcagactggccagctgcggcagcctgctgtgcagacccacctgcagcagactggcctgctag

SEQ ID NO: 11587 - DNA, 1098 bp, synthetic construct
  source 1..1098: mol_type = other DNA; note = Synthetic coding sequence
atggccgccagcaccatgagcgtgtgcagcagcgacctgagctacggcagcagagtgtgcctgcccggcagctgcgacagctgcagcgacagctggcaggtggacgactgccccgagagctgctgcgagcccccctgctgcgcccccgccccctgcctgagcctggtgtgcacccccgtgagcagagtgagcagcccctgctgccccgtgacctgcgagcccagcccctgccagagcggctgcaccagcagctgcacccccagctgctgccagcagagcagctgccagctggcctgctgcgccagcagcccctgccagcaggcctgctgcgtgcccgtgtgctgcaagaccgtgtgctgcaagcccgtgtgctgcgtgagcgtgtgctgcggcgacagcagctgctgccagcagagcagctgccagagcgcctgctgcaccagcagcccctgccagcaggcctgctgcgtgcccgtgtgctgcaagcccgtgtgcagcggcatcagcagcagctgctgccagcagagcagctgcgtgagctgcgtgagcagcccctgctgccaggccgtgtgcgagcccagcccctgccagagcggctgcaccagcagctgcacccccagctgctgccagcagagcagctgccagcccacctgctgcaccagcagcccctgccagcaggcctgctgcgtgcccgtgtgctgcgtgcccgtgtgctgcgtgcccacctgcagcgaggacagcagcagctgctgccagcagagcagctgccagcccgcctgctgcaccagcagcccctgccagcacgcctgctgcgtgcccgtgtgcagcggcgccagcaccagctgctgccagcagagcagctgccagcccgcctgctgcaccgccagctgctgcagacccagcagcagcgtgagcctgctgtgccaccccgtgtgcaagagcacctgctgcgtgcccgtgcccagctgcggcgccagcgccagcagctgccagcccagctgctgcagaaccgccagctgcgtgagcctgctgtgcagacccatgtgcagcagacccgcctgctacagcctgtgcagcggccagaagagcagctgctag

SEQ ID NO: 11588 - DNA, 816 bp, synthetic construct
  source 1..816: mol_type = other DNA; note = Synthetic coding sequence
atggccgcctgcaccatgagcgtgtgcagcagcgcctgcagcgacagctggagagtggacgactgccccgagagctgctgcgagcccccctgcggcaccgccccctgcctgaccctggtgtgcacccccgtgagctgcgtgagcagcccctgctgccaggccgcctgcgagcccagcccctgccagagcggctgcaccagcagctgcacccccagctgctgccagcccgcctgctgcgccagcagcccctgccagcaggcctgctgcgtgcccgtgtgctgcaagcccgtgtgctgcctgcccacctgcagcaaggacagcagcagctgctgccagcagagcagctgccagcccacctgctgcgccagcagcagctgccagcagagctgctgcgtgcccgtgtgctgcaagcccgtgtgctgcgtgcccacctgcagcgaggacagcagcagctgctgccagcacagcagctgccagcccacctgctgcaccagcagcccctgccagcagagctgctacgtgcccgtgtgctgcaagcccgtgtgcttcaagcccatctgctgcgtgcccgtgtgcagcggcgccagcaccagctgctgccagcagagcagctgccagcccgcctgctgcaccaccagctgctgcagacccagcagcagcgtgagcctgctgtgcagacccatctgcagacccgcctgctgcgtgcccatcagcagctgctgcgcccccgccagcagctaccaggccagctgctgcagacccgccagctgcgtgagcctgctgtgcagacccgcctgcagcagactggcctgctag

SEQ ID NO: 11589 - DNA, 1206 bp, synthetic construct
  source 1..1206: mol_type = other DNA; note = Synthetic coding sequence
atgagcgtgtgcagcagcgacctgagctacagcagcagagtgtgcctgcccggcagctgcgacagctgcagcgacagctggcaggtggacgactgccccgagagctgctgcgagcccccctgctgcgcccccagctgctgcgcccccgccccctgcctgagcctggtgtgcacccccgtgagcagagtgagcagcccctgctgccccgtgacctgcgagcccagcccctgccagagcggctgcaccagcagctgcacccccagctgctgccagcagagcagctgccagctggcctgctgcgccagcagcccctgccagcaggcctgctgcgtgcccgtgtgctgcaagaccgtgtgctgcaagcccgtgtgctgcgtgcccgtgtgctgcggcgacagcagctgctgccagcagagcagctgccagagcgcctgctgcaccagcagcccctgccagcaggcctgctgcgtgcccatctgctgcaagcccgtgtgcagcggcatcagcagcagctgctgccagcagagcagctgcgtgagctgcgtgagcagcccctgctgccaggccgtgtgcgagcccagcccctgccagagcggctgcatcagcagctgcacccccagctgctgccagcagagcagctgccagcccgcctgctgcaccagcagcagctgccagcaggcctgctgcgtgcccgtgtgctgcaagaccgtgtgctgcaagcccgtgtgcagcgaggacagcagcagctgctgccagcagagcagctgccagcccgcctgctgcaccagcagcccctgccagcaggcctgctgcgtgcccgtgtgctgcaagcccgtgtgctgcaagcccgtgggcagcgtgcccatctgcagcggcgccagcagcctgtgctgccagcagagcagctgccagcccgcctgctgcaccagcagccagagccagcagggctgctgcgtgcccgtgtgctgcaagcccgtgagctgcgtgcccgtgtgcagcggcgccagcagcagctgctgccagcagagcagctgccagcccgcctgctgcaccaccagctgctgcagacccagcagcagcgtgagcctgctgtgcagacccgtgtgcagacccgcctgctgcgtgcccgtgcccagctgctgcgcccccaccagcagctgccagcccagctgctgcagacccgccagctgcgtgagcctgctgtag

SEQ ID NO: 11590 - DNA, 849 bp, synthetic construct
  source 1..849: mol_type = other DNA; note = Synthetic coding sequence
atggccgccagcaccatgagcgtgtgcagcagcgcctgcagcgacagctggcaggtggacgcctgccccgagagctgctgcgagccccactgctgcgccctgagctgctgcgcccccgccccctgcctgaccctggtgtgcacccccgtgagcagagtgagcagcccctgctgccaggccgcctgcgagcccagcccctgccagagcggctgcaccagcagctgcacccccagctgctgccagcagagcagctgccagcccgcctgctgcaccagcagcccctgccagcaggcctgctgcgtgcccgtgtgctgcaagcccgtgtgctgcctgcccacctgcagcaaggacagcagcagctgctgccagcagagcagctgccagcccacctgctgcgccagcagcagcagccagcagagctgctgcgtgcccgtgtgctgcaagcccgtgtgctacgtgcccacctgcagcgaggacagcagcagctgctgccagcagagcagctgccaccccgcctgctgcaccagcagcccctgccagcaggcctgctgcgtgcccgtgagatgcaagcccgtgtgctgcaagcccatctgctgcgtgcccgtgtgcagcggcgccagcaccagctgctgccagcagagcagctgccagcccgcctgctgcaccaccagctgctgcagacccagcagcagcgtgagcctgctgtgcagacccgtgtgcagacccgcctgctgcatgcccgtgagcagctgctgcgcccccgccagcagctgccaggccagctgctgcagacccgccagctgcgtgagcctgctgtgcagacccgcctgcagcagacccgcctgctag

SEQ ID NO: 11591 - DNA, 891 bp, synthetic construct
  source 1..891: mol_type = other DNA; note = Synthetic coding sequence
atggccagcagccccctgcccggccccaacgacatcctgctggccagccccagcagcgccttccagcccgacaccctgagccagcccagacccggccacgccaacctgaagcccaaccaggtgggccaggtgatcctgtacggcatccccatcgtgagcctggtgatcgacggccaggagagactgtgcctggcccagatcagcaacaccctgctgaagaacttcagctacaacgagatccacaacagaagagtggccctgggcatcacctgcgtgcagtgcacccccgtgcagctggagatcctgagaagagccggcgccatgcccatcagcagcagaagatgcggcatgatcaccaagagagaggccgagagactgtgcaagagcttcctgggcgagaacagaccccccaagctgcccgacaacttcgccttcgacgtgagccacgagtgcgcctggggctgcagaggcagcttcatccccgccagatacaacagcagcagagccaagtgcatcaagtgcagctactgcaacatgtacttcagccccaacaagttcatcttccacagccacagaacccccgacgccaagtacacccagcccgacgccgccaacttcaacagctggagaagacacctgaagctgaccgacaagagcccccaggacgagctggtgttcgcctgggaggacgtgaaggccatgttcaacggcggcagcagaaagagagccctgccccagcccggcgcccaccccgcctgccaccccctgagcagcatcagaaccagaagcatcgccttcagcagccagaccctgatgctgctggaggagatcttcggcgagaaggaccaggaggactacatgagaatcaacgaggacaacatctggctgtag

SEQ ID NO: 11592 - DNA, 5346 bp, synthetic construct
  source 1..5346: mol_type = other DNA; note = Synthetic coding sequence
gtgaagaagatccacagacacagactgagccccgccaccgagaagggcgccgccagcagcggcgagggcgacaaggacccccccccccccgcccacgaggacatcgccgtgaagggcaccgccaccgccgccggcaccggccccggcaccggcgccgccgccgccgccgccgccgccgtgccccccccccaccccgccgccgccgccgccgccgccgccgccgccgccgccgccgccgccgccgccgtgccccccccccaccccaacatcagagccctgcagacccaggccccccagcagatccccagaggccccgtgcagcagcccctggaggacagaatcttcacccccgccgtgagcgccgtgtacagcaccgtgacccaggtggccagacagcccggcacccccacccccagcccctacagcgcccacgagatcaacaagggccaccccaacctggccgccaccccccccggccacgccagcagccccggcctgagccagaccccctaccccagcggccagaacgccggccccaccaccctggtgtacccccagaccccccagaccatgaacagccagccccagaccagaagccccgtgatcttcagccccagccagttcttccagagaccccagatccagccccccagagccaccatccccaacagcagccccagcatcagacccggcgcccagacccccaccgccgtgtaccaggccaaccagcacatcatgatggtgaaccacctgcccatgccctaccccgtgccccagggcccccagtactgcatcccccagtacagacacagcggccccccctacgtgggccccccccagcagtaccccgtgcagccccccggccccggccccttctaccccggccccggccccggcgacttccccaacgcctacggcacccccttctaccccagccagcccgtgtaccagagcgcccccatcatcgtgcccacccagcagcagcccccccccgccaagagagagaagaagaccatcagaatcagagaccccaaccagggcggcaaggacatcaccgaggagatcatgagcggcggcggcagcagaaaccccaccccccccatcggcagacccaccagcacccccacccccccccagctgcccagccaggtgcccgagcacagccccgtggtgtacggcaccgtggagagcgcccacctggccgccagcacccccgtgaccgccgccagcgaccagaagcaggaggagaagcccaagcccgaccccgtgctgaagagccccagccccgtgctgagactggtgctgagcggcgagaagaaggagcaggagggccagaccagcgagaccaccgccatcgtgagcatcgccgagctgcccctgccccccagccccaccaccgtgagcagcgtggccagaagcaccatcgccgcccccaccagcagcgccctgagcagccagcccatcttcaccaccgccatcgacgacagatgcgagctgagcagccccagagaggacaccatccccatccccagcctgaccagctgcaccgagaccagcgaccccctgcccaccaacgagaacgacgacgacatctgcaagaagccctgcagcgtggcccccaacgacatccccctggtgagcagcaccaacctgatcaacgagatcaacggcgtgagcgagaagctgagcgccaccgagagcatcgtggagatcgtgaagcaggaggtgctgcccctgaccctggagctggagatcctggagaacccccccgaggagatgaagctggagtgcatccccgcccccatcacccccagcaccgtgcccagcttcccccccaccccccccaccccccccgccagccccccccacacccccgtgatcgtgcccgccgccgccaccaccgtgagcagccccagcgccgccatcaccgtgcagagagtgctggaggaggacgagagcatcagaacctgcctgagcgaggacgccaaggagatccagaacaagatcgaggtggaggccgacggccagaccgaggagatcctggacagccagaacctgaacagcagaagaagccccgtgcccgcccagatcgccatcaccgtgcccaagacctggaagaagcccaaggacagaaccagaaccaccgaggagatgctggaggccgagctggagctgaaggccgaggaggagctgagcatcgacaaggtgctggagagcgagcaggacaagatgagccagggcttccaccccgagagagaccccagcgacctgaagaaggtgaaggccgtggaggagaacggcgaggaggccgagcccgtgagaaacggcgccgagagcgtgagcgagggcgagggcatcgacgccaacagcggcagcaccgacagcagcggcgacggcgtgaccttccccttcaagcccgagagctggaagcccaccgacaccgagggcaagaagcagtacgacagagagttcctgctggacttccagttcatgcccgcctgcatccagaagcccgagggcctgccccccatcagcgacgtggtgctggacaagatcaaccagcccaagctgcccatgagaaccctggaccccagaatcctgcccagaggccccgacttcacccccgccttcgccgacttcggcagacagacccccggcggcagaggcgtgcccctgctgaacgtgggcagcagaagaagccagcccggccagagaagagagcccagaaagatcatcaccgtgagcgtgaaggaggacgtgcacctgaagaaggccgagaacgcctggaagcccagccagaagagagacagccaggccgacgaccccgagaacatcaagacccaggagctgttcagaaaggtgagaagcatcctgaacaagctgaccccccagatgttcaaccagctgatgaagcaggtgagcggcctgaccgtggacaccgaggagagactgaagggcgtgatcgacctggtgttcgagaaggccatcgacgagcccagcttcagcgtggcctacgccaacatgtgcagatgcctggtgaccctgaaggtgcccatggccgacaagcccggcaacaccgtgaacttcagaaagctgctgctgaacagatgccagaaggagttcgagaaggacaaggccgacgacgacgtgttcgagaagaagcagaaggagctggaggccgccagcgcccccgaggagagaaccagactgcacgacgagctggaggaggccaaggacaaggccagaagaagaagcatcggcaacatcaagttcatcggcgagctgttcaagctgaagatgctgaccgaggccatcatgcacgactgcgtggtgaagctgctgaagaaccacgacgaggagagcctggagtgcctgtgcagactgctgaccaccatcggcaaggacctggacttcgagaaggccaagcccagaatggaccagtacttcaaccagatggagaagatcgtgaaggagagaaagaccagcagcagaatcagattcatgctgcaggacgtgatcgacctgagactgtgcaactgggtgagcagaagagccgaccagggccccaagaccatcgagcagatccacaaggaggccaagatcgaggagcaggaggagcagagaaaggtgcagcagctgatgaccaaggagaagagaagacccggcgtgcagagagtggacgagggcggctggaacaccgtgcagggcgccaagaacagcagagtgctggaccccagcaagttcctgaagatcaccaagcccaccatcgacgagaagatccagctggtgcccaaggcccagctgggcagctggggcaagggcagcagcggcggcgccaaggccagcgagaccgacgccctgagaagcagcgccagcagcctgaacagattcagcgccctgcagccccccgcccccagcggcagcacccccagcacccccgtggagttcgacagcagaagaaccctgaccagcagaggcagcatgggcagagagaagaacgacaagcccctgcccagcgccaccgccagacccaacaccttcatgagaggcggcagcagcaaggacctgctggacaaccagagccaggaggagcagagaagagagatgctggagaccgtgaagcagctgaccggcggcgtggacgtggagagaaacagcaccgaggccgagagaaacaagaccagagagagcgccaagcccgagatcagcgccatgagcgcccacgacaaggccgccctgagcgaggaggagctggagagaaagagcaagagcatcatcgacgagttcctgcacatcaacgacttcaaggaggccatgcagtgcgtggaggagctgaacgcccagggcctgctgcacgtgttcgtgagagtgggcgtggagagcaccctggagagaagccagatcaccagagaccacatgggccagctgctgtaccagctggtgcagagcgagaagctgagcaagcaggacttcttcaagggcttcagcgagaccctggagctggccgacgacatggccatcgacatcccccacatctggctgtacctggccgagctggtgacccccatgctgaaggagggcggcatcagcatgagagagctgaccatcgagttcagcaagcccctgctgcccgtgggcagagccggcgtgctgctgagcgagatcctgcacctgctgtgcaagcagatgagccacaagaaggtgggcgccctgtggagagaggccgacctgagctggaaggacttcctgcccgagggcgaggacgtgcacaacttcctgctggagcagaagctggacttcatcgagagcgacagcccctgcagcagcgaggccctgagcaagaaggagctgagcgccgaggagctgtacaagagactggagaagctgatcatcgaggacaaggccaacgacgagcagatcttcgactgggtggaggccaacctggacgagatccagatgagcagccccaccttcctgagagccctgatgaccgccgtgtgcaaggccgccatcatcgccgacagcagcaccttcagagtggacaccgccgtgatcaagcagagagtgcccatcctgctgaagtacctggacagcgacaccgagaaggagctgcaggccctgtacgccctgcaggccagcatcgtgaagctggaccagcccgccaacctgctgagaatgttcttcgactgcctgtacgacgaggaggtgatcagcgaggacgccttctacaagtgggagagcagcaaggaccccgccgagcagaacggcaagggcgtggccctgaagagcgtgaccgccttcttcacctggctgagagaggccgaggaggagagcgaggacaactag

SEQ ID NO: 11593 - DNA, 4758 bp, synthetic construct; identical to SEQ ID NO: 9464
  source 1..4758: mol_type = other DNA; note = Synthetic coding sequence

SEQ ID NO: 11594 - DNA, 3087 bp, synthetic construct
  source 1..3087: mol_type = other DNA; note = Synthetic coding sequence
atggccagcgaggccgtgaaggtggtggtgagatgcagacccatgaaccagagagagagagagctgagatgccagcccgtggtgaccgtggactgcgccagagcccagtgctgcatccagaaccccggcgccgccgacgagccccccaagcagttcaccttcgacggcgcctaccacgtggaccacgtgaccgagcagatctacaacgagatcgcctaccccctggtggagggcgtgaccgagggctacaacggcaccatcttcgcctacggccagaccggcagcggcaagagcttcaccatgcagggcctgcccgacccccccagccagagaggcatcatccccagagccttcgagcacgtgttcgagagcgtgcagtgcgccgagaacaccaagttcctggtgagagccagctacctggagatctacaacgaggacgtgagagacctgctgggcgccgacaccaagcagaagctggagctgaaggagcaccccgagaagggcgtgtacgtgaagggcctgagcatgcacaccgtgcacagcgtggcccagtgcgagcacatcatggagaccggctggaagaacagaagcgtgggctacaccctgatgaacaaggacagcagcagaagccacagcatcttcaccatcagcatcgagatgagcgccgtggacgagagaggcaaggaccacctgagagccggcaagctgaacctggtggacctggccggcagcgagagacagagcaagaccggcgccaccggcgagagactgaaggaggccaccaagatcaacctgagcctgagcgccctgggcaacgtgatcagcgccctggtggacggcagatgcaagcacgtgccctacagagacagcaagctgaccagactgctgcaggacagcctgggcggcaacaccaagaccctgatggtggcctgcctgagccccgccgacaacaactacgacgagaccctgagcaccctgagatacgccaacagagccaagaacatcagaaacaagcccagaatcaacgaggaccccaaggacgccctgctgagagagtaccaggaggagatcaagaagctgaaggccatcctgacccagcagatgagccccagcagcctgagcgccctgctgagcagacaggtgccccccgaccccgtgcaggtggaggagaagctgctgccccagcccgtgatccagcacgacgtggaggccgagaagcagctgatcagagaggagtacgaggagagactggccagactgaaggccgactacaaggccgagcaggagagcagagccagactggaggaggacatcaccgccatgagaaacagctacgacgtgagactgagcaccctggaggagaacctgagaaaggagaccgaggccgtgctgcaggtgggcgtgctgtacaaggccgaggtgatgagcagagccgagttcgccagcagcgccgagtacccccccgccttccagtacgagaccgtggtgaagcccaaggtgttcagcaccaccgacaccctgcccagcgacgacgtgagcaagacccaggtgagcagcagattcgccgagctgcccaaggtggagcccagcaagagcgagatcagcctgggcagcagcgagagcagcagcctggaggagaccagcgtgagcgaggccttccccggccccgaggagcccagcaacgtggaggtgagcatgcccaccgaggagagcagaagcagatacttcctggacgagtgcctgggccaggaggccgccggccacctgctgggcgagcagaactacctgccccaggaggagccccaggaggtgcccctgcagggcctgctgggcctgcaggaccccttcgccgaggtggaggccaagctggccagactgagcagcaccgtggccagaaccgacgccccccaggccgacgtgcccaaggtgcccgtgcaggtgcccgcccccaccgacctgctggagcccagcgacgccagacccgaggccgaggccgccgacgacttcccccccagacccgaggtggacctggccagcgaggtggccctggaggtggtgagaaccgccgagcccggcgtgtggctggaggcccaggcccccgtggccctggtggcccagcccgagcccctgcccgccaccgccggcgtgaagagagagagcgtgggcatggaggtggccgtgctgaccgacgaccccctgcccgtggtggaccagcagcaggtgctggccagactgcagctgctggagcagcaggtggtgggcggcgagcaggccaagaacaaggacctgaaggagaagcacaagagaagaaagagatacgccgacgagagaagaaagcagctggtggccgccctgcagaacagcgacgaggacagcggcgactgggtgctgctgaacgtgtacgacagcatccaggaggaggtgagagccaagagcaagctgctggagaagatgcagagaaagctgagagccgccgaggtggagatcaaggacctgcagagcgagttccagctggagaagatcgactacctggccaccatcagaagacaggagagagacagcatgctgctgcagcagctgctggagcaggtgcagcccctgatcagaagagactgcaactacagcaacctggagaagatcctgagagagagctgctgggacgaggacaacggcttctggaagatcccccaccccgtgatcaccaagaccagcctgcccgtggtgagcaccggcccccagaacaagcccgccagaaagaccagcgccgccgacaacggcgagcccaacatggaggacgacagatacagactgatgctgagcagaagcaacagcgagaacatcgccagcaactacttcagaagcaagagagccagccagatcctgagcaccgacgccagaaagagcctgacccaccacaacagcccccccggcctgagctgccccctgagcaacaacagcgccatcccccccacccaggcccccgagatgccccagcccagacccttcagactggagagcctggacatccccttcaccaaggccaagagaaagaagagcaagagcaacttcggcagcgagcccctgtag

SEQ ID NO: 11595 - DNA, 921 bp, synthetic construct
  source 1..921: mol_type = other DNA; note = Synthetic coding sequence
atgagacagcacgacaccagaaacggcagaatcgtgctgatcagcggcagaagaagcttctgcagcatcttcagcgtgctgccctacagagacagcacccaggtgggcgacctgaagctggacggcggcagacagagcaccggcgccgtgagcctgaaggagatcatcggcctggagggcgtggagctgggcgccgacggcaagaccgtgagctacacccagttcctgctgcccaccaacgccttcggcgccagaagaaacaccatcgacagcaccagcagcttcagccagttcagaaacctgagccacagaagcctgagcatcggcagagccagcggcacccagggcagcctggacaccggcagcgacctgggcgacttcatggactacgaccccaacctgctggacgacccccagtggccctgcggcaagcacaagagagtgctgatcttccccagctacatgaccaccgtgatcgactacgtgaagcccagcgacctgaagaaggacatgaacgagaccttcaaggagaagttcccccacatcaagctgaccctgagcaagatcagaagcctgaagagagagatgagaaagctggcccaggaggactgcggcctggaggagcccaccgtggccatggccttcgtgtacttcgagaagctggccctgaagggcaagctgaacaagcagaacagaaagctgtgcgccggcgcctgcgtgctgctggccgccaagatcggcagcgacctgaagaagcacgaggtgaagcacctgatcgacaagctggaggagaagttcagactgaacagaagagagctgatcgccttcgagttccccgtgctggtggccctggagttcgccctgcacctgcccgagcacgaggtgatgccccactacagaagactggtgcagagcagctag

SEQ ID NO: 11596 - DNA, 2820 bp, synthetic construct
  source 1..2820: mol_type = other DNA; note = Synthetic coding sequence
atggccgcccagccccccagaggcatcagactgagcgccctgtgccccaagttcctgcacaccaacagcaccagccacacctggcccttcagcgccgtggccgagctgatcgacaacgcctacgaccccgacgtgaacgccaagcagatctggatcgacaagaccgtgatcaacgaccacatctgcctgaccttcaccgacaacggcaacggcatgaccagcgacaagctgcacaagatgctgagcttcggcttcagcgacaaggtgaccatgaacggccacgtgcccgtgggcctgtacggcaacggcttcaagagcggcagcatgagactgggcaaggacgccatcgtgttcaccaagaacggcgagagcatgagcgtgggcctgctgagccagacctacctggaggtgatcaaggccgagcacgtggtggtgcccatcgtggccttcaacaagcacagacagatgatcaacctggccgagagcaaggccagcctggccgccatcctggagcacagcctgttcagcaccgagcagaagctgctggccgagctggacgccatcatcggcaagaagggcaccagaatcatcatctggaacctgagaagctacaagaacgccaccgagttcgacttcgagaaggacaagtacgacatcagaatccccgaggacctggacgagatcaccggcaagaagggctacaagaagcaggagagaatggaccagatcgcccccgagagcgactacagcctgagagcctactgcagcatcctgtacctgaagcccagaatgcagatcatcctgagaggccagaaggtgaagacccagctggtgagcaagagcctggcctacatcgagagagacgtgtacagacccaagttcctgagcaagaccgtgagaatcaccttcggcttcaactgcagaaacaaggaccactacggcatcatgatgtaccacagaaacagactgatcaaggcctacgagaaggtgggctgccagctgagagccaacaacatgggcgtgggcgtggtgggcatcatcgagtgcaacttcctgaagcccacccacaacaagcaggacttcgactacaccaacgagtacagactgaccatcaccgccctgggcgagaagctgaacgactactggaacgagatgaaggtgaagaagaacaccgagtaccccctgaacctgcccgtggaggacatccagaagagacccgaccagacctgggtgcagtgcgacgcctgcctgaagtggagaaagctgcccgacggcatggaccagctgcccgagaagtggtactgcagcaacaaccccgacccccagttcagaaactgcgaggtgcccgaggagcccgaggacgaggacctggtgcaccccacctacgagaagacctacaagaagaccaacaaggagaagttcagaatcagacagcccgagatgatccccagaatcaacgccgagctgctgttcagacccaccgccctgagcacccccagcttcagcagccccaaggagagcgtgcccagaagacacctgagcgagggcaccaacagctacgccaccagactgctgaacaaccaccaggtgcccccccagagcgagcccgagagcaacagcctgaagagaagactgagcaccagaagcagcatcctgaacgccaagaacagaagactgagcagccagttcgagaacagcgtgtacaagggcgacgacgacgacgaggacgtgatcatcctggaggagaacagcacccccaagcccgccgtggaccacgacatcgacatgaagagcgagcagagccacgtggagcagggcggcgtgcaggtggagttcgtgggcgacagcgagccctgcggccagaccggcagcaccagcaccagcagcagcagatgcgaccagggcaacaccgccgccacccagaccgaggtgcccagcctggtggtgaagaaggaggagaccgtggaggacgagatcgacgtgagaaacgacgccgtgatcctgcccagctgcgtggaggccgaggccaagatccacgagacccaggagaccaccgacaagagcgccgacgacgccggctgccagctgcaggagctgagaaaccagctgctgctggtgaccgaggagaaggagaactacaagagacagtgccacatgttcaccgaccagatcaaggtgctgcagcagagaatcctggagatgaacgacaagtacgtgaagaaggagacctgccaccagagcaccgagaccgacgccgtgttcctgctggagagcatcaacggcaagagcgagagccccgaccacatggtgagccagtaccagcaggccctggaggagatcgagagactgaagaagcagtgcagcgccctgcagcacgtgaaggccgagtgcagccagtgcagcaacaacgagagcaagagcgagatggacgagatggccgtgcagctggacgacgtgttcagacagctggacaagtgcagcatcgagagagaccagtacaagagcgaggtggagctgctggagatggagaagagccagatcagaagccagtgcgaggagctgaagaccgaggtggagcagctgaagagcaccaaccagcagaccgccaccgacgtgagcaccagcagcaacatcgaggagagcgtgaaccacatggacggcgagagcctgaagctgagaagcctgagagtgaacgtgggccagctgctggccatgatcgtgcccgacctggacctgcagcaggtgaactacgacgtggacgtggtggacgagatcctgggccaggtggtggagcagatgagcgagatcagcagcacctag

SEQ ID NO: 11597 - DNA, 1149 bp, synthetic construct; identical to SEQ ID NO: 11197
  source 1..1149: mol_type = other DNA; note = Synthetic coding sequence

SEQ ID NO: 11598 - DNA, 5058 bp, synthetic construct
  source 1..5058: mol_type = other DNA; note = Synthetic coding sequence
atgagcctgcccttctaccagagatgccaccagcactacgacctgagctacagaaacaaggacgtgagaagcaccgtgagccactaccagagagagaagaagagaagcgccgtgtacacccagggcagcaccgcctacagcagcagaagcagcgccgcccacagaagagagagcgaggccttcagaagagccagcgccagcagcagccagcagcaggccagccagcacgccctgagcagcgaggtgagcagaaaggccgccagcgcctacgactacggcagcagccacggcctgaccgacagcagcctgctgctggacgactacagcagcaagctgagccccaagcccaagagagccaagcacagcctgctgagcggcgaggagaaggagaacctgcccagcgactacatggtgcccatcttcagcggcagacagaagcacgtgagcggcatcaccgacaccgaggaggagagaatcaaggaggccgccgcctacatcgcccagagaaacctgctggccagcgaggagggcatcaccaccagcaagcagagcaccgccagcaagcagaccaccgccagcaagcagagcaccgccagcaagcagagcaccgccagcaagcagagcaccgccagcagacagagcaccgccagcagacagagcgtggtgagcaagcaggccaccagcgccctgcagcaggaggagaccagcgagaagaagagcagaaaggtggtgatcagagagaaggccgagagactgagcctgagaaagaccctggaggagaccgagacctaccacgccaagctgaacgaggaccacctgctgcacgcccccgagttcatcatcaagcccagaagccacaccgtgtgggagaaggagaacgtgaagctgcactgcagcatcgccggctggcccgagcccagagtgacctggtacaagaaccaggtgcccatcaacgtgcacgccaaccccggcaagtacatcatcgagagcagatacggcatgcacaccctggagatcaacggctgcgacttcgaggacaccgcccagtacagagccagcgccatgaacgtgaagggcgagctgagcgcctacgccagcgtggtggtgaagagatacaagggcgagttcgacgagaccagattccacgccggcgccagcaccatgcccctgagcttcggcgtgaccccctacggctacgccagcagattcgagatccacttcgacgacaagttcgacgtgagcttcggcagagagggcgagaccatgagcctgggctgcagagtggtgatcacccccgagatcaagcacttccagcccgagatccagtggtacagaaacggcgtgcccctgagccccagcaagtgggtgcagaccctgtggagcggcgagagagccaccctgaccttcagccacctgaacaaggaggacgagggcctgtacaccatcagagtgagaatgggcgagtactacgagcagtacagcgcctacgtgttcgtgagagacgccgacgccgagatcgagggcgcccccgccgcccccctggacgtgaagtgcctggaggccaacaaggactacatcatcatcagctggaagcagcccgccgtggacggcggcagccccatcctgggctacttcatcgacaagtgcgaggtgggcaccgacagctggagccagtgcaacgacacccccgtgaagttcgccagattccccgtgaccggcctgatcgagggcagaagctacatcttcagagtgagagccgtgaacaagatgggcatcggcttccccagcagagtgagcgagcccgtggccgccctggaccccgccgagaaggccagactgaagagcagacccagcgccccctggaccggccagatcatcgtgaccgaggaggagcccagcgagggcatcgtgcccggcccccccaccgacctgagcgtgaccgaggccaccagaagctacgtggtgctgagctggaagccccccggccagagaggccacgagggcatcatgtacttcgtggagaagtgcgaggccggcaccgagaactggcagagagtgaacaccgagctgcccgtgaagagccccagattcgccctgttcgacctggccgagggcaagagctactgcttcagagtgagatgcagcaacagcgccggcgtgggcgagcccagcgaggccaccgaggtgaccgtggtgggcgacaagctggacatccccaaggcccccggcaagatcatccccagcagaaacaccgacaccagcgtggtggtgagctgggaggagagcaaggacgccaaggagctggtgggctactacatcgaggccagcgtggccggcagcggcaagtgggagccctgcaacaacaaccccgtgaagggcagcagattcacctgccacggcctggtgaccggccagagctacatcttcagagtgagagccgtgaacgccgccggcctgagcgagtacagccaggacagcgaggccatcgaggtgaaggccgccatcggcggcggcgtgagccccgacgtgtgccccgccctgagcgacgagcccggcggcctgaccgccagcagaggcagagtgcacgaggccagcccccccaccttccagaaggacgccctgctgggcagcaagcccaacaagcccagcctgcccagcagcagccagaacctgggccagaccgaggtgagcaaggtgagcgagaccgtgcaggaggagctgaccccccccccccagaaggccgccccccagggcaagagcaagagcgaccccctgaagaagaagaccgacagagccccccccagccccccctgcgacatcacctgcctggagagcttcagagacagcatggtgctgggctggaagcagcccgacaagatcggcggcgccgagatcaccggctactacgtgaactacagagaggtgatcgacggcgtgcccggcaagtggagagaggccaacgtgaaggccgtgagcgaggaggcctacaagatcagcaacctgaaggagaacatggtgtaccagttccaggtggccgccatgaacatggccggcctgggcgcccccagcgccgtgagcgagtgcttcaagtgcgaggagtggaccatcgccgtgcccggccccccccacagcctgaagtgcagcgaggtgagaaaggacagcctggtgctgcagtggaagccccccgtgcacagcggcagaacccccgtgaccggctacttcgtggacctgaaggaggccaaggccaaggaggaccagtggagaggcctgaacgaggccgccatcaagaacgtgtacctgaaggtgagaggcctgaaggagggcgtgagctacgtgttcagagtgagagccatcaaccaggccggcgtgggcaagcccagcgacctggccggccccgtggtggccgagaccagacccggcaccaaggaggtggtggtgaacgtggacgacgacggcgtgatcagcctgaacttcgagtgcgacaagatgacccccaagagcgagttcagctggagcaaggactacgtgagcaccgaggacagccccagactggaggtggagagcaagggcaacaagaccaagatgaccttcaaggacctgggcatggacgacctgggcatctacagctgcgacgtgaccgacaccgacggcatcgccagcagctacctgatcgacgaggaggagctgaagagactgctggccctgagccacgagcacaagttccccaccgtgcccgtgaagagcgagctggccgtggagatcctggagaagggccaggtgagattctggatgcaggccgagaagctgagcggcaacgccaaggtgaactacatcttcaacgagaaggagatcttcgagggccccaagtacaagatgcacatcgacagaaacaccggcatcatcgagatgttcatggagaagctgcaggacgaggacgagggcacctacaccttccagctgcaggacggcaaggccaccaaccacagcaccgtggtgctggtgggcgacgtgttcaagaagctgcagaaggaggccgagttccagagacaggagtggatcagaaagcagggcccccacttcgtggagtacctgagctgggaggtgaccggcgagtgcaacgtgctgctgaagtgcaaggtggccaacatcaagaaggagacccacatcgtgtggtacaaggacgagagagagatcagcgtggacgagaagcacgacttcaaggacggcatctgcaccctgctgatcaccgagttcagcaagaaggacgccggcatctacgaggtgatcctgaaggacgacagaggcaaggacaagagcagactgaagctggtggacgaggccttcaaggagctgatgatggaggtgtgcaagaagatcgccctgagcgccaccgacctgaagatccagagcaccgccgagggcatccagctgtacagcttcgtgacctactacgtggaggacctgaaggtgaactggagccacaacggcagcgccatcagatacagcgacagagtgaagaccggcgtgaccggcgagcagatctggctgcagatcaacgagcccacccccaacgacaagggcaagtacgtgatggagctgttcgacggcaagaccggccaccagaagaccgtggacctgagcggccaggcctacgacgaggcctacgccgagttccagagactgaagaagagcctgctgttccagaaggacagagccagagtgctgggcggcctgcccgacgtggtgaccatccaggagggcaaggccctgaacctgacctgcaacgtgtggggcgaccccccccccgaggtgagctggctgaagaacgagaaggccctggccagcgacgaccactgcaacctgaagttcgaggccggcagaaccgcctacttcaccatcaacggcgtgagcaccgccgacagcggcaagtacggcctggtggtgaagaacaagtacggcagcgagaccagcgacttcaccgtgagcgtgttcatccccgaggaggaggccagaatggccgccctggagagcctgaagggcggcaagaaggccaagtag

SEQ ID NO: 11599 - DNA, 3456 bp, synthetic construct
  source 1..3456: mol_type = other DNA; note = Synthetic coding sequence
atgatggccgccgccctgggcccccccgaggtgatcgcccagctggagaacgccgccaaggtgctgatggccccccccagcatggtgaacaacgagcagagacagcacgccgagcacatcttcctgagcttcagaaagagcaagagccccttcgccgtgtgcaagcacatcctggagaccagcaaggtggactacgtgctgttccaggccgccaccgccatcatggaggccgtggtgagagagtggatcctgctggagaagggcagcatcgagagcctgagaaccttcctgctgacctacgtgctgcagagacccaacctgcagaagtacgtgagagagcagatcctgctggccgtggccgtgatcgtgaagagaggcagcctggacaagagcatcgactgcaagagcatcttccacgaggtgagccagctgatcagcagcggcaaccccaccgtgcagaccctggcctgcagcatcctgaccgccctgctgagcgagttcagcagcagcagcaagaccagcaacatcggcctgagcatggagttccacggcaactgcaagagagtgttccaggaggaggacctgagacagatcttcatgctgaccgtggaggtgctgcaggagttcagcagaagagagaacctgaacgcccagatgagcagcgtgttccagagatacctggccctggccaaccaggtgctgagctggaacttcctgccccccaagctgggcagacactacatcgccatgttcgagagcagccagaacgtgctgctgaagcccaccgagagctggagagagaccctgctggacagcagagtgatggagctgttcttcaccgtgcacagaaagatcagagaggacagcgacatggcccaggacagcctgcagtgcctggcccagctggccagcctgcacggccccatcttccccgacgagggcagccaggtggactacctggcccacttcatcgagggcctgctgaacaccatcaacggcatcgagatcgaggacagcgaggccgtgggcatcagcagcatcatcagcaacctgatcaccgtgttccccagaaacgtgctgaccgccatccccagcgagctgttcagcagcttcgtgaactgcctgacccacctgacctgcagcttcggcagaagcgccgccctggaggaggtgctggacaaggacgacatggtgtacatggaggcctacgacaagctgctggagagctggctgaccctggtgcaggacgacaagcacttccacaagggcttcttcacccagcacgccgtgcaggtgttcaacagctacatccagtgccacctggccgcccccgacggcaccagaaacctgaccgccaacggcgtggccagcagagaggaggaggagatcagcgagctgcaggaggacgacagagaccagttcagcgaccagctggccagcgtgggcatgctgggcagaatcgccgccgagcactgcatccccctgctgaccagcctgctggaggagagagtgaccagactgcacggccagctgcagagacaccagcagcagctgctggccagccccggcagcagcaccgtggacaacaagatgctggacgacctgtacgaggacatccactggctgatcctggtgaccggctacctgctggccgacgacacccagggcgagacccccctgatcccccccgagatcatggagtacagcatcaagcacagcagcgaggtggacatcaacaccaccctgcagatcctgggcagccccggcgagaaggccagcagcatccccggctacaacagaaccgacagcgtgatcagactgctgagcgccatcctgagagtgagcgaggtggagagcagagccatcagagccgacctgacccacctgctgagcccccagatgggcaaggacatcgtgtggttcctgaagagatgggccaagacctacctgctggtggacgagaagctgtacgaccagatcagcctgcccttcagcaccgccttcggcgccgacaccgagggcagccagtggatcatcggctacctgctgcagaaggtgatcagcaacctgagcgtgtggagcagcgagcaggacctggccaacgacaccgtgcagctgctggtgaccctggtggagagaagagagagagccaacctggtgatccagtgcgagaactggtggaacctggccaagcagttcgccagcagaagcccccccctgaacttcctgagcagccccgtgcagagaaccctgatgaaggccctggtgctgggcggcttcgcccacatggacaccgagaccaagcagcagtactggaccgaggtgctgcagcccctgcagcagagattcctgagagtgatcaaccaggagaacttccagcagatgtgccagcaggaggaggtgaagcaggagatcaccgccaccctggaggccctgtgcggcatcgccgaggccacccagatcgacaacgtggccatcctgttcaacttcctgatggacttcctgaccaactgcatcggcctgatggaggtgtacaagaacacccccgagaccgtgaacctgatcatcgaggtgttcgtggaggtggcccacaagcagatctgctacctgggcgagagcaaggccatgaacctgtacgaggcctgcctgaccctgctgcaggtgtacagcaagaacaacctgggcagacagagaatcgacgtgaccgccgaggaggagcagtaccaggacctgctgctgatcatggagctgctgaccaacctgctgagcaaggagttcatcgacttcagcgacaccgacgaggtgttcagaggccacgagcccggccaggccgccaacagaagcgtgagcgccgccgacgtggtgctgtacggcgtgaacctgatcctgcccctgatgagccaggacctgctgaagttccccaccctgtgcaaccagtactacaagctgatcaccttcatctgcgagatcttccccgagaagatcccccagctgcccgaggacctgttcaagagcctgatgtacagcctggagctgggcatgaccagcatgagcagcgaggtgtgccagctgtgcctggaggccctgacccccctggccgagcagtgcgccaaggcccaggagaccgacagccccctgttcctggccaccagacacttcctgaagctggtgttcgacatgctggtgctgcagaagcacaacaccgagatgaccaccgccgccggcgaggccttctacaccctggtgtgcctgcaccaggccgagtacagcgagctggtggagaccctgctgagcagccagcaggaccccgtgatctaccagagactggccgacgccttcaacaagctgaccgccagcagcaccccccccaccctggacagaaagcagaagatggccttcctgaagagcctggaggagttcatggccaacgtgggcggcctgctgtgcgtgaagtag

SEQ ID NO: 11600 - DNA, 420 bp, synthetic construct
  source 1..420: mol_type = other DNA; note = Synthetic coding sequence
atgggcggcggcgagagatacaacatccccgccccccagagcagaaacgtgagcaagaaccagcagcagctgaacagacagaagaccaaggagcagaacagccagatgaagatcgtgcacaagaagaaggagagaggccacggctacaacagcagcgccgccgcctggcaggccatgcagaacggcggcaagaacaagaacttccccaacaaccagagctggaacagcagcctgagcggccccagactgctgttcaagagccaggccaaccagaactacgccggcgccaagttcagcgagccccccagccccagcgtgctgcccaagccccccagccactgggtgcccgtgagcttcaaccccagcgacaaggagatcatgaccttccagctgaagaccctgctgaaggtgcaggtgtag

SEQ ID NO: 11601 - DNA, 984 bp, synthetic construct
  source 1..984: mol_type = other DNA; note = Synthetic coding sequence
atgaaggagatgctggccaaggacctggaggagagccagggcggcaagagcagcgaggtgctgagcgccaccgagctgagagtgcagctggcccagaaggagcaggagctggccagagccaaggaggccctgcaggccatgaaggccgacagaaagagactgaagggcgagaagaccgacctggtgagccagatgcagcagctgtacgccaccctggagagcagagaggagcagctgagagacttcatcagaaactacgagcagcacagaaaggagagcgaggacgccgtgaaggccctggccaaggagaaggacctgctggagagagagaagtgggagctgagaagacaggccaaggaggccaccgaccacgccaccgccctgagaagccagctggacctgaaggacaacagaatgaaggagctggaggccgagctggccatggccaagcagagcctggccaccctgaccaaggacgtgcccaagagacacagcctggccatgcccggcgagaccgtgctgaacggcaaccaggagtgggtggtgcaggccgacctgcccctgaccgccgccatcagacagagccagcagaccctgtaccacagccaccccccccaccccgccgacagacaggccgtgagagtgagcccctgccacagcagacagcccagcgtgatcagcgacgccagcgccgccgagggcgacagaagcagcacccccagcgacatcaacagccccagacacagaacccacagcctgtgcaacggcgacagccccggccccgtgcagaagaacctgcacaaccccatcgtgcagagcctggaggacctggaggaccagaagagaaagaagaagaaggagaagatgggcttcggcagcatcagcagagtgttcgccagaggcaagcagagaaagagcctggaccccggcctgttcgacggcaccgcccccgactactacatcgaggaggacgccgactggtag

SEQ ID NO: 11602 - DNA, 984 bp, synthetic construct; identical to SEQ ID NO: 11601
  source 1..984: mol_type = other DNA; note = Synthetic coding sequence

SEQ ID NO: 11603 - DNA, 609 bp, synthetic construct
  source 1..609: mol_type = other DNA; note = Synthetic coding sequence
atggacgagcaggccctgctgggcctgaaccccaacgccgacagcgacttcagacagagagccctggcctacttcgagcagctgaagatcagccccgacgcctggcaggtgtgcgccgaggccctggcccagagaacctacagcgacgaccacgtgaagttcttctgcttccaggtgctggagcaccaggtgaagtacaagtacagcgagctgaccaccgtgcagcagcagctgatcagagagaccctgatcagctggctgcaggcccagatgctgaacccccagcccgagaagaccttcatcagaaacaaggccgcccaggtgttcgccctgctgttcgtgaccgagtacctgaccaagtggcccaagttcttcttcgacatcctgagcgtggtggacctgaaccccagaggcgtggacctgtacctgagaatcctgatggccatcgacagcgagctggtggacagagacgtggtgcacaccagcgaggaggccagaagaaacaccctgatcaaggacaccatgagagagcagtgcatccccaacctggtggagagctggtaccagatcctgcagaactaccagttcaccaacagcgaggtgacctag

SEQ ID NO: 11604 - DNA, 1803 bp, synthetic construct
  source 1..1803: mol_type = other DNA; note = Synthetic coding sequence
atgagcagagtggccaagtacagaagacaggtgagcgaggaccccgacatcgacagcctgctggagaccctgagccccgaggagatggaggagctggagaaggagctggacgtggtggaccccgacggcagcgtgcccgtgggcctgagacagagaaaccagaccgagaagcagagcaccggcgtgtacaacagagaggccatgctgaacttctgcgagaaggagaccaagaagctgatgcagagagagatgagcatggacgagagcaagcaggtggagaccaagaccgacgccaagaacggcgaggagagaggcagagacgccagcaagaaggccctgggccccagaagagacagcgacctgggcaaggagcccaagagaggcggcctgaagaagagcttcagcagagacagagacgaggccggcggcaagagcggcgagaagcccaaggaggagaagatcatcagaggcatcgacaagggcagagtgagagccgccgtggacaagaaggaggccggcaaggacggcagaggcgaggagagagccgtggccaccaagaaggaggaggagaagaagggcagcgacagaaacaccggcctgagcagagacaaggacaagaagagagaggagatgaaggaggtggccaagaaggaggacgacgagaaggtgaagggcgagagaagaaacaccgacaccagaaaggagggcgagaagatgaagagagccggcggcaacaccgacatgaagaaggaggacgagaaggtgaagagaggcaccggcaacaccgacaccaagaaggacgacgagaaggtgaagaagaacgagcccctgcacgagaaggaggccaaggacgacagcaagaccaagacccccgagaagcagacccccagcggccccaccaagcccagcgagggccccgccaaggtggaggaggaggccgcccccagcatcttcgacgagcccctggagagagtgaagaacaacgaccccgagatgaccgaggtgaacgtgaacaacagcgactgcatcaccaacgagatcctggtgagattcaccgaggccctggagttcaacaccgtggtgaagctgttcgccctggccaacaccagagccgacgaccacgtggccttcgccatcgccatcatgctgaaggccaacaagaccatcaccagcctgaacctggacagcaaccacatcaccggcaagggcatcctggccatcttcagagccctgctgcagaacaacaccctgaccgagctgagattccacaaccagagacacatctgcggcggcaagaccgagatggagatcgccaagctgctgaaggagaacaccaccctgctgaagctgggctaccacttcgagctggccggccccagaatgaccgtgaccaacctgctgagcagaaacatggacaagcagagacagaagagactgcaggagcagagacaggcccaggaggccaagggcgagaagaaggacctgctggaggtgcccaaggccggcgccgtggccaagggcagccccaagcccagcccccagcccagccccaagcccagccccaagaacagccccaagaagggcggcgcccccgccgcccccccccccccccccccccccctggccccccccctgatcatggagaacctgaagaacagcctgagccccgccacccagagaaagatgggcgacaaggtgctgcccgcccaggagaagaacagcagagaccagctgctggccgccatcagaagcagcaacctgaagcagctgaagaagctggagctgcccctgctgctgcagtag

SEQ ID NO: 11605 - DNA, 201 bp, synthetic construct
  source 1..201: mol_type = other DNA; note = Synthetic coding sequence
atgatcggcaccaccgaggtgccctgctgcggccccagcgccacctgggccctgagatggagcgaccagatcaccctgcccagcctgccctggaccatgagcagcctgtggtgcatccccctgaagggcatgctggccacctgccccgtgagcctgctggagcacgcctacagcaacgccctgagaggctggaagccctag

SEQ ID NO: 11606 - DNA, 2121 bp, synthetic construct
  source 1..2121: mol_type = other DNA; note = Synthetic coding sequence
atggccaccgccaacttcggcaagatccagatcggcatctacgtggagatcaagagaagcgacggcagaatccaccaggccatggtgaccagcctgaacgaggacaacgagagcgtgaccgtggagtggatcgagaacggcgacaccaagggcaaggagatcgacctggagagcatcttcagcctgaaccccgacctggtgcccgacgaggagatcgagcccagccccgagaccccccccccccccgccagcagcgccaaggtgaacaagatcgtgaagaacagaagaaccgtggccagcatcaagaacgacccccccagcagagacaacagagtggtgggcagcgccagagccagacccagccagttccccgagcagagcagcagcgcccagcagaacggcagcgtgagcgacatcagccccgtgcaggccgccaagaaggagttcggcccccccagcagaagaaagagcaactgcgtgaaggaggtggagaagctgcaggagaagagagagaagagaagactgcagcagcaggagctgagagagaagagagcccaggacgtggacgccaccaaccccaactacgagatcatgtgcatgatcagagacttcagaggcagcctggactacagacccctgaccaccgccgaccccatcgacgagcacagaatctgcgtgtgcgtgagaaagagacccctgaacaagaaggagacccagatgaaggacctggacgtgatcaccatccccagcaaggacgtggtgatggtgcacgagcccaagcagaaggtggacctgaccagatacctggagaaccagaccttcagattcgactacgccttcgacgacagcgcccccaacgagatggtgtacagattcaccgccagacccctggtggagaccatcttcgagagaggcatggccacctgcttcgcctacggccagaccggcagcggcaagacccacaccatgggcggcgacttcagcggcaagaaccaggactgcagcaagggcatctacgccctggccgccagagacgtgttcctgatgctgaagaagcccaactacaagaagctggagctgcaggtgtacgccaccttcttcgagatctacagcggcaaggtgttcgacctgctgaacagaaagaccaagctgagagtgctggaggacggcaagcagcaggtgcaggtggtgggcctgcaggagagagaggtgaagtgcgtggaggacgtgctgaagctgatcgacatcggcaacagctgcagaaccagcggccagaccagcgccaacgcccacagcagcagaagccacgccgtgttccagatcatcctgagaagaaagggcaagctgcacggcaagttcagcctgatcgacctggccggcaacgagagaggcgccgacaccagcagcgccgacagacagaccagactggagggcgccgagatcaacaagagcctgctggccctgaaggagtgcatcagagccctgggcagaaacaagccccacacccccttcagagccagcaagctgacccaggtgctgagagacagcttcatcggcgagaacagcagaacctgcatgatcgccaccatcagccccggcatggccagctgcgagaacaccctgaacaccctgagatacgccaacagagtgaaggagctgaccgtggaccccaccgccgccggcgacgtgagacccatcatgcaccacccccccaaccagatcgacgacctggagacccagtggggcgtgggcagcagcccccagagagacgacctgaagctgctgtgcgagcagaacgaggaggaggtgagcccccagctgttcaccttccacgaggccgtgagccagatggtggagatggaggagcaggtggtggaggaccacagagccgtgttccaggagagcatcagatggctggaggacgagaaggccctgctggagatgaccgaggaggtggactacgacgtggacagctacgccacccagctggaggccatcctggagcagaagatcgacatcctgaccgagctgagagacaaggtgaagagcttcagagccgccctgcaggaggaggagcaggccagcaagcagatcaaccccaagagacccagagccctgtag

SEQ ID NO: 11607 - DNA, 1281 bp, synthetic construct; identical to SEQ ID NO: 9897
  source 1..1281: mol_type = other DNA; note = Synthetic coding sequence

SEQ ID NO: 11608 - DNA, 996 bp, synthetic construct
  source 1..996: mol_type = other DNA; note = Synthetic coding sequence
atgctgagatgcggccagatgatcttcgcccaggccctggtgtgcagacacctgggcagagactggagatggacccagagaaagagacagcccgacagctacttcagcgtgctgaacgccttcatcgacagaaaggacagctactacagcatccaccagatcgcccagatgggcgtgggcgagggcaagagcatcggccagtggtacggccccaacaccgtggcccaggtgctgaagaagctggccgtgttcgacacctggagcagcctggccgtgcacatcgccatggacaacaccgtggtgatggaggagatcagaagactgtgcagaaccagcgtgccctgcgccggcgccaccgccttccccgccgacagcgacagacactgcaacggcttccccgccggcgccgaggtgaccaacagacccagcccctggagacccctggtgctgctgatccccctgagactgggcctgaccgacatcaacgaggcctacgtggagaccctgaagcactgcttcatgatgccccagagcctgggcgtgatcggcggcaagcccaacagcgcccactacttcatcggctacgtgggcgaggagctgatctacctggacccccacaccacccagcccgccgtggagcccaccgacggctgcttcatccccgacgagagcttccactgccagcaccccccctgcagaatgagcatcgccgagctggaccccagcatcgccgtgggcttcttctgcaagaccgaggacgacttcaacgactggtgccagcaggtgaagaagctgagcctgctgggcggcgccctgcccatgttcgagctggtggagctgcagcccagccacctggcctgccccgacgtgctgaacctgagcctgggcgagagctgccaggtgcaggtgggcagcctgggcgacagcagcgacgtggagagactggagagattcttcgacagcgaggacgaggacttcgagatcctgagcctgtag

SEQ ID NO: 11609 - DNA, 1461 bp, synthetic construct; identical to SEQ ID NO: 9447
  source 1..1461: mol_type = other DNA; note = Synthetic coding sequence

SEQ ID NO: 11610 - DNA, 3075 bp, synthetic construct; identical to SEQ ID NO: 10542
  source 1..3075: mol_type = other DNA; note = Synthetic coding sequence

SEQ ID NO: 11611 - DNA, 339 bp, synthetic construct
  source 1..339: mol_type = other DNA; note = Synthetic coding sequence
atggacgacaaggccagcgtgggcaagatcagcgtgagcagcgacagcgtgagcaccctgaacagcgaggacttcgtgctggtgagcagacagggcgacgagacccccagcaccaacaacggcagcgacgacgagaagaccggcctgaagatcgtgggcaacggcagcgagcagcagctgcagaaggagctggccgacgtgctgatggacccccccatggacgaccagcccggcgagaaggagctggtgaagagaagccagctggacggcgagggcgacggccccctgagcaaccagctgagcgccagcagcaccatcaaccccgtgcccctggtgtag

SEQ ID NO: 11612 - DNA, 441 bp, synthetic construct
  source 1..441: mol_type = other DNA; note = Synthetic coding sequence
atgctgaaggaggactgcgccagcgagctgaaggtgcacctggccaagagcctgcccctgcccagcagcgtgaacagacccagaatcgacctgatcgtgttcgtggtgaacctgcacagcaagtacagcctgcagaacaccgaggagagcctgagacacgtggacgccagcttcttcctgggcaaggtgtgcttcctggccaccggcgccggcagagagagccactgcagcatccacagacacaccgtggtgaagctggcccacacctaccagagccccctgctgtactgcgacctggaggtggagggcttcagagccaccatggcccagagactggtgagagtgctgcagatctgcgccggccacgtgcccggcgtgagcgccctgaacctgctgagcctgctgagaagcagcgagggccccagcctggaggacctgtag

SEQ ID NO: 11613 - DNA, 1203 bp, synthetic construct
  source 1..1203: mol_type = other DNA; note = Synthetic coding sequence
atggccagcgacacccaggccgtgcccgacgtgagcggcagaagcagagccagaagatacgccgagtggagcagcggcctgagaagcggcagagccggcggcggcgagaccagcgtggagagaagaagaacctgcgccttcgacaccctggaggccttcctgatcatggacggcgaggacatccccgacttcagcagcctgaaggaggagaccgcctactggaaggagctgagcctgaagtacaagcagagcttccaggaggccagagacgagctggtggagttccaggagggcagcagagagctggaggccgagctggaggcccagctggtgcaggccgagcagagaaacagagacctgcaggccgacaaccagagactgaagtacgaggtggaggccctgaaggagaagctggagcaccagtacgcccagagctacaagcaggtgagcgtgctggaggacgacctgagccagaccagagccatcaaggagcagctgcacaagtacgtgagagagctggagcaggccaacgacgacctggagagagccaagagagccaccatcgtgagcctggaggacttcgagcagagactgaaccaggccatcgagagaaacgccttcctggagagcgagctggacgagaaggagagcctgctggtgagcgtgcagagactgaaggacgaggccagagacctgagacaggagctggccgtgagagagagacagcaggaggtgaccagaaagagcgcccccagcagccccaccctggactgcgagaagatggacagcgccgtgcaggccagcctgagcctgcccgccacccccgtgggcaagggcaccgagaacaccttccccagccccaaggccatccccaacggcttcggcaccagccccctgacccccagcgccagaatcagcgccctgaacatcgtgggcgacctgctgagaaaggtgggcgccctggagagcaagctggccgcctgcagaaacttcgccaaggaccaggccagcagaaagagctacatcagcggcaacgtgaactgcggcgtgctgaacggcaacggcaccaagttcagcagaagcggccacaccagcttcttcgacaagggcgccgtgaacggcttcgaccccgccccccccccccccggcctgggcagcagcagacccagcagcgcccccggcatgctgcccctgagcgtgtag

SEQ ID NO: 11614 - DNA, 699 bp, synthetic construct
  source 1..699: mol_type = other DNA; note = Synthetic coding sequence
atgacccccccccagcagcccccccccctgagaagcgagcccggcaccctgggcagcgccgccagcagctacagccccctgggcctgaacggcgtgcccggcagcatctgggacttcgtgagcggcagcttcagccccagccccagccccatcctgagcgccggcccccccagcagcagcagcgccagccccaacggcgccgagctggccagagtgagaagacagctggacgaggccaagagaaagatcagacagtgggaggagagctggcagcaggtgaagcaggtgtgcgacgcctggcagagagaggcccaggaggccaaggagagagccagagtggccgacagcgacagacagctggccctgcagaagaaggaggaggtggaggcccaggtgaagcagctgcaggaggagctggagggcctgggcgtggccagcaccctgcccggcctgagaggctgcggcgacatcggcaccatccccctgcccaagctgcacagcctgcagagccagctgagactggacctggaggccgtggacggcgtgatcttccagctgagagccaagcagtgcgtggcctgcagagagagagcccacggcgccgtgctgagaccctgccagcaccacatcctgtgcgagccctgcgccgccaccgcccccgagtgcccctactgcaagggccagcccctgcagtggtag

SEQ ID NO: 11615 - DNA, 1500 bp, synthetic construct
  source 1..1500: mol_type = other DNA; note = Synthetic coding sequence
atgctgccctggccccccgccctggccatgcccatgcccaccgagggcacccccccccccctgagcggcacccccatccccgtgcccgcctacttcagacacgccgagcccggcttcagcctgaagagacccagaggcctgagcagaagcctgcccccccccccccccgccaagggcagcatccccatcagcagactgttcccccccagaacccccggctggcaccagctgcagcccagaagagtgagcttcagaggcgaggccagcgagaccctgcagagccccggctacgaccccagcagacccgagagcttcttccagcagagcttccagagactgagcagactgggccacggcagctacggcgaggtgttcaaggtgagaagcaaggaggacggcagactgtacgccgtgaagagaagcatgagccccttcagaggccccaaggacagagccagaaagctggccgaggtgggcagccacgagaaggtgggccagcacccctgctgcgtgagactggagcaggcctgggaggagggcggcatcctgtacctgcagaccgagctgtgcggccccagcctgcagcagcactgcgaggcctggggcgccagcctgcccgaggcccaggtgtggggctacctgagagacaccctgctggccctggcccacctgcacagccagggcctggtgcacctggacgtgaagcccgccaacatcttcctgggccccagaggcagatgcaagctgggcgacttcggcctgctggtggagctgggcaccgccggcgccggcgaggtgcaggagggcgaccccagatacatggcccccgagctgctgcagggcagctacggcaccgccgccgacgtgttcagcctgggcctgaccatcctggaggtggcctgcaacatggagctgccccacggcggcgagggctggcagcagctgagacagggctacctgccccccgagttcaccgccggcctgagcagcgagctgagaagcgtgctggtgatgatgctggagcccgaccccaagctgagagccaccgccgaggccctgctggccctgcccgtgctgagacagcccagagcctggggcgtgctgtggtgcatggccgccgaggccctgagcagaggctgggccctgtggcaggccctgctggccctgctgtgctggctgtggcacggcctggcccaccccgccagctggctgcagcccctgggcccccccgccaccccccccggcagccccccctgcagcctgctgctggacagcagcctgagcagcaactgggacgacgacagcctgggccccagcctgagccccgaggccgtgctggccagaaccgtgggcagcaccagcacccccagaagcagatgcacccccagagacgccctggacctgagcgacatcaacagcgagccccccagaggcagcttccccagcttcgagcccagaaacctgctgagcctgttcgaggacaccctggaccccacctag

SEQ ID NO: 11616 - DNA, 3153 bp, synthetic construct; identical to SEQ ID NO: 9469
  source 1..3153: mol_type = other DNA; note = Synthetic coding sequence

SEQ ID NO: 11617 - DNA, 363 bp, synthetic construct
  source 1..363: mol_type = other DNA; note = Synthetic coding sequence
atgagcatcggcgtgcccatcaaggtgctgcacgaggccgagggccacatcgtgacctgcgagaccaacaccggcgaggtgtacagaggcaagctgatcgaggccgaggacaacatgaactgccagatgagcaacatcaccgtgacctacagagacggcagagtggcccagctggagcaggtgtacatcagaggcagcaagatcagattcctgatcctgcccgacatgctgaagaacgcccccatgctgaagagcatgaagaacaagaaccagggcagcggcgccggcagaggcaaggccgccatcctgaaggcccagggctacctgagcagcctggagtgggtgctggtgcacatctgctag

SEQ ID NO: 11618 - DNA, 1182 bp, synthetic construct; identical to SEQ ID NO: 10754
  source 1..1182: mol_type = other DNA; note = Synthetic coding sequence

SEQ ID NO: 11619 - DNA, 228 bp, synthetic construct
  source 1..228: mol_type = other DNA; note = Synthetic coding sequence
atgagcccccagaagagagtgaagaacgtgcaggcccagaacagaaccagccagggcagcagcagcttccagaccaccctgagcgcctggaaggtgaagcaggaccccagcaacagcaagaacatcagcaagcacggccagaacaaccccgtgggcgactacgagcacgccgacgaccaggccgaggaggacgccctgcagatggccgtgggctacttcgagaagtag

SEQ ID NO: 11620 - DNA, 996 bp, synthetic construct
  source 1..996: mol_type = other DNA; note = Synthetic coding sequence
atggccttcgtgaccagacagttcatgagaagcgtgagcagcagcagcaccgccagcgccagcgccaagaagatcatcgtgaagcacgtgaccgtgatcggcggcggcctgatgggcgccggcatcgcccaggtggccgccgccaccggccacaccgtggtgctggtggaccagaccgaggacatcctggccaagagcaagaagggcatcgaggagagcctgagaaaggtggccaagaagaagttcgccgagaacctgaaggccggcgacgagttcgtggagaagaccctgagcaccatcgccaccagcaccgacgccgccagcgtggtgcacagcaccgacctggtggtggaggccatcgtggagaacctgaaggtgaagaacgagctgttcaagagactggacaagttcgccgccgagcacaccatcttcgccagcaacaccagcagcctgcagatcaccagcatcgccaacgccaccaccagacaggacagattcgccggcctgcacttcttcaaccccgtgcccgtgatgaagctggtggaggtgatcaagacccccatgaccagccagaagaccttcgagagcctggtggacttcagcaaggccctgggcaagcaccccgtgagctgcaaggacacccccggcttcatcgtgaacagactgctggtgccctacctgatggaggccatcagactgtacgagagagacttccagacctgcggcgacagcaacagcggcctgggcttcagcctgaagggcgacgccagcaaggaggacatcgacaccgccatgaagctgggcgccggctaccccatgggccccttcgagctgctggactacgtgggcctggacaccaccaagttcatcgtggacggctggcacgagatggacgccgagaaccccctgcaccagcccagccccagcctgaacaagctggtggccgagaacaagttcggcaagaagaccggcgagggcttctacaagtacaagtag

SEQ ID NO: 11621 - DNA, 1281 bp, synthetic construct; identical to SEQ ID NO: 9897
  source 1..1281: mol_type = other DNA; note = Synthetic coding sequence

SEQ ID NO: 11622 - DNA, 1290 bp, synthetic construct
  source 1..1290: mol_type = other DNA; note = Synthetic coding sequence
atgcccaacgtgctgctgccccccaaggagagcaacctgttcaagagaatcctgaagtgctacgagcagaagcagtacaagaacggcctgaagttctgcaagatgatcctgagcaaccccaagttcgccgagcacggcgagaccctggccatgaagggcctgaccctgaactgcctgggcaagaaggaggaggcctacgagttcgtgagaaagggcctgagaaacgacgtgaagagccacgtgtgctggcacgtgtacggcctgctgcagagaagcgacaagaagtacgacgaggccatcaagtgctacagaaacgccctgaagctggacaaggacaacctgcagatcctgagagacctgagcctgctgcagatccagatgagagacctggagggctacagagagaccagataccagctgctgcagctgagacccacccagagagccagctggatcggctacgccatcgcctaccacctgctgaaggactacgacatggccctgaagctgctggaggagttcagacagacccagcaggtgccccccaacaagatcgactacgagtacagcgagctgatcctgtaccagaaccaggtgatgagagaggccgacctgctgcaggagagcctggagcacatcgagatgtacgagaagcagatctgcgacaagctgctggtggaggagatcaagggcgagatcctgctgaagctgggcagactgaaggaggccagcgaggtgttcaagaacctgatcgacagaaacgccgagaactggtgctactacgagggcctggagaaggccctgcagatcagcaccctggaggagagactgcagatctacgaggagatcagcaagcagcaccccaaggccatcacccccagaagactgcccctgaccctggtgcccggcgagagattcagagagctgatggacaagttcctgagagtgaacttcagcaagggctgcccccccctgttcaccaccctgaagagcctgtactacaacaccgagaaggtgagcatcatccaggagctggtgaccaactacgaggccagcctgaagacctgcgacttcttcagcccctacgagaacggcgagaaggagccccccaccaccctgctgtgggtgcagtacttcctggcccagcacttcgacaagctgggccagtacagcctggccctggactacatcaacgccgccatcgccagcacccccaccctgatcgagctgttctacatgaaggccaagatctacaaggtgaagagcgagagctgcttcctgagcagctag

SEQ ID NO: 11623 - DNA, 360 bp, synthetic construct
  source 1..360: mol_type = other DNA; note = Synthetic coding sequence
atggacaagaacatcggcgagcagctgaacaaggcctacgaggccttcagacaggcctgcatggacagagacagcgccgtgaaggagctgcagcagaagaccgagaactacgagcagagaatcagagagcagcaggagcagctgagcctgcagcagaccatcatcgacaagctgaagagccagctgctgctggtgaacagcacccaggacaacaactacggctgcgtgcccctgctggaggacagcgagaccagaaagaacaacctgaccctggaccagccccaggacaaggtgatcagcggcatcgccagagagaagctgcccaaggtggacatcgccagcgccgagagcagcatctag

SEQ ID NO: 11624 - DNA, 699 bp, synthetic construct; identical to SEQ ID NO: 11614
  source 1..699: mol_type = other DNA; note = Synthetic coding sequence

SEQ ID NO: 11625 - DNA, 1461 bp, synthetic construct; identical to SEQ ID NO: 9447
  source 1..1461: mol_type = other DNA; note = Synthetic coding sequence

SEQ ID NO: 11626 - DNA, 3075 bp, synthetic construct; identical to SEQ ID NO: 10542
  source 1..3075: mol_type = other DNA; note = Synthetic coding sequence

SEQ ID NO: 11627 - DNA, 1767 bp, synthetic construct; identical to SEQ ID NO: 9996
  source 1..1767: mol_type = other DNA; note = Synthetic coding sequence

SEQ ID NO: 11628 - DNA, 666 bp, synthetic construct
  source 1..666: mol_type = other DNA; note = Synthetic coding sequence
atgctgaagaacaagggccacagcagcaagaaggacaacctggccgtgaacgccgtggccctgcaggaccacatcctgcacgacctgcagctgagaaacctgagcgtggccgaccacagcaagacccaggtgcagaagaaggagaacaagagcctgaagagagacaccaaggccatcatcgacaccggcctgaagaagaccacccagtgccccaagctggaggacagcgagaaggagtacgtgctggaccccaagcccccccccctgaccctggcccagaagctgggcctgatcggccccccccccccccccctgagcagcgacgagtgggagaaggtgaagcagagaagcctgctgcagggcgacagcgtgcagccctgccccatctgcaaggaggagttcgagctgagaccccaggtgctgctgagctgcagccacgtgttccacaaggcctgcctgcaggccttcgagaagttcaccaacaagaagacctgccccctgtgcagaaagaaccagtaccagaccagagtgatccacgacggcgccagactgttcagaatcaagtgcgtgaccagaatccaggcctactggagaggctgcgtggtgagaaagtggtacagaaacctgagaaagaccgtgccccccaccgacgccaagctgagatag

SEQ ID NO: 11629 - DNA, 900 bp, synthetic construct; identical to SEQ ID NO: 9591
  source 1..900: mol_type = other DNA; note = Synthetic coding sequence

SEQ ID NO: 11630 - DNA, 2193 bp, synthetic construct
  source 1..2193: mol_type = other DNA; note = Synthetic coding sequence
atggaggacctgttcgagaccttccaggacgagatgggcttcagcaacatggaggacgacggccccgaggaggaggagagagtggccgagccccaggccaacttcaacaccccccaggccctgagattcgaggagctgctggccaacctgctgaacgagcagcaccagatcgccaaggagctgttcgagcagctgaagatgaagaagcccagcgccaagcagcagaaggaggtggagaaggtgaagccccagtgcaaggaggtgcaccagaccctgatcctggaccccgcccagagaaagagactgcagcagcagatgcagcagcacgtgcagctgctgacccagatccacctgctggccacctgcaaccccaacctgaaccccgaggccagcagcaccagaatctgcctgaaggagctgggcaccttcgcccagagcagcatcgccctgcaccaccagtacaaccccaagttccagaccctgttccagccctgcaacctgatgggcgccatgcagctgatcgaggacttcagcacccacgtgagcatcgactgcagcccccacaagaccgtgaagaagaccgccaacgagttcccctgcctgcccaagcaggtggcctggatcctggccaccagcaaggtgttcatgtaccccgagctgctgcccgtgtgcagcctgaaggccaagaacccccaggacaagatcctgttcaccaaggccgaggacaacaagtacctgctgacctgcaagaccgccagacagctgaccgtgagaatcaagaacctgaacatgaacagagcccccgacaacatcatcaagttctacaagaagaccaagcagctgcccgtgctgggcaagtgctgcgaggagatccagccccaccagtggaagccccccatcgagagagaggagcacagactgcccttctggctgaaggccagcctgcccagcatccaggaggagctgagacacatggccgacggcgccagagaggtgggcaacatgaccggcaccaccgagatcaacagcgaccagggcctggagaaggacaacagcgagctgggcagcgagaccagataccccctgctgctgcccaagggcgtggtgctgaagctgaagcccgtggccgacagattccccaagaaggcctggagacagaagagaagcagcgtgctgaagcccctgctgatccagcccagccccagcctgcagcccagcttcaaccccggcaagacccccgcccagagcacccacagcgaggccccccccagcaagatggtgctgagaatcccccaccccatccagcccgccaccgtgctgcagaccgtgcccggcgtgccccccctgggcgtgagcggcggcgagagcttcgagagccccgccgccctgcccgccatgccccccgaggccagaaccagcttccccctgagcgagagccagaccctgctgagcagcgcccccgtgcccaaggtgatgatgcccagccccgccagcagcatgttcagaaagccctacgtgagaagaagacccagcaagagaagaggcgccagagccttcagatgcatcaagcccgcccccgtgatccaccccgccagcgtgatcttcaccgtgcccgccaccaccgtgaagatcgtgagcctgggcggcggctgcaacatgatccagcccgtgaacgccgccgtggcccagagcccccagaccatccccatcgccaccctgctggtgaaccccaccagcttcccctgccccctgaaccagcccctggtggccagcagcgtgagccccctgatcgtgagcggcaacagcgtgaacctgcccatccccagcacccccgaggacaaggcccacatgaacgtggacatcgcctgcgccgtggccgacggcgagaacgccttccagggcctggagcccaagctggagccccaggagctgagccccctgagcgccaccgtgttccccaaggtggagcacagccccggccccccccccgtggacaagcagtgccaggagggcctgagcgagaacagcgcctacagatggaccgtggtgaagaccgaggagggcagacaggccctggagcccctgccccagggcatccaggagagcctgaacaacagcagccccggcgacctggaggaggtggtgaagatggagcccgaggacgccaccgaggagatcagcggcttcctgtag

SEQ ID NO: 11631 - DNA, 1563 bp, synthetic construct
  source 1..1563: mol_type = other DNA; note = Synthetic coding sequence
atgttcgtgagcgacttcagaaaggagttctacgaggtggtgcagagccagagagtgctgctgttcgtggccagcgacgtggacgccctgtgcgcctgcaagatcctgcaggccctgttccagtgcgaccacgtgcagtacaccctggtgcccgtgagcggctggcaggagctggagaccgccttcctggagcacaaggagcagatcaagctgctgatcaagcaggacgacgacctggaggtgcccgcctacgaggacatcttcagagacgaggaggaggacgaggagcacagcggcaacgacagcgacggcagcgagcccagcgagaagagaaccagactggaggaggagatcgtggagcagaccatgagaagaagacagagaagagagtgggaggccagaagaagagacatcctgttcgactacgagcagtacgagtaccacggcaccagcagcgccatggtgatgttcgagctggcctggatgctgagcaaggacctgaacgacatgctgtggtgggccatcgtgggcctgaccgaccagtgggtgcaggacaagatcacccagatgaagtacgtgaccgacgtgggcgtgctgcagagacacgtgagcagacacaaccacagaaacgaggacgaggagaacaccctgagcgtggactgcaccagaatcagcttcgagtacgacctgagactggtgctgtaccagcactggagcctgcacgacagcctgtgcaacaccagctacaccgccgccagattcaagctgtggagcgtgcacggccagaagagactgcaggagttcctggccgacatgggcctgcccctgaagcaggtgaagcagaagttccaggccatggacatcagcctgaaggagaacctgagagagatgatcgaggagagcgccaacaagttcggcatgaaggacatgagagtgcagaccttcagcatccacttcggcttcaagcacaagttcctggccagcgacgtggtgttcgccaccatgagcctgatggagagccccgagaaggacggcagcggcaccgaccacttcatccaggccctggacagcctgagcagaagcaacctggacaagctgtaccacggcctggagctggccaagaagcagctgagagccacccagcagaccatcgccagctgcctgtgcaccaacctggtgatcagccagggccccttcctgtactgcagcctgatggagggcacccccgacgtgatgctgttcagcagacccgccagcctgagcctgctgagcaagcacctgctgaagagcttcgtgtgcagcaccaagaacagaagatgcaagctgctgcccctggtgatggccgcccccctgagcatggagcacggcaccgtgaccgtggtgggcatcccccccgagaccgacagcagcgacagaaagaacttcttcggcagagccttcgagaaggccgccgagagcaccagcagcagaatgctgcacaaccacttcgacctgagcgtgatcgagctgaaggccgaggacagaagcaagttcctggacgccctgatcagcctgctgagctag

SEQ ID NO: 11632 - DNA, 567 bp, synthetic construct; identical to SEQ ID NO: 10128
  source 1..567: mol_type = other DNA; note = Synthetic coding sequence

SEQ ID NO: 11633 - DNA, 1182 bp, synthetic construct
  source 1..1182: mol_type = other DNA; note = Synthetic coding sequence
atggacgccgccaccctgacctacgacaccctgagattcgccgagttcgaggacttccccgagaccagcgagcccgtgtggatcctgggcagaaagtacagcatcttcaccgagaaggacgagatcctgagcgacgtggccagcagactgtggttcacctacagaaagaacttccccgccatcggcggcaccggccccaccagcgacaccggctggggctgcatgctgagatgcggccagatgatcttcgcccaggccctggtgtgcagacacctgggcagagactggagatggacccagagaaagagacagcccgacagctacttcagcgtgctgaacgccttcatcgacagaaaggacagctactacagcatccaccagatcgcccagatgggcgtgggcgagggcaagagcatcggccagtggtacggccccaacaccgtggcccaggtgctgaagaagctggccgtgttcgacacctggagcagcctggccgtgcacatcgccatggacaacaccgtggtgatggaggagatcagaagactgtgcagaaccagcgtgccctgcgccggcgccaccgccttccccgccgacagcgacagacactgcaacggcttccccgccggcgccgaggtgaccaacagacccagcccctggagacccctggtgctgctgatccccctgagactgggcctgaccgacatcaacgaggcctacgtggagaccctgaagcactgcttcatgatgccccagagcctgggcgtgatcggcggcaagcccaacagcgcccactacttcatcggctacgtgggcgaggagctgatctacctggacccccacaccacccagcccgccgtggagcccaccgacggctgcttcatccccgacgagagcttccactgccagcaccccccctgcagaatgagcatcgccgagctggaccccagcatcgccgtgggcttcttctgcaagaccgaggacgacttcaacgactggtgccagcaggtgaagaagctgagcctgctgggcggcgccctgcccatgttcgagctggtggagctgcagcccagccacctggcctgccccgacgtgctgaacctgagcctggacagcagcgacgtggagagactggagagattcttcgacagcgaggacgaggacttcgagatcctgagcctgtag

SEQ ID NO: 11634 - DNA, 780 bp, synthetic construct; identical to SEQ ID NO: 9811
  source 1..780: mol_type = other DNA; note = Synthetic coding sequence

SEQ ID NO: 11635 - DNA, 852 bp, synthetic construct
  source 1..852: mol_type = other DNA; note = Synthetic coding sequence
atgatccccccccaggaggccagcgccagaagaagagagatcgaggacaagctgaagcaggaggaggagaccctgagcttcatcagagacagcctggagaagagcgaccagctgaccaagaacatggtgagcatcctgagcagcttcgagagcagactgatgaagctggagaacagcatcatccccgtgcacaagcagaccgagaacctgcagagactgcaggagaacgtggagaagaccctgagctgcctggaccacgtgatcagctactaccacgtggccagcgacaccgagaagatcatcagagagggccccaccggcagactggaggagtacctgggcagcatggccaagatccagaaggccgtggagtacttccaggacaacagccccgacagccccgagctgaacaaggtgaagctgctgttcgagagaggcaaggaggccctggagagcgagttcagaagcctgatgaccagacacagcaaggtggtgagccccgtgctgatcctggacctgatcagcggcgacgacgacctggaggcccaggaggacgtgaccctggagcacctgcccgagagcgtgctgcaggacgtgatcagaatcagcagatggctggtggagtacggcagaaaccaggacttcatgaacgtgtactaccagatcagaagcagccagctggacagaagcatcaagggcctgaaggagcacttccacaagagcagcagcagcagcggcgtgccctacagccccgccatccccaacaagagaaaggacacccccaccaagaagcccgtgaagagacccggcgagccccccagctggcccatcagcgccaccgccagaggctag

SEQ ID NO: 11636 - DNA, 2121 bp, synthetic construct
  source 1..2121: mol_type = other DNA; note = Synthetic coding sequence
atgaacgaggccatggccaccgacagccccagaagacccagcagatgcaccggcggcgtggtggtgagaccccaggccgtgaccgagcagagctacatggagagcgtggtgaccttcctgcaggacgtggtgccccaggcctacagcggcacccccctgaccgaggagaaggagaagatcgtgtgggtgagattcgagaacgccgacctgaacgacaccagcagaaacctggagttccacgagatccacagcaccggcaacgagccccccctgctgatcatgatcggctacagcgacggcatgcaggtgtggagcatccccatcagcggcgaggcccaggagctgttcagcgtgagacacggccccatcagagccgccagaatcctgcccgccccccagttcggcgcccagaagtgcgacaacttcgccgagaagagacccctgctgggcgtgtgcaagagcatcggcagcagcggcaccagccccccctactgctgcgtggacctgtacagcctgagaaccggcgagatggtgaagagcatccagttcaagacccccatctacgacctgcactgcaacaagagaatcctggtggtggtgctgcaggagaagatcgccgccttcgacagctgcaccttcaccaagaagttcttcgtgaccagctgctacccctgccccggccccaacatgaaccccatcgccctgggcagcagatggctggcctacgccgagaacaagctgatcagatgccaccagagcagaggcggcgcctgcggcgacaacatccagagctacaccgccaccgtgatcagcgccgccaagaccctgaagagcggcctgaccatggtgggcaaggtggtgacccagctgaccggcaccctgcccagcggcgtgaccgaggacgacgtggccatccacagcaacagcagaagaagccccctggtgcccggcatcatcaccgtgatcgacaccgagaccgtgggcgagggccaggtgctggtgagcgaggacagcgacagcgacggcatcgtggcccacttccccgcccacgagaagcccgtgtgctgcatggccttcaacaccagcggcatgctgctggtgaccaccgacaccctgggccacgacttccacgtgttccagatcctgacccacccctggagcagcagccagtgcgccgtgcaccacctgtacaccctgcacagaggcgagaccgaggccaaggtgcaggacatctgcttcagccacgactgcagatgggtggtggtgagcaccctgagaggcaccagccacgtgttccccatcaacccctacggcggccagccctgcgtgagaacccacatgagccccagagtggtgaacagaatgagcagattccagaagagcgccggcctggaggagatcgagcaggagctgaccagcaagcagggcggcagatgcagccccgtgcccggcctgagcagcagccccagcggcagccccctgcacggcaagctgaacagccaggacagctacaacaacttcaccaacaacaaccccggcaaccccagactgagccccctgcccagcctgatggtggtgatgcccctggcccagatcaagcagcccatgaccctgggcaccatcaccaagagaaccggcccctacctgttcggcgccggctgcttcagcatcaaggccccctggagctacatcatgaccaagtacatcttctacatcaagccccccaacaaggtgaagccccccccccagatcagccccagcaagagcatgggcggcgagttctgcgtggccgccatcttcggcaccagcagaagctggttcgccaacaacgccggcctgaagagagagaaggaccagagcaagcaggtggtggtggagagcctgtacatcatcagctgctacggcaccctggtggagcacatgatggagcccagacccctgagcaccgcccccaagatcagcgacgacacccccctggagatgatgaccagccccagagccagctggaccctggtgagaaccccccagtggaacgagctgcagccccccttcaacgccaaccaccccctgctgctggccgccgacgccgtgcagtactaccagttcctgctggccggctag

SEQ ID NO: 11637 - DNA, 1815 bp, synthetic construct
  source 1..1815: mol_type = other DNA; note = Synthetic coding sequence
atgggcggctgcttcagcaagcccaagcccggcgccgccctgcccaccgtggagctgaagatcgaggtggtgctgcccgagaaggagagaggcaaggaggagctgagcgccagcggcaagggcagccccagagcctaccagggcaacggcaccgccagacacttccacaccgaggagagactgagcaccccccacccctaccccagcccccaggactgcgtggaggccgccgtgtgccacgtgaaggacctggagaacggccagatgagagaggtggagctgggctggggcaaggtgctgctggtgaaggacaacggcgagttccacgccctgggccacaagtgcccccactacggcgcccccctggtgaagggcgtgctgagcagaggcagagtgagatgcccctggcacggcgcctgcttcaacatcagcaccggcgacctggaggacttccccggcctggacagcctgcacaagttccaggtgaagatcgagaaggagaaggtgtacgtgagagccagcaagcaggccctgcagctgcagagaagaaccaaggtgatggccaagtgcatcagccccagcgccggctacagcagcagcaccaacgtgctgatcgtgggcgccggcgccgccggcctggtgtgcgccgagaccctgagacaggagggcttcagcgacagaatcgtgctgtgcaccctggacagacacctgccctacgacagacccaagctgagcaagagcctggacacccagcccgagcagctggccctgagacccaaggagttcttcagagcctacggcatcgaggtgctgaccgaggcccaggtggtgaccgtggacgtgagaaccaagaaggtggtgttcaaggacggcttcaagctggagtacagcaagctgctgctggcccccggcagcagccccaagaccctgagctgcaagggcaaggaggtggagaacgtgttcaccatcagaacccccgaggacgccaacagagtggtgagactggccagaggcagaaacgtggtggtggtgggcgccggcttcctgggcatggaggtggccgcctacctgaccgagaaggcccacagcgtgagcgtggtggagctggaggagacccccttcagaagattcctgggcgagagagtgggcagagccctgatgaagatgttcgagaacaacagagtgaagttctacatgcagaccgaggtgagcgagctgagaggccaggagggcaagctgaaggaggtggtgctgaagagcagcaaggtggtgagagccgacgtgtgcgtggtgggcatcggcgccgtgcccgccaccggcttcctgagacagagcggcatcggcctggacagcagaggcttcatccccgtgaacaagatgatgcagaccaacgtgcccggcgtgttcgccgccggcgacgccgtgaccttccccctggcctggagaaacaacagaaaggtgaacatcccccactggcagatggcccacgcccagggcagagtggccgcccagaacatgctggcccaggaggccgagatgagcaccgtgccctacctgtggaccgccatgttcggcaagagcctgagatacgccggctacggcgagggcttcgacgacgtgatcatccagggcgacctggaggagctgaagttcgtggccttctacaccaagggcgacgaggtgatcgccgtggccagcatgaactacgaccccatcgtgagcaaggtggccgaggtgctggccagcggcagagccatcagaaagagagaggtggagaccggcgacatgagctggctgaccggcaagggcagctag

SEQ ID NO: 11638 - DNA, 744 bp, synthetic construct
  source 1..744: mol_type = other DNA; note = Synthetic coding sequence
atgagcaccgccgccgtgcccgagctgaagcagatcagcagagtggaggccatgagactgggccccggctggagccacagctgccacgccatgctgtacgccgccaaccccggccagctgttcggcagaatccccatgagattcagcgtgctgatgcagatgagattcgacggcctgctgggcttccccggcggcttcgtggacagaagattctggagcctggaggacggcctgaacagagtgctgggcctgggcctgggctgcctgagactgaccgaggccgactacctgagcagccacctgaccgagggcccccacagagtggtggcccacctgtacgccagacagctgaccctggagcagctgcacgccgtggagatcagcgccgtgcacagcagagaccacggcctggaggtgggccccccccccggccccagacccccccccagaggcctggccctggccccctggaaggcccccatgggcaacaccagccccgagggccccctggccggcctgggcagagtgagcctgagccccgccatgggctggggcgagggcagcggcgccggcagacccggcaaggagggcagaggctggggccccgccctgggcctgccccagggctgcgtgaccagcgccctgctgcccgccatcgccaaccccggcagcggcggcgtgggcagcgtgggcagaaagggctggggcagaagcggcgactgcctgggcagctgggagacctag

SEQ ID NO: 11639 - DNA, 1338 bp, synthetic construct; identical to SEQ ID NO: 9613
  source 1..1338: mol_type = other DNA; note = Synthetic coding sequence

SEQ ID NO: 11640 - DNA, 1335 bp, synthetic construct
  source 1..1335: mol_type = other DNA; note = Synthetic coding sequence
ttcagagtgcccgccgccggcagaagatgccccctggccagaggcgccagaagaccccccgacagcgcctgcggcagattcccccccgaccccggcagcccccccgaggaggaggacgccgacctgagcgagagagaggagagctggctgctggccgagagagaggagaaccaggaggccgagttccccggcctgagaagagccgtgcagctgaacctgagcagacccatcgaggagcagggccccctggacgtgatcatccacaagctgaccgacgtgatcctggaggccgaccagaacgacagccagagcctggagctggtgcacagattccaggagtacatcgacgcccaccccgagaccatcgtgctggaccccctgcccgccatcagaaccctgctggacagaagcaagagctacgagctgatcagaaagatcgaggcctacatggaggacgacagaatctgcagcccccccttcatggagctgaccagcctgtgcggcgacgacaccatgagactgctggagaagaacggcctgaccttccccttcatctgcaagaccagagtggcccacggcaccaacagccacgagatggccatcgtgttcaaccaggagggcctgaacgccatccagcccccctgcgtggtgcagaacttcatcaaccacaacgccgtgctgtacaaggtgttcgtggtgggcgagagctacaccgtggtgcagagacccagcctgaagaacttcagcgccggcaccagcgacagagagagcatcttcttcaacagccacaacgtgagcaagcccgagagcagcagcgtgctgaccgagctggacaagatcgagggcgtgttcgagagacccagcgacgaggtgatcagagagctgagcagagccctgagacaggccctgggcgtgagcctgttcggcatcgacatcatcatcaacaaccagaccggccagcacgccgtgatcgacatcaacgccttccccggctacgagggcgtgagcgagttcttcaccgacctgctgaaccacatcgccaccgtgctgcagggccagagcaccgccatggccgccaccggcgacgtggccctgctgagacacagcaagctgctggccgagcccgccggcggcctggtgggcgagagaacctgcagcgccagccccggctgctgcggcagcatgatgggccaggacgccccctggaaggccgaggccgacgccggcggcaccgccaagctgccccaccagagactgggctgcaacgccggcgtgagccccagcttccagcagcactgcgtggccagcctggccaccaaggccagcagccagtag

SEQ ID NO: 11641 - DNA, 864 bp, synthetic construct
  source 1..864: mol_type = other DNA; note = Synthetic coding sequence
atgtgcggcagaagaagaagacagagagccgccctgctgagccactgggaccccaccctgagcagcgactgggacggcgagagaaccgccccccagtgcctgctgagaatcaagagagacatcatgagcatctacaaggagcccccccccggcatgttcgtggtgcccgacaccgtggacatgaccaagatccacgccctgatcaccggccccttcgacaccccctacgagggcggcttcttcctgttcgtgttcagatgcccccccgactaccccatccacccccccagagtgaagctgatgaccaccggcaacaacaccgtgagattcaaccccaacttctacagaaacggcaaggtgtgcctgagcatcctgggcacctggaccggccccgcctggagccccgcccagagcatcagcagcgtgctgatcagcatccagagcctgatgaccgagaacccctaccacaacgagcccggcttcgagcaggagagacaccccggcgacagcaagaactacaacgagtgcatcagacacgagaccatcagagtggccgtgtgcgacatgatggagggcaagtgcccctgccccgagcccctgagaggcgtgatggagaagagcttcctggagtactacgacttctacgaggtggcctgcaaggacagactgcacctgcagggccagaccatgcaggaccccttcggcgagaagagaggccacttcgactaccagagcctgctgatgagactgggcctgatcagacagaaggtgctggagagactgcacaacgagaacgccgagatggacagcgacagcagcagcagcggcaccgagaccgacctgcacggcagcctgagagtgtag

SEQ ID NO: 11642 - DNA, 852 bp, synthetic construct
  source 1..852: mol_type = other DNA; note = Synthetic coding sequence
cccccctgcagcctgatcagcgactgctgcgccggcaaccagagagacagcgtgggcgtgggccccagcgagcccggctgctacccctgccccggccccaacatgaaccccatcgccctgggcagcagatggctggcctacgccgagaacaagctgatcagatgccaccagagcagaggcggcgcctgcggcgacaacatccagagctacaccgccaccgtgatcagcgccgccaagaccctgaagagcggcctgaccatggtgggcaaggtggtgacccagctgaccggcaccctgcccagcggcgtgaccgaggacgacgtggccatccacagcaacagcagaagaagccccctggtgcccggcatcatcaccgtgatcgacaccgagaccgtgggcgagggccaggtgctggtgagcgaggacagcgacagcgacggcatcgtggcccacttccccgcccacgagaagcccgtgtgctgcatggccttcaacaccagcggcatgctgctggtgaccaccgacaccctgggccacgacttccacgtgttccagatcctgacccacccctggagcagcagccagtgcgccgtgcaccacctgtacaccctgcacagaggcgagaccgaggccaaggtgcaggacatctgcttcagccacgactgcagatgggtggtggtgagcaccctgagaggcaccagccacgtgttccccatcaacccctacggcggccagccctgcgtgagaacccacatgagccccagagtggtgaacagaatgagcagattccagaagagcgccggcctggaggagatcgagcaggagctgaccagcaagcagggcggcagatag

SEQ ID NO: 11643 - DNA, 2235 bp, synthetic construct
  source 1..2235: mol_type = other DNA; note = Synthetic coding sequence
atgagcgccgccaaccccgagacccccaacagcaccatcagcagagaggccagcacccagagcagcagcgccgccgccagccagggctgggtgctgcccgagggcaagatcgtgcccaacaccgtgttcgtgggcggcatcgacgccagaatggacgagaccgagatcggcagctgcttcggcagatacggcagcgtgaaggaggtgaagatcatcaccaacagaaccggcgtgagcaagggctacggcttcgtgagcttcgtgaacgacgtggacgtgcagaagatcgtgggcagccagatccacttccacggcaagaagctgaagctgggccccgccatcagaaagcagaagctgtgcgccagacacgtgcagcccagacccctggtggtgaacccccccccccccccccagttccagaacgtgtggagaaaccccaacaccgagacctacctgcagccccagatcacccccaaccccgtgacccagcacgtgcagagcgccgccaaccccgagacccccaacagcaccatcagcagagaggccagcacccagagcagcagcgccgccgccagccagggctgggtgctgcccgagggcaagatcgtgcccaacaccgtgttcgtgggcggcatcgacgccagaatggacgagaccgagatcggcagctgcttcggcagatacggcagcgtgaaggaggtgaagatcatcaccaacagaaccggcgtgagcaagggctacggcttcgtgagcttcgtgaacgacgtggacgtgcagaagatcgtgggcagccagatccacttccacggcaagaagctgaagctgggccccgccatcagaaagcagaagctgtgcgccagacacgtgcagcccagacccctggtggtgaacccccccccccccccccagttccagaacgtgtggagaaaccccaacaccgagacctacctgcagccccagatcacccccaaccccgtgacccagcacgtgcagagcgccgccaaccccgagacccccaacagcaccatcagcagagaggccagcacccagagcagcagcgccgccgccagccagggctgggtgctgcccgagggcaagatcgtgcccaacaccgtgttcgtgggcggcatcgacgccagaatggacgagaccgagatcggcagctgcttcggcagatacggcagcgtgaaggaggtgaagatcatcaccaacagaaccggcgtgagcaagggctacggcttcgtgagcttcgtgaacgacgtggacgtgcagaagatcgtgggcagccagatccacttccacggcaagaagctgaagctgggccccgccatcagaaagcagaagctgtgcgccagacacgtgcagcccagacccctggtggtgaacccccccccccccccccagttccagaacgtgtggagaaaccccaacaccgagacctacctgcagccccagatcacccccaaccccgtgacccagcacgtgcaggcctacagcgcctacccccacagccccggccaggtgatcaccggctgccagctgctggtgtacaactaccaggagtaccccacctaccccgacagcgccttccaggtgaccaccggctaccagctgcccgtgtacaactaccagcccttccccgcctaccccagaagccccttccaggtgaccgccggctaccagctgcccgtgtacaactaccaggccttccccgcctaccccaacagccccttccaggtggccaccggctaccagttccccgtgtacaactaccagcccttccccgcctaccccagcagccccttccaggtgaccgccggctaccagctgcccgtgtacaactaccaggccttccccgcctaccccaacagccccttccaggtggccaccggctaccagttccccgtgtacaactaccaggccttccccgcctaccccaacagccccgtgcaggtgaccaccggctaccagctgcccgtgtacaactaccaggccttccccgcctaccccagcagccccttccaggtgaccaccggctaccagctgcccgtgtacaactaccaggccttccccgcctaccccaacagcgccgtgcaggtgaccaccggctaccagttccacgtgtacaactaccagatgcccccccagtgccccgtgggcgagcagagaagaaacctgtggaccgaggcctacaagtggtggtacctggtgtgcctgatccagagaagagactag

SEQ ID NO: 11644 - DNA, 1089 bp, synthetic construct; identical to SEQ ID NO: 9912
  source 1..1089: mol_type = other DNA; note = Synthetic coding sequence

SEQ ID NO: 11645 - DNA, 2130 bp, synthetic construct
  source 1..2130: mol_type = other DNA; note = Synthetic coding sequence
atggccgacgccggcatcagaagagtggtgcccagcgacctgtaccccctggtgctgggcttcctgagagacaaccagctgagcgaggtggccaacaagttcgccaaggccaccggcgccacccagcaggacgccaacgccagcagcctgctggacatctacagcttctggctgaagagcgccaaggtgcccgagagaaagctgcaggccaacggccccgtggccaagaaggccaagaagaaggccagcagcagcgacagcgaggacagcagcgaggaggaggaggaggtgcagggcccccccgccaagaaggccgccgtgcccgccaagagagtgggcctgccccccggcaaggccgccgccaaggccagcgagagcagcagcagcgaggagagcagcgacgacgacgacgaggaggaccagaagaagcagcccgtgcagaagggcgtgaagccccaggccaaggccgccaaggccccccccaagaaggccaagagcagcgacagcgacagcgacagcagcagcgaggacgagccccccaagaaccagaagcccaagatcacccccgtgaccgtgaaggcccagaccaaggccccccccaagcccgccagagccgcccccaagatcgccaacggcaaggccgccagcagcagcagcagcagcagcagcagcagcagcagcgacgacagcgaggaggagaaggccgccgccacccccaagaaggtgtggaccatcaccagcgtgagagccgagaccgtgcccaagaagcaggtggtggccaaggcccccgtgaaggccgccaccacccccaccagaaagagcagcagcagcgaggacagcagcagcgacgaggaggaggagcagaagaagcccatgaagaacaagcccggcccctacagcagcgtgcccccccccagcgcccccccccccaagaagagcctgggcacccagccccccaagaaggccgtggagaagcagcagcccgtggagagcagcgaggacagcagcgacgagagcgacagcagcagcgaggaggagaagaagccccccaccaaggccgtggtgagcaaggccaccaccaagcccccccccgccaagaaggccgccgagagcagcagcgacagcagcgacagcgacagcagcgaggacgacgaggcccccagcaagcccgccggcaccaccaagaacagcagcaacaagcccgccgtgaccaccaagagccccgccgtgaagcccgccgccgcccccaagcagcccgtgggcggcggccagaagctgctgaccagaaaggccgacagcagcagcagcgaggaggagagcagcagcagcgaggaggagaagaccaagaagatggtggccaccaccaagcccaaggccaccgccaaggccgccctgagcctgcccgccaagcaggccccccagggcagcagagacagcagcagcgacagcgacagcagcagcagcgaggaggaggaggagaagaccagcaagagcgccgtgaagaagaagccccagaaggtggccggcggcgccgcccccagcaagcccgccagcgccaagaagggcaaggccgagagcagcaacagcagcagcagcgacgacagcagcgaggaggaggaggagaagctgaagggcaagggcagccccagaccccaggcccccaaggccaacggcaccagcgccctgaccgcccagaacggcaaggccgccaagaacagcgaggaggaggaggaggagaagaagaaggccgccgtggtggtgagcaagagcggcagcctgaagaagagaaagcagaacgaggccgccaaggaggccgagaccccccaggccaagaagatcaagctgcagacccccaacaccttccccaagagaaagaagggcgagaagagagccagcagccccttcagaagagtgagagaggaggagatcgaggtggacagcagagtggccgacaacagcttcgacgccaagagaggcgccgccggcgactggggcgagagagccaaccaggtgctgaagttcaccaagggcaagagcttcagacacgagaagaccaagaagaagagaggcagctacagaggcggcagcatcagcgtgcaggtgaacagcatcaagttcgacagcgagtag

SEQ ID NO: 11646 - DNA, 558 bp, synthetic construct; identical to SEQ ID NO: 10639
  source 1..558: mol_type = other DNA; note = Synthetic coding sequence

SEQ ID NO: 11647 - DNA, 1764 bp, synthetic construct; identical to SEQ ID NO: 10411
  source 1..1764: mol_type = other DNA; note = Synthetic coding sequence

SEQ ID NO: 11648 - DNA, 1098 bp, synthetic construct
  source 1..1098: mol_type = other DNA; note = Synthetic coding sequence
atgaaggagctgtggtgcgtgatggactgggccgtgcccggcctgctgggcagcggcacctacttcaagaagcagttcagcgaccccgtggagcacggccagagacacaccgccaccaagagagagctggccaccggcagaaaggccatgcagagactggccaagaagatgagcggctggttcctgagaagaaccaagaccctgatcaaggaccagctgcccaagaaggaggacagaatggtgtactgcagcctgaccgacttccagaaggccgtgtaccagaccgtgctggagaccgaggacgtgaccctgatcctgcagagcagcgagccctgcacctgcagaagcggccagaagagaagaaactgctgctacaagaccaacagccacggcgagaccgtgaagaccctgtacctgagctacctgaccgtgctgcagaaggtggccaaccacgtggccctgctgcaggccgccagcaccagcaagcagcaggagaccctgatcaagagaatctgcgaccaggtgttcagcagattccccgacttcgtgcagaagagcaaggacgccgccttcgagaccctgagcgaccccaagtacagcggcaagatgaaggtgctgcagcagctgctgaaccactgcagaaagaacagagacaaggtgctgctgttcagcttcagcaccaagctgctggacgtgctgcagcagtactgcatggccagcggcctggactacagaagactggacggcagcaccaagagcgaggagagactgaagatcgtgaaggagttcaacagcacccaggacgtgaacatctgcctggtgagcaccatggccggcggcctgggcctgaacttcgtgggcgccaacgtggtggtgctgttcgaccccacctggaaccccgccaacgacctgcaggccatcgacagaacccagacccactgcagaagagagagagacgccgagcccctgagcagcgcccccggcctgcagaacggcagcgagaacgccgtgccctacccctggtggtgctgcgtgaccggcgccagcatcagctgctggagatgcgagatctgcagaatccaggacgtgctggagtag

SEQ ID NO: 11649 - DNA, 1104 bp, synthetic construct
  source 1..1104: mol_type = other DNA; note = Synthetic coding sequence
atggagaagaagaagatggtgacccagggcaaccaggagcccaccaccacccccgacgccatggtgcagcccttcaccaccatccccttccccccccccccccagaacggcatccccaccgagtacggcgtgccccacacccaggactacgccggccagaccggcgagcacaacctgaccctgtacggcagcacccaggcccacggcgagcagagcagcaacagccccagcacccagaacggcagcctgacccagaccgagggcggcgcccagaccgacggccagcagagccagacccagagcagcgagaacagcgagagcaagagcacccccaagagactgcacgtgagcaacatccccttcagattcagagaccccgacctgagacagatgttcggccagttcggcaagatcctggacgtggagatcatcttcaacgagagaggcagcaagggcttcggcttcgtgaccttcgagaacagcgccgacgccgacagagccagagagaagctgcacggcaccgtggtggagggcagaaagatcgaggtgaacaacgccaccgccagagtgatgaccaacaagaagatggtgaccccctacgccaacggctggaagctgagccccgtggtgggcgccgtgtacggccccgagctgtacgccgccagcagcttccaggccgacgtgagcctgggcaacgacgccgccgtgcccctgagcggcagaggcggcatcaacacctacatccccctgatcatccccggcttcccctaccccaccgccgccaccaccgccgccgccttcagaggcgcccacctgagaggcagaggcagaaccgtgtacggcgccgtgagagccgtgccccccaccgccatccccgcctaccccggcgtggacatgcagcccaccgacatgcacagcctgctgctgcagccccagccccccctgctgcagcccctgcagcccctgaccgtgaccgtgatggccggctgcacccagcccacccccaccatgcccctgcccctgcccctggccatggagctggccctgtggagagtgtacaccgaggtggccaccgccgacctgccccccaccgaggtgacctag

SEQ ID NO: 11650 - DNA, 1764 bp, synthetic construct; identical to SEQ ID NO: 10411
  source 1..1764: mol_type = other DNA; note = Synthetic coding sequence

SEQ ID NO: 11651 - DNA, 1143 bp, synthetic construct
  source 1..1143: mol_type = other DNA; note = Synthetic coding sequence
atggacgccgccaccctgacctacgacaccctgagattcgccgagttcgaggacttccccgagaccagcgagcccgtgtggatcctgggcagaaagtacagcatcttcaccgagaaggacgagatcctgagcgacgtggccagcagactgtggttcacctacagaaagaacttccccgccatcggcggcaccggccccaccagcgacaccggctggggctgcatgctgagatgcggccagatgatcttcgcccaggccctggtgtgcagacacctgggcagagactggagatggacccagagaaagagacagcccgacagctacttcagcgtgctgaacgccttcatcgacagaaaggacagctactacagcatccaccagatcgcccagatgggcgtgggcgagggcaagagcatcggccagtggtacggccccaacaccgtggcccaggtgctgaagaagctggccgtgttcgacacctggagcagcctggccgtgcacatcgccatggacaacaccgtggtgatggaggagatcagaagactgtgcagaaccagcgtgccctgcgccggcgccaccgccttccccgccgacagcgacagacactgcaacggcttccccgccggcgccgaggtgaccaacagacccagcccctggagacccctggtgctgctgatccccctgagactgggcctgaccgacatcaacgaggcctacgtggagaccctgaagcactgcttcatgatgccccagagcctgggcgtgatcggcggcaagcccaacagcgcccactacttcatcggctacgtgggcgaggagctgatctacctggacccccacaccacccagcccgccgtggagcccaccgacggctgcttcatccccgacgagagcttccactgccagcaccccccctgcagaatgagcatcgccgagctggaccccagcatcgccgtgggcttcttctgcaagaccgaggacgacttcaacgactggtgccagcaggtgaagaagctgagcctgctgggcggcgccctgcccatgttcgagctggtggagctgcagcccagccacctggcctgccccgacgtgctgaacctgagcctgggcgagagctgccaggtgcagatcctgctgatgtag

SEQ ID NO: 11652 - DNA, 2124 bp, synthetic construct
  source 1..2124: mol_type = other DNA; note = Synthetic coding sequence
atgatccccccccaggaggccagcgccagaagaagagagatcgaggacaagctgaagcaggaggaggagaccctgagcttcatcagagacagcctggagaagagcgaccagctgaccaagaacatggtgagcatcctgagcagcttcgagagcagactgatgaagctggagaacagcatcatccccgtgcacaagcagaccgagaacctgcagagactgcaggagaacgtggagaagaccctgagctgcctggaccacgtgatcagctactaccacgtggccagcgacaccgagaagatcatcagagagggccccaccggcagactggaggagtacctgggcagcatggccaagatccagaaggccgtggagtacttccaggacaacagccccgacagccccgagctgaacaaggtgaagctgctgttcgagagaggcaaggaggccctggagagcgagttcagaagcctgatgaccagacacagcaaggtggtgagccccgtgctgatcctggacctgatcagcggcgacgacgacctggaggcccaggaggacgtgaccctggagcacctgcccgagagcgtgctgcaggacgtgatcagaatcagcagatggctggtggagtacggcagaaaccaggacttcatgaacgtgtactaccagatcagaagcagccagctggacagaagcatcaagggcctgaaggagcacttccacaagagcagcagcagcagcggcgtgccctacagccccgccatccccaacaagagaaaggacacccccaccaagaagcccgtgaagagacccggcaccatcagaaaggcccagaacctgctgaagcagtacagccagcacggcctggacggcaagaagggcggcagcaacctgatccccctggagggccacgagcacgacttcagagtgaagcacctgagcgaggccctgaacgacaagcacggccccctggccggcagagacgacatgctggacgtggagaccgacgcctacatccactgcgtgagcgccttcgtgaagctggcccagagcgagtaccagctgctggccgacatcatccccgagcaccaccagaagaagaccttcgacagcctgatccaggacgccctggacggcctgatgctggagggcgagaacatcgtgagcgccgccagaaaggccatcgtgagacacgacttcagcaccgtgctgaccgtgttccccatcctgagacacctgaagcagaccaagcccgagttcgaccaggtgctgcagggcaccgccgccagcaccaagaacaagctgcccggcctgatcaccagcatggagaccatcggcgccaaggccctggaggacttcgccgacaacatcaagaacgaccccgacaaggagtacaacatgcccaaggacggcaccgtgcacgagctgaccagcaacgccatcctgttcctgcagcagctgctggacttccaggagaccgccggcgccatgctggccagccaggagaccagcagcagcgccaccagctacagcagcgagttcagcaagagactgctgagcacctacatctgcaaggtgctgggcaacctgcagctgaacctgctgagcaagagcaaggtgtacgaggaccccgccctgagcgccatcttcctgcacaacaactacaactacatcctgaagagcctggagaagagcgagctgatccagctggtggccgtgacccagaagaccgccgagagaagctacagagagcacatcgagcagcagatccagacctaccagagaagctggctgaaggtgaccgactacatcgccgagaagaacctgcccgtgttccagcccggcgtgaagctgagagacaaggagagacagatcatcaaggagagattcaagggcttcaacgacggcctggaggagctgtgcaagatccagaaggcctgggccatccccgacaccgagcagagagacagaatcagacaggcccagaagaccatcgtgaaggagacctacggcgccttcctgcagaagttcggcagcgtgcccttcaccaagaaccccgagaagtacatcaagtacggcgtggagcaggtgggcgacatgatcgacagactgttcgacaccagcgcctag

SEQ ID NO: 11653 - DNA, 1026 bp, synthetic construct; identical to SEQ ID NO: 10405
  source 1..1026: mol_type = other DNA; note = Synthetic coding sequence

SEQ ID NO: 11654 - DNA, 1488 bp, synthetic construct
  source 1..1488: mol_type = other DNA; note = Synthetic coding sequence
atggccggcgtgggcagaagcggcggcccctggggcagaaccagaggcggcagaagcggcagactgggcgtgagcctgggcgccctgagcagcctgcccctggaggagctgcccagacccctgtgctgcagaagatgcagaagacacttcggcttcgccctgagaggcgagaccatccccgtgagcgtggccggcagcgccagcagccagttcgcccccctggccctgcacctgagcctgctgctgagcagaatcagcgccagcagactgaccagatggcccccccccgacaagagagagggcagcgccgtggaccccggcaagagaagaagcctggccgccacccccagcagcagcctgccctgcaccctgatcgccctgggcctgagacacgagaaggaggccaacgagctgatggaggacctgttcgagaccttccaggacgagatgggcttcagcaacatggaggacgacggccccgaggaggaggagagagtggccgagccccaggccaacttcaacaccccccaggccctgagattcgaggagctgctggccaacctgctgaacgagcagcaccagatcgccaaggagctgttcgagcagctgaagatgaagaagcccagcgccaagcagcagaaggaggtggagaaggtgaagccccagtgcaaggaggtgcaccagaccctgatcctggaccccgcccagagaaagagactgcagcagcagatgcagcagcacgtgcagctgctgacccagatccacctgctggccacctgcaaccccaacctgaaccccgaggccagcagcaccagaatctgcctgaaggagctgggcaccttcgcccagagcagcatcgccctgcaccaccagtacaaccccaagttccagaccctgttccagccctgcaacctgatgggcgccatgcagctgatcgaggacttcagcacccacgtgagcatcgactgcagcccccacaagaccgtgaagaagaccgccaacgagttcccctgcctgcccaagcaggtggcctggatcctggccaccagcaaggtgttcatgtaccccgagctgctgcccgtgtgcagcctgaaggccaagaacccccaggacaagatcctgttcaccaaggccgaggacaacctgctggccctgggcctgaagcacttcgagggcaccgagttcctgaaccccctgatcagcaagtacctgctgacctgcaagaccgccagacagctgaccgtgagaatcaagaacctgaacatgaacagagcccccgacaacatcatcaagttctacaagaagaccaagcagctgcccgtgctgggcaagtgctgcgaggagatccagccccaccagtggaagccccccatcgagagagaggagcacagactgcccttctggctgaaggtgcagcccagcagcagcaagagcgtgggcggcagaagaagcctgaaggtgctgagagagtaccagggcctgccctag

SEQ ID NO: 11655 - DNA, 180 bp, synthetic construct
  source 1..180: mol_type = other DNA; note = Synthetic coding sequence
atggccgcccccggcgccctgctggtgatgggcgtgagcggcagcggcaactgggacggcaacagcatgatgctgatgatcatcaccagaagaaagatcgagggcagatgggagaaggcctacagaagcatgaccagaaccggcttccacggcagcgtgacctgcatgaccttctactag

SEQ ID NO: 11656 - DNA, 207 bp, synthetic construct
  source 1..207: mol_type = other DNA; note = Synthetic coding sequence
atgggcgagaccgagggcaagaaggacgaggccgactacaagagactgcagaccttccccctggtgagacacagcgacatgcccgaggagatgagagtggagaccatggagctgtgcgtgaccgcctgcgagaagttcagcaacaacaacgaggtgctgcccgccgtgcaggccgcccccagagccttcgacggcccctgcggctag

SEQ ID NO: 11657 - DNA, 2451 bp, synthetic construct; identical to SEQ ID NO: 10736
  source 1..2451: mol_type = other DNA; note = Synthetic coding sequence

SEQ ID NO: 11658 - DNA, 1119 bp, synthetic construct; identical to SEQ ID NO: 9937
  source 1..1119: mol_type = other DNA; note = Synthetic coding sequence

SEQ ID NO: 11659 - DNA, 480 bp, synthetic construct
  source 1..480: mol_type = other DNA; note = Synthetic coding sequence
atgatccccccccaggaggccagcgccagaagaagagagatcgaggacaagctgaagcaggaggaggagaccctgagcttcatcagagacagcctggagaagagcgaccagctgaccaagaacatggtgagcatcctgagcagcttcgagagcagactgatgaagctggagaacagcatcatccccgtgcacaagcagaccgagaacctgcagagactgcaggagaacgtggagaagaccctgagctgcctggaccacgtgatcagctactaccacgtggccagcgacaccgagaagatcatcagagagggccccaccggcagactggaggagtacctgggcagcatggccaagatccagaaggccgtggagtacttccaggacaacagccccgacagccccgagctgaacaaggtggtgagaggcccccagaacaacgtgagaagcctgggcatcagcgtgagcgccctggtgagctag

SEQ ID NO: 11660 - DNA, 243 bp, synthetic construct
  source 1..243: mol_type = other DNA; note = Synthetic coding sequence
atggccagcgaggagctgcagaaggacctggaggaggtgaaggtgctgctggagaaggccaccagaaagagagtgagagacgccctgaccgccgagaagagcaagatcgagaccgagatcaagaacaagatgcagcagaagagccagaagaaggccgagctgctggacaacgagaagcccgccgccgtggtggcccccatcaccaccggctacaccgacggcatcagccagatcagcctgtag

SEQ ID NO: 11661 - DNA, 606 bp, synthetic construct
  source 1..606: mol_type = other DNA; note = Synthetic coding sequence
atgcccagcgagaccctgtgggagatcgccaaggccgaggtggagaagagaggcatcaacggcagcgagggcgacggcgccgagatcgccgagaagttcgtgttcttcatcggcagcaagaacggcggcaagaccaccatcatcctgagatgcctggacagagacgagccccccaagcccaccctggccctggagtacacctacggcagaagagccaagggccacaacacccccaaggacatcgcccacttctgggagctgggcggcggcaccagcctgctggacctgatcagcatccccatcaccggcgacaccctgagaaccttcagcctggtgctggtgctggacctgagcaagcccaacgacctgtggcccaccatggagaacctgctgcaggccaccaagagccacgtggacaaggtgatcatgaagctgggcaagaccaacgccaaggccgtgagcgagatgagacagaagatctggaacaacatgcccaaggaccaccccgtgagctgctgcctgggcctgctgctggagagcctggtgcccttcatcgtgaacgacaacatcaccaacaacttcttcagattcctgtgcatgacctag

SEQ ID NO: 11662 - DNA, 1401 bp, synthetic construct
  source 1..1401: mol_type = other DNA; note = Synthetic coding sequence
atgagctacagacccgtggtgagccccgtgatgagcctgaccagaagatgcatgagaagcagaaccagcatgagaaccgacgccgtgttcctgatcctgtacaaggagctgtactacagacacatctacgccaaggtgagcggcggccccagcctggagcagagattcgagagctactacaactactgcaacctgttcaactacatcctgaacgccgacggccccgcccccctggagctgcccaaccagtggctgtgggacatcatcgacgagttcatctaccagttccagagcttcagccagtacagatgcaagaccgccaagaagagcgaggaggagatcgacttcctgagaagcaaccccaagatctggaacgtgcacagcgtgctgaacgtgctgcacagcctggtggacaagagcaacatcaacagacagctggaggtgtacaccagcggcggcgaccccgagagcgtggccggcgagtacggcagacacagcctgtacaagatgctgggctacttcagcctggtgggcctgctgagactgcacagcctgctgggcgactactaccaggccatcaaggtgctggagaacatcgagctgaacaagaagagcatgtacagcagagtgcccgagtgccaggtgaccacctactactacgtgggcttcgcctacctgatgatgagaagataccaggacgccatcagagtgttcgccaacatcctgctgtacatccagagaaccaagagcatgttccagagaaccacctacaagtacgagatgatcaacaagcagaacgagcagatgcacgccctgctggccatcgccctgaccatgtaccccatgagaatcgacgagagcatccacctgcagctgagagagaagtacggcgacaagatgctgagaatgcagaagggcgacccccaggtgtacgaggagctgttcagctacagctgccccaagttcctgagccccgtggtgcccaactacgacaacgtgcaccccaactaccacaaggagcccttcctgcagcagctgaaggtgttcagcgacgaggtgcagcagcaggcccagctgagcaccatcagaagcttcctgaagctgtacaccaccatgcccgtggccaagctggccggcttcctggacctgaccgagcaggagttcagaatccagctgctggtgttcaagcacaagatgaagaacctggtgtggaccagcggcatcagcgccctggacggcgagttccagagcgccagcgaggtggacttctacatcgacaaggacatgatccacatcgccgacaccaaggtggccagaagatacggcgacttcttcatcagacagatccacaagttcgaggagctgaacagaaccctgaagaagatgggccagagaccctag

SEQ ID NO: 11663 - DNA, 597 bp, synthetic construct
  source 1..597: mol_type = other DNA; note = Synthetic coding sequence
atgagcagagccgtgaccatcgccgaggccttctgccacatcctgttcagaatcatcagcgagatcctgatgagaatgctggaggagcagtgcctgttccccctgcccgagccccaggacctgttccaggccagccagatgaagttcgaggacttccagaaggacctgagaaagctgaagaaggacctgaaggcctgcgaggtggaggccggcaaggtgtaccaggtgagcagcaaggagcacatgcagcccttcaaggagaacatggagcagttcatcatccaggccaagatcgaccaggaggccgaggagaacagcctgaccgagacccacaagtgcttcctggagaccaccgcctacttcttcatgaagcccaagctgggcgagaaggaggtgagccccaacgccttcttcagcatctggcacgagttcagcagcgacttcaaggacttctggaagaaggagaacaagctgctgctgcaggagagagtgaaggaggccgaggaggtgtgcagacagaagaagggcaagagcctgtacaagatcaagcccagacacgacagcggcatcaaggccaagatcagcatgaagacctag

SEQ ID NO: 11664 - DNA, 441 bp, synthetic construct
  source 1..441: mol_type = other DNA; note = Synthetic coding sequence
atggagcccaccagagactgccccctgttcggcggcgccttcagcgccatcctgcccatgggcgccatcgacgtgagcgacctgagacccgtgcccgacaaccaggaggtgttctgccaccccgtgaccgaccagagcctgatcgtggagctgctggagctgcaggcccacgtgagaggcgaggccgccgccagataccacttcgaggacgtgggcggcgtgcagggcgccagagccgtgcacgtggagagcgtgcagcccctgagcctggagaacctggccctgagaggcagatgccaggaggcctgggtgctgagcggcaagcagcagatcgccaaggagaaccagcaggtggccaaggacgtgaccctgcaccaggccctgctgagactgccccagtaccagaccgacctgctgctgaccttcaaccagcccccctag

SEQ ID NO: 11665 - DNA, 1584 bp, synthetic construct
  source 1..1584: mol_type = other DNA; note = Synthetic coding sequence
atgagcctgtgcggcgccagagccaacgccaagatgatggccgcctacaacggcggcaccagcgccgccgccgccggccaccaccaccaccaccaccaccacctgccccacctgccccccccccacctgcaccaccaccaccacccccagcaccacctgcaccccggcagcgccgccgccgtgcaccccgtgcagcagcacaccagcagcgccgccgccgccgccgccgccgccgccgccgccgccgccatgctgaaccccggccagcagcagccctacttccccagccccgcccccggccaggcccccggccccgccgccgccgcccccgcccaggtgcaggccgccgccgccgccaccgtgaaggcccaccaccaccagcacagccaccacccccagcagcagctggacatcgagcccgacagacccatcggctacggcgccttcggcgtggtgtggagcgtgaccgaccccagagacggcaagagagtggccctgaagaagatgcccaacgtgttccagaacctggtgagctgcaagagagtgttcagagagctgaagatgctgtgcttcttcaagcacgacaacgtgctgagcgccctggacatcctgcagcccccccacatcgactacttcgaggagatctacgtggtgaccgagctgatgcagagcgacctgcacaagatcatcgtgagcccccagcccctgagcagcgaccacgtgaaggtgttcctgtaccagatcctgagaggcctgaagtacctgcacagcgccggcatcctgcacagagacatcaagcccggcaacctgctggtgaacagcaactgcgtgctgaagatctgcgacttcggcctggccagagtggaggagctggacgagagcagacacatgacccaggaggtggtgacccagtactacagagcccccgagatcctgatgggcagcagacactacagcaacgccatcgacatctggagcgtgggctgcatcttcgccgagctgctgggcagaagaatcctgttccaggcccagagccccatccagcagctggacctgatcaccgacctgctgggcacccccagcctggaggccatgagaaccgcctgcgagggcgccaaggcccacatcctgagaggcccccacaagcagcccagcctgcccgtgctgtacaccctgagcagccaggccacccacgaggccgtgcacctgctgtgcagaatgctggtgttcgaccccagcaagagaatcagcgccaaggacgccctggcccacccctacctggacgagggcagactgagataccacacctgcatgtgcaagtgctgcttcagcaccagcaccggcagagtgtacaccagcgacttcgagcccgtgaccaaccccaagttcgacgacaccttcgagaagaacctgagcagcgtgagacaggtgaaggagatcatccaccagttcatcctggagcagcagaagggcaacagagtgcccctgtgcatcaacccccagagcgccgccttcaagagcttcatcagcagcaccgtggcccagcccagcgagatgccccccagccccctggtgtgggagtag

SEQ ID NO: 11666 - DNA, 2742 bp, synthetic construct
  source 1..2742: mol_type = other DNA; note = Synthetic coding sequence
atgaacgaggccatggccaccgacagccccagaagacccagcagatgcaccggcggcgtggtggtgagaccccaggccgtgaccgagcagagctacatggagagcgtggtgaccttcctgcaggacgtggtgccccaggcctacagcggcacccccctgaccgaggagaaggagaagatcgtgtgggtgagattcgagaacgccgacctgaacgacaccagcagaaacctggagttccacgagatccacagcaccggcaacgagccccccctgctgatcatgatcggctacagcgacggcatgcaggtgtggagcatccccatcagcggcgaggcccaggagctgttcagcgtgagacacggccccatcagagccgccagaatcctgcccgccccccagttcggcgcccagaagtgcgacaacttcgccgagaagagacccctgctgggcgtgtgcaagagcatcggcagcagcggcaccagccccccctactgctgcgtggacctgtacagcctgagaaccggcgagatggtgaagagcatccagttcaagacccccatctacgacctgcactgcaacaagagaatcctggtggtggtgctgcaggagaagatcgccgccttcgacagctgcaccttcaccaagaagttcttcgtgaccagctgctacccctgccccggccccaacatgaaccccatcgccctgggcagcagatggctggcctacgccgagaacaagctgatcagatgccaccagagcagaggcggcgcctgcggcgacaacatccagagctacaccgccaccgtgatcagcgccgccaagaccctgaagagcggcctgaccatggtgggcaaggtggtgacccagctgaccggcaccctgcccagcggcgtgaccgaggacgacgtggccatccacagcaacagcagaagaagccccctggtgcccggcatcatcaccgtgatcgacaccgagaccgtgggcgagggccaggtgctggtgagcgaggacagcgacagcgacggcatcgtggcccacttccccgcccacgagaagcccgtgtgctgcatggccttcaacaccagcggcatgctgctggtgaccaccgacaccctgggccacgacttccacgtgttccagatcctgacccacccctggagcagcagccagtgcgccgtgcaccacctgtacaccctgcacagaggcgagaccgaggccaaggtgcaggacatctgcttcagccacgactgcagatgggtggtggtgagcaccctgagaggcaccagccacgtgttccccatcaacccctacggcggccagccctgcgtgagaacccacatgagccccagagtggtgaacagaatgagcagattccagaagagcgccggcctggaggagatcgagcaggagctgaccagcaagcagggcggcagatgcagccccgtgcccggcctgagcagcagccccagcggcagccccctgcacggcaagctgaacagccaggacagctacaacaacttcaccaacaacaaccccggcaaccccagactgagccccctgcccagcctgatggtggtgatgcccctggcccagatcaagcagcccatgaccctgggcaccatcaccaagagaaccggcaaggtgaagccccccccccagatcagccccagcaagagcatgggcggcgagttctgcgtggccgccatcttcggcaccagcagaagctggttcgccaacaacgccggcctgaagagagagaaggaccagagcaagcaggtggtggtggagagcctgtacatcatcagctgctacggcaccctggtggagcacatgatggagcccagacccctgagcaccgcccccaagatcagcgacgacacccccctggagatgatgaccagccccagagccagctggaccctggtgagaaccccccagtggaacgagctgcagccccccttcaacgccaaccaccccctgctgctggccgccgacgccgtgcagtactaccagttcctgctggccggcctggtgccccccggcagccccggccccatcaccagacacggcagctacgacagcctggccagcgaccacagcggccaggaggacgaggagtggctgagccaggtggagatcgtgacccacaccggcccccacagaagactgtggatgggcccccagttccagttcaagaccatccaccccagcggccagaccaccgtgatcagcagcagcagcagcgtgctgcagagccacggccccagcgacaccccccagcccctgctggacttcgacaccgacgacctggacctgaacagcctgagaatccagcccgtgagaagcgaccccgtgagcatgcccggcagcagcagacccgtgagcgacagaagaggcgtgagcaccgtgatcgacgccgccagcggcaccttcgacagaagcgtgaccctgctggaggtgtgcggcagctggcccgagggcttcggcctgagacacatgagcagcatggagcacaccgaggagggcctgagagagagactggccgacgccatggccgagagccccagcagagacgtggtgggcagcggcaccgagctgcagagagagggcagcatcgagaccctgagcaacagcagcggcagcaccagcggcagcatccccagaaacttcgacggctacagaagccccctgcccaccaacgagagccagcccctgagcctgttccccaccggcttcccctag

SEQ ID NO: 11667 - DNA, 2160 bp, synthetic construct; identical to SEQ ID NO: 9844
  source 1..2160: mol_type = other DNA; note = Synthetic coding sequence

SEQ ID NO: 11668 - DNA, 324 bp, synthetic construct
  source 1..324: mol_type = other DNA; note = Synthetic coding sequence
atgagcgtgctgagacccctggacaagctgcccggcctgaacaccgccaccatcctgctggtgggcaccgaggacgccctgctgcagcagctggccgacagcatgctgaaggaggactgcgccagcgagctgaaggtgcacctggccaagagcctgcccctgcccagcagcgtgaacagacccagaatcgacctgatcgtgttcgtggtgaacctgcacagcaagtacagcctgcagaacaccgaggagagcctgagacacgtggacgccagcttcttcctgggcaaggtgtgcttcctggccaccggcggcggcagactgtag

SEQ ID NO: 11669 - DNA, 1599 bp, synthetic construct
  source 1..1599: mol_type = other DNA; note = Synthetic coding sequence
atgttcgtgctgggcatccccctgtgccccgccctgagcttcagcggcggcgacgacagccagacccagctgttcgtgagcagcaaggacgtgatcaaggagatcgaggacttcgacagcctggaggccctgagactggagggcaacaccgtgggcgtggaggccgccagagtgatcgccaaggccctggagaagaagagcgagctgaagagatgccactggagcgacatgttcaccggcagactgagaaccgagatcccccccgccctgatcagcctgggcgagggcctgatcaccgccggcgcccagctggtggagctggacctgagcgacaacgccttcggccccgacggcgtgcagggcttcgaggccctgctgaagagcagcgcctgcttcaccctgcaggagctgaagctgaacaactgcggcatgggcatcggcggcggcaaggtgatcggcaccctggaggaggtgcacatgccccagaacggcatcaaccaccccggcatcaccgccctggcccaggccttcgccgtgaaccccctgctgagagtgatcaacctgaacgacaacaccttcaccgagaagggcgccgtggccatggccgagaccctgaagaccctgagacaggtggaggtgatcaacttcggcgactgcctggtgagaagcaagggcgccgtggccatcgccgacgccatcagaggcggcctgcccaagctgaaggagctgaacctgagcttctgcgagatcaagagagacgccgccctggccgtggccgaggccatggccgacaaggccgagctggagaagctggacctgaacggcaacaccctgggcgaggagggctgcgagcagctgcaggaggtgctggagggcttcaacatggccaaggtgctggccagcctgagcgacgacgaggacgaggaggaggaggaggagggcgaggaggaggaggaggaggccgaggaggaggaggaggaggacgaggaggaggaggaggaggaggaggaggaggaggaggaggagccccagcagagaggccagggcgagaagagcgccacccccagcagaaagatcctggaccccaacaccggcgagcccgcccccgtgctgagcagccccccccccgccgacgtgagcaccttcctggccttccccagccccgagaagctgctgagactgggccccaagagcagcgtgctgatcgcccagcagaccgacaccagcgaccccgagaaggtggtgagcgccttcctgaaggtgagcagcgtgttcaaggacgaggccaccgtgagaatggccgtgcaggacgccgtggacgccctgatgcagaaggccttcaacagcagcagcttcaacagcaacaccttcctgaccagactgctggtgcacatgggcctgctgaagagcgaggacaaggtgaaggccatcgccaacctgtacggccccctgatggccctgaaccacatggtgcagcaggactacttccccaaggccctggcccccctgctgctggccttcgtgaccaagcccaacagcgccctggagagctgcagcttcgccagacacagcctgctgcagaccctgtacaaggtgtag

SEQ ID NO: 11670 - DNA, 1383 bp, synthetic construct; identical to SEQ ID NO: 10506
  source 1..1383: mol_type = other DNA; note = Synthetic coding sequence

SEQ ID NO: 11671 - DNA, 567 bp, synthetic construct; identical to SEQ ID NO: 10128
  source 1..567: mol_type = other DNA; note = Synthetic coding sequence

SEQ ID NO: 11672 - DNA, 1596 bp, synthetic construct
  source 1..1596: mol_type = other DNA; note = Synthetic coding sequence
atgaacaagaccaaccaggtgtacgccgccaacgaggaccacaacagccagttcatcgacgactacagcagcagcgacgagagcctgagcgtgagccacttcagcttcagcaagcagagccacagacccagaaccatcagagacagaaccagcttcagcagcaagctgcccagccacaacaagaagaacagcaccttcatccccagaaagcccatgaagtgcagcaacgagaaggtggtgaaccaggagcagagctacgagagcatggacaagttcctggacggcgtgcaggaggtggcctacatccacagcaaccagaacgtgatcggcagcagcaaggccgagaaccacatgagcagatgggccgcccacgacgtgttcgagctgaagcagttcagccagctgcccgccaacatcgccgtgtgcagcagcaagacctacaaggagaaggtggacgccgacaccctgccccacaccaagaagggccagcagcccagcgagggcagcatcagcctgcccctgtacatcagcaaccccgtgaaccagaagaagaagaaggtgtaccacaccaaccagaccaccttcatcatcggcgagacccccaagggcatcagaagaaagcagttcgaggagatggccagctacttcaacagcagcagcgtgaacgagttcgccaagcacatcaccaacgccaccagcgaggagagacagaagatgctgagagacttctacgccagccagtaccccgaggtgaaggagttcttcgtggacagcgtgagccagttcaacaacagcagcttcgagaagggcgagcagagaaccagaaagaagagcgacaagagagagagcctgatcaagcccagactgagcgacagcgagaccctgagcttcaaggacagcaccaacaagatcagccaggtgtgcagcctgaagacctacaagagaaagagcgtgaagttccagaaccacatcagctacagagaggaggtgttcttcaacgacgccgagaccaagaagagccccgtgagcagcacccaggagatcgacagcggcaagaacagccaggccagcgaggacaccgtgaccagcagaagcctgaacagcgagagcgagaccagagagagaagactggagaacaccatgaaggaccagcaggacctgaccagaaccggcatcagcagaaaggagcccctgctgaagctggagaacaagaagatcgagaaccccgtgctggagaacaccagcgtgatcagcctgctgggcgacaccagcatcctggacgacctgttcaagagccacggcaacagccccacccagctgcccaagaaggtgctgagcggccccatggagaaggccaagcagagacccaaggacttctgggacatcctgaacgagcagaacgacgagagcctgagcaagctgaccgacctggccgtgatcgagaccctgtgcgagaaggcccccctggccgcccccttcaagagaagagaggagcccgccaccagcctgtggaagagcaacgagaagttcctgtggaagaagttcagccccagcgacaccgacgagaacgccaccaacacccagagcaccacctag

SEQ ID NO: 11673 - DNA, 1089 bp, synthetic construct
  source 1..1089: mol_type = other DNA; note = Synthetic coding sequence
atgaccggccacaccagaagcagcctgcccagatgcaccggcatcgtgctgctgatcaagctgagattcagcgagagactgaccggccacctgcacgcccagggcacccccccctacgtgatcaacctggaccccgccgtgcacgaggtgcccttccccgccaacatcgacatcagagacaccgtgaagtacaaggaggtgatgaagcagtacggcctgggccccaacggcggcatcgtgaccagcctgaacctgttcgccaccagattcgaccaggtgatgaagttcatcgagaaggcccagaacatgagcaagtacgtgctgatcgacacccccggccagatcgaggtgttcacctggagcgccagcggcaccatcatcaccgaggccctggccagcagcttccccaccgtggtgatctacgtgatggacaccagcagaagcaccaaccccgtgaccttcatgagcaacatgctgtacgcctgcagcatcctgtacaagaccaagctgcccttcatcgtggtgatgaacaagaccgacatcatcgaccacagcttcgccgtggagtggatgcaggacttcgaggccttccaggacgccctgaaccaggagaccacctacgtgagcaacctgaccagaagcatgagcctggtgctggacgagttctacagcagcctgagagtggtgggcgtgagcgccgtgctgggcaccggcctggacgagctgttcgtgcaggtgaccagcgccgccgaggagtacgagagagagtacagacccgagtacgagagactgaagaagagcctggccaacgccgagagccagcagcagagagagcagctggagagactgagaaaggacatgggcagcgtggccctggacgccggcaccgccaaggacagcctgagccccgtgctgcaccccagcgacctgatcctgaccagaggcaccctggacgaggaggacgaggaggccgacagcgacaccgacgacatcgaccacagagtgaccgaggagagccacgaggagcccgccttccagaacttcatgcaggagagcatggcccagtactggaagagaaacaacaagtag

SEQ ID NO: 11674 - DNA, 1338 bp, synthetic construct; identical to SEQ ID NO: 10183
  source 1..1338: mol_type = other DNA; note = Synthetic coding sequence

SEQ ID NO: 11675 - DNA, 405 bp, synthetic construct
  source 1..405: mol_type = other DNA; note = Synthetic coding sequence
atgagcgagaacgccgcccccggcctgatcagcgagctgctgctgcagagaggcaccaccaaggtggccaccggcctggtgctgaacagagaccagagactggcctgggccgagaacagcatcgacttcatcagcagagagctgtgcgcccacagcatcagaaagctgcaggcccacgtgctgctgatcaaggccgtgcacggctacttcgacagcagacagaactacagcgagaaggagagcctgagcttcatgatcgacaccatgaagagcaccctgaaggagcagttccagttcgtggaggtgcccggcaaccactgcgtgcacatgagcgagccccagcacgtggccagcatcatcagcagcttcctgcagtgcacccacatgctgcccgcccagctgtag

SEQ ID NO: 11676 - DNA, 321 bp, synthetic construct
  source 1..321: mol_type = other DNA; note = Synthetic coding sequence
atgagcagcaagggcagcagcaccgacggcagaaccgacctggccaacggcagcctgagcagcagccccgaggagatgagcggcgccgaggagggcagagagaccagcagcggcatcgaggtggaggccagcgacctgagcctgagcctgaccggcgacgacggcggccccaacagaaccagcaccgagagcagaggcaccgacaccgagagcagcggcgaggacaaggacagcgacagcatggaggacaccggccactacagcatcaacgacgagaacagagtgcacgacagaagcgaggaggaggaggaggaggagtag

SEQ ID NO: 11677 - DNA, 990 bp, synthetic construct; identical to SEQ ID NO: 9812
  source 1..990: mol_type = other DNA; note = Synthetic coding sequence

SEQ ID NO: 11678 - DNA, 2235 bp, synthetic construct
  source 1..2235: mol_type = other DNA; note = Synthetic coding sequence
atggccaccgccaacttcggcaagatccagatcggcatctacgtggagatcaagagaagcgacggcagaatccaccaggccatggtgaccagcctgaacgaggacaacgagagcgtgaccgtggagtggatcgagaacggcgacaccaagggcaaggagatcgacctggagagcatcttcagcctgaaccccgacctggtgcccgacgaggagatcgagcccagccccgagaccccccccccccccgccagcagcgccaaggtgaacaagatcgtgaagaacagaagaaccgtggccagcatcaagaacgacccccccagcagagacaacagagtggtgggcagcgccagagccagacccagccagttccccgagcagagcagcagcgcccagcagaacggcagcgtgagcgacatcagccccgtgcaggccgccaagaaggagttcggcccccccagcagaagaaagagcaactgcgtgaaggaggtggagaagctgcaggagaagagagagaagagaagactgcagcagcaggagctgagagagaagagagcccaggacgtggacgccaccaaccccaactacgagatcatgtgcatgatcagagacttcagaggcagcctggactacagacccctgaccaccgccgaccccatcgacgagcacagaatctgcgtgtgcgtgagaaagagacccctgaacaagaaggagacccagatgaaggacctggacgtgatcaccatccccagcaaggacgtggtgatggtgcacgagcccaagcagaaggtggacctgaccagatacctggagaaccagaccttcagattcgactacgccttcgacgacagcgcccccaacgagatggtgtacagattcaccgccagacccctggtggagaccatcttcgagagaggcatggccacctgcttcgcctacggccagaccggcagcggcaagacccacaccatgggcggcgacttcagcggcaagaaccaggactgcagcaagggcatctacgccctggccgccagagacgtgttcctgatgctgaagaagcccaactacaagaagctggagctgcaggtgtacgccaccttcttcgagatctacagcggcaaggtgttcgacctgctgaacagaaagaccaagctgagagtgctggaggacggcaagcagcaggtgcaggtggtgggcctgcaggagagagaggtgaagtgcgtggaggacgtgctgaagctgatcgacatcggcaacagctgcagaaccagcggccagaccagcgccaacgcccacagcagcagaagccacgccgtgttccagatcatcctgagaagaaagggcaagctgcacggcaagttcagcctgatcgacctggccggcaacgagagaggcgccgacaccagcagcgccgacagacagaccagactggagggcgccgagatcaacaagagcctgctggccctgaaggagtgcatcagagccctgggcagaaacaagccccacacccccttcagagccagcaagctgacccaggtgctgagagacagcttcatcggcgagaacagcagaacctgcatgatcgccaccatcagccccggcatggccagctgcgagaacaccctgaacaccctgagatacgccaacagagtgaaggagttcggcatcagccccagcgacatccccttcagccagggcagcggcagcagacccgacctgagccccagctacgagtacgacgacttcagccccagcgtgaccagagtgaaggagctgaccgtggaccccaccgccgccggcgacgtgagacccatcatgcaccacccccccaaccagatcgacgacctggagacccagtggggcgtgggcagcagcccccagagagacgacctgaagctgctgtgcgagcagaacgaggaggaggtgagcccccagctgttcaccttccacgaggccgtgagccagatggtggagatggaggagcaggtggtggaggaccacagagccgtgttccaggagagcatcagatggctggaggacgagaaggccctgctggagatgaccgaggaggtggactacgacgtggacagctacgccacccagctggaggccatcctggagcagaagatcgacatcctgaccgagctgagagacaaggtgaagagcttcagagccgccctgcaggaggaggagcaggccagcaagcagatcaaccccaagagacccagagccctgtag

SEQ ID NO: 11679 - DNA, 1701 bp, synthetic construct; identical to SEQ ID NO: 9446
  source 1..1701: mol_type = other DNA; note = Synthetic coding sequence

SEQ ID NO: 11680 - DNA, 798 bp, synthetic construct; identical to SEQ ID NO: 9400
  source 1..798: mol_type = other DNA; note = Synthetic coding sequence

SEQ ID NO: 11681 - DNA, 2808 bp, synthetic construct
  source 1..2808: mol_type = other DNA; note = Synthetic coding sequence
atgaacgaggccatggccaccgacagccccagaagacccagcagatgcaccggcggcgtggtggtgagaccccaggccgtgaccgagcagagctacatggagagcgtggtgaccttcctgcaggacgtggtgccccaggcctacagcggcacccccctgaccgaggagaaggagaagatcgtgtgggtgagattcgagaacgccgacctgaacgacaccagcagaaacctggagttccacgagatccacagcaccggcaacgagccccccctgctgatcatgatcggctacagcgacggcatgcaggtgtggagcatccccatcagcggcgaggcccaggagctgttcagcgtgagacacggccccatcagagccgccagaatcctgcccgccccccagttcggcgcccagaagtgcgacaacttcgccgagaagagacccctgctgggcgtgtgcaagagcatcggcagcagcggcaccagccccccctactgctgcgtggacctgtacagcctgagaaccggcgagatggtgaagagcatccagttcaagacccccatctacgacctgcactgcaacaagagaatcctggtggtggtgctgcaggagaagatcgccgccttcgacagctgcaccttcaccaagaagttcttcgtgaccagctgctacccctgccccggccccaacatgaaccccatcgccctgggcagcagatggctggcctacgccgagaacaagctgatcagatgccaccagagcagaggcggcgcctgcggcgacaacatccagagctacaccgccaccgtgatcagcgccgccaagaccctgaagagcggcctgaccatggtgggcaaggtggtgacccagctgaccggcaccctgcccagcggcgtgaccgaggacgacgtggccatccacagcaacagcagaagaagccccctggtgcccggcatcatcaccgtgatcgacaccgagaccgtgggcgagggccaggtgctggtgagcgaggacagcgacagcgacggcatcgtggcccacttccccgcccacgagaagcccgtgtgctgcatggccttcaacaccagcggcatgctgctggtgaccaccgacaccctgggccacgacttccacgtgttccagatcctgacccacccctggagcagcagccagtgcgccgtgcaccacctgtacaccctgcacagaggcgagaccgaggccaaggtgcaggacatctgcttcagccacgactgcagatgggtggtggtgagcaccctgagaggcaccagccacgtgttccccatcaacccctacggcggccagccctgcgtgagaacccacatgagccccagagtggtgaacagaatgagcagattccagaagagcgccggcctggaggagatcgagcaggagctgaccagcaagcagggcggcagatgcagccccgtgcccggcctgagcagcagccccagcggcagccccctgcacggcaagctgaacagccaggacagctacaacaacttcaccaacaacaaccccggcaaccccagactgagccccctgcccagcctgatggtggtgatgcccctggcccagatcaagcagcccatgaccctgggcaccatcaccaagagaaccggcaaggtgaagccccccccccagatcagccccagcaagagcatgggcggcgagttctgcgtggccgccatcttcggcaccagcagaagctggttcgccaacaacgccggcctgaagagagagaaggaccagagcaagcaggtggtggtggagagcctgtacatcatcagctgctacggcaccctggtggagcacatgatggagcccagacccctgagcaccgcccccaagatcagcgacgacacccccctggagatgatgaccagccccagagccagctggaccctggtgagaaccccccagtggaacgagctgcagccccccttcaacgccaaccaccccctgctgctggccgccgacgccgtgcagtactaccagttcctgctggccggcctggtgccccccggcagccccggccccatcaccagacacggcagctacgacagcctggccagcgaccacagcggccaggaggacgaggagtggctgagccaggtggagatcgtgacccacaccggcccccacagaagactgtggatgggcccccagttccagttcaagaccatccaccccagcggccagaccaccgtgatcagcagcagcagcagcgtgctgcagagccacggccccagcgacaccccccagcccctgctggacttcgacaccgacgacctggacctgaacagcctgagaatccagcccgtgagaagcgaccccgtgagcatgcccggcagcagcagacccgtgagcgacagaagaggcgtgagcaccgtgatcgacgccgccagcggcaccttcgacagaagcgtgaccctgctggaggtgtgcggcagctggcccgagggcttcggcctgagacacatgagcagcatggagcacaccgaggagggcctgagagagagactggccgacgccatggccgagagccccagcagagacgtggtgggcagcggcaccgacaccgccctggacgtggccgtgaagaccttcccccccgagagacacgtggccgtgaagtgcttcgagctgcagagagagggcagcatcgagaccctgagcaacagcagcggcagcaccagcggcagcatccccagaaacttcgacggctacagaagccccctgcccaccaacgagagccagcccctgagcctgttccccaccggcttcccctag

SEQ ID NO: 11682 - DNA, 615 bp, synthetic construct
  source 1..615: mol_type = other DNA; note = Synthetic coding sequence
atggaggccgccggcagccccgccgccaccgagaccggcaagtacatcgccagcacccagagacccgacggcacctggagaaagcagagaagagtgaaggagggctacgtgccccaggaggaggtgcccgtgtacgagaacaagtacgtgaagttcttcaagagcaagcccgagctgccccccggcctgagccccgaggccaccgcccccgtgacccccagcagacccgagggcggcgagcccggcctgagcaagaccgccaagagaaacctgaagagaaaggagaagagaagacagcagcaggagaagggcgaggccgaggccctgagcagaaccctggacaaggtgagcctggaggagaccgcccagctgcccagcgccccccagggcagcagagccgcccccaccgccgccagcgaccagcccgacagcgccgccaccaccgagaaggccaagaagatcaagaacctgaagaagaagctgagacaggtggaggagctgcagcagagaatccaggccggcgaggtgagccagcccagcaaggagcagctggagaagctggccagaagaagagccctggaggaggagctggaggacctggagctgggcctgtag

SEQ ID NO: 11683 - DNA, 663 bp, synthetic construct
  source 1..663: mol_type = other DNA; note = Synthetic coding sequence
atgagcagcggcaactaccagcagagcgaggccctgagcaagcccaccttcagcgaggagcaggccagcgccctggtggagagcgtgttcggcctgaaggtgagcaaggtgagacccctgcccagctacgacgaccagaacttccacgtgtacgtgagcaagaccaaggacggccccaccgagtacgtgctgaagatcagcaacaccaaggccagcaagaaccccgacctgatcgaggtgcagaaccacatcatcatgttcctgaaggccgccggcttccccaccgccagcgtgtgccacaccaagggcgacaacaccgccagcctggtgagcgtggacagcggcagcgagatcaagagctacctggtgagactgctgacctacctgcccggcagacccatcgccgagctgcccgtgagcccccagctgctgtacgagatcggcaagctggccgccaagctggacaagaccctgcagagattccaccaccccaagctgagcagcctgcacagagagaacttcatctggaacctgaagaacgtgcccctgctggagaagtacctgtacgccctgggccagaacagaaacagagagatcgtggagcacgtgatccacctgttcaaggaggaggtgatgaccaagctgagccacttcagagagtag

SEQ ID NO: 11684 - DNA, 603 bp, synthetic construct
  source 1..603: mol_type = other DNA; note = Synthetic coding sequence
atgagcagcgacagcatggaccagcccagaaacccctgcgagaacgagcccctgacccccggctaccacggcttccccgccagagacagccagggcaaccaggagcccaccaccacccccgacgccatggtgcagcccttcaccaccatccccttccccccccccccccagaacggcatccccaccgagtacggcgtgccccacacccaggactacgccggccagaccggcgagcacaacctgaccctgtacggcagcacccaggcccacggcgagcagagcagcaacagccccagcacccagaacggcagcctgacccagaccgagggcggcgcccagaccgacggccagcagagccagacccagagcagcgagaacagcgagagcaagagcacccccaagagactgcacgtgagcaacatccccttcagattcagagaccccgacctgagacagatgttcggccagttcggcaagatcctggacgtggagatcatcttcaacgagagaggcagcaagggcttcggcttcgtgaccttcgagaacagcgccgacgccgacagagccagagagaagctgcacggcaccgtggtggagggctag

SEQ ID NO: 11685 - DNA, 387 bp, synthetic construct
  source 1..387: mol_type = other DNA; note = Synthetic coding sequence
atggcccccgccaagaagggcggcgagaagaagaagggcagaagcgccatcaacgaggtggtgaccagagagtacaccatcaacatccacaagagaatccacggcgtgggcttcaagaagagagcccccagagccctgaaggagatcagaaagttcgccatgaaggagatgggcacccccgacgtgagaatcgacaccagactgaacaaggccgtgtgggccaagggcatcagaaacgtgccctacagaatcagagtgagactgagcagaaagagaaacgaggacgaggacagccccaacaagctgtacaccctggtgacctacgtgcccgtgaccaccttcaagatcagcgtgctgaacagcgtgaccgtggccaagagcccctag

SEQ ID NO: 11686 - DNA, 393 bp, synthetic construct
  source 1..393: mol_type = other DNA; note = Synthetic coding sequence
atggcccccgccaagaagggcggcgagaagaagaagggcagaagcgccatcaacgaggtggtgaccagagagtacaccatcaacatccacaagagaatccacggcgtgggcttcaagaagagagcccccagagccctgaaggagatcagaaagttcgccatgaaggagatgggcacccccgacgtgagaatcgacaccagactgaacaaggccgtgtgggccaagggcatcagaaacgtgccctacagaatcagagtgagactgagcagaaagagaaacgaggacgaggacagccccaacaagctgtacaccctggtgacctacgtgcccgtgaccaccttcaagagcctgcagaacgacgacctgttcaagaccgactgccaccaccagtag

SEQ ID NO: 11687 - DNA, 1524 bp, synthetic construct
  source 1..1524: mol_type = other DNA; note = Synthetic coding sequence
atgtggctgaccagctaccccagccccaacttccccgtgagcgtgctgcagaacggcgtgaagatgaccaacgaggcccccaagggcctgagagccaacatcatcagaagctacctgatggaccccatcagcgaccccgagttcttcggcagctgcaagaagcccgaggagttcaagaagctgctgtacggcctgtgcttcttccacgccctggtgcaggagagaagaaagttcggccccctgggctggaacatcccctacgagttcaacgagaccgacctgagaatcagcgtgcagcagctgcacatgttcctgaaccagtacgaggagctgccctacgaggccctgagatacatgaccggcgagtgcaactacggcggcagagtgaccgacgactgggacagaagaaccctgagaagcatcctgaacaagttcttcaaccccgagctggtggagaacagcgactacaagttcgacagcagcggcatctacttcgtgccccccagcggcgaccacaagagctacatcgagtacaccaagaccctgcccctgacccccgcccccgagatcttcggcatgaacgccaacgccgacatcaccaaggaccagagcgagacccagctgctgttcgacaacatcctgctgacccagagcagaagcgccggcgccggcgccaagagcagcgacgaggtggtgaacgaggtggccagcgacatcctgggcaagctgcccaacaacttcgacatcgaggccgccatgagaagataccccaccacctacacccagagcatgaacaccgtgctggtgcaggagatgggcagattcaacaagctgctgaagaccatcagagacagctgcgtgaacatccagaaggccatcaagggcctggccgtgatgagcaccgacctggaggaggtggtgagcagcatcctgaacgtgaagatccccgagatgtggatgggcaagagctaccccagcctgaagcccctgggcagctacgtgaacgacttcctggccagactgaagttcctgcagcagtggtacgaggtgggccccccccccgtgttctggctgagcggcttcttcttcacccaggccttcctgaccggcgcccagcagaactacgccagaaagtacaccatccccatcgacctgctgggcttcgactacgaggtgatggaggacaaggagtacaagcacccccccgaggacggcgtgttcatccacggcctgttcctggacggcgccagctggaacagaaagatcaagaagctggccgagagccaccccaagatcctgtacgacaccgtgcccgtgatgtggctgaagccctgcaagagagccgacatccccaagagacccagctacgtggcccccctgtacaagaccagcgagagaagaggcgtgctgagcaccaccggccacagcaccaacttcgtgatcgccatgaccctgcccagcgaccagcccaaggagcactggatcggcagaggcgtggccctgctgtgccagctgaacagctag

SEQ ID NO: 11688 - DNA, 1683 bp, synthetic construct
  source 1..1683: mol_type = other DNA; note = Synthetic coding sequence
atggccgccagcgccaagagaaagcaggaggagaagcacctgaagatgctgagagacatgaccggcctgccccacaacagaaagtgcttcgactgcgaccagagaggccccacctacgtgaacatgaccgtgggcagcttcgtgtgcaccagctgcagcggcagcctgagaggcctgaaccccccccacagagtgaagagcatcagcatgaccaccttcacccagcaggagatcgagttcctgcagaagcacggcaacgaggtgtgcaagcagatctggctgggcctgttcgacgacagaagcagcgccatccccgacttcagagacccccagaaggtgaaggagttcctgcaggagaagtacgagaagaagagatggtacgtgccccccgagcaggccaaggtggtggccagcgtgcacgccagcatcagcggcagcagcgccagcagcaccagcagcacccccgaggtgaagcccctgaagagcctgctgggcgacagcgcccccaccctgcacctgaacaagggcacccccagccagagccccgtggtgggcagaagccagggccagcagcaggagaagaagcagttcgacctgctgagcgacctgggcagcgacatcttcgccgcccccgccccccagagcaccgccaccgccaacttcgccaacttcgcccacttcaacagccacgccgcccagaacagcgccaacgccgacttcgccaacttcgacgccttcggccagagcagcggcagcagcaacttcggcggcttccccaccgccagccacagccccttccagccccagaccaccggcggcagcgccgccagcgtgaacgccaacttcgcccacttcgacaacttccccaagagcagcagcgccgacttcggcaccttcaacaccagccagagccaccagaccgccagcgccgtgagcaaggtgagcaccaacaaggccggcctgcagaccgccgacaagtacgccgccctggccaacctggacaacatcttcagcgccggccagggcggcgaccagggcagcggcttcggcaccaccggcaaggcccccgtgggcagcgtggtgagcgtgcccagccagagcagcgccagcagcgacaagtacgccgccctggccgagctggacagcgtgttcagcagcgccgccaccagcagcaacgcctacaccagcaccagcaacgccagcagcaacgtgttcggcaccgtgcccgtggtggccagcgcccagacccagcccgccagcagcagcgtgcccgcccccttcggcgccacccccagcaccaaccccttcgtggccgccgccggccccagcgtggccagcagcaccaaccccttccagaccaacgccagaggcgccaccgccgccaccttcggcaccgccagcatgagcatgcccaccggcttcggcacccccgccccctacagcctgcccaccagcttcagcggcagcttccagcagcccgccttccccgcccaggccgccttcccccagcagaccgccttcagccagcagcccaacggcttcgccgccttcggccagaccaagcccgtggtgacccccttcggccaggtggccgccgccggcgtgagcagcaaccccttcatgaccggcgcccccaccggccagttccccaccggcagcagcagcaccaaccccttcctgtag

SEQ ID NO: 11689 - DNA, 2403 bp, synthetic construct; identical to SEQ ID NO: 10983
  source 1..2403: mol_type = other DNA; note = Synthetic coding sequence

SEQ ID NO: 11690 - DNA, 144 bp, synthetic construct
  source 1..144: mol_type = other DNA; note = Synthetic coding sequence
atggacgaccagcaggccctgaacagcatcatgcaggacctggccgtgctgcacaaggccagcagacccgccctgagcctgcaggagaccagaaaggccaagagcagcagccccaagaagcagaacgacgtgagagtgaagtag

SEQ ID NO: 11691 - DNA, 1272 bp, synthetic construct
  source 1..1272: mol_type = other DNA; note = Synthetic coding sequence
atggtgagcttcatgaacaaccagaagcagcagaagcccaccctgagcggccagagattcaagaccagaaagagagacgagaaggagagattcgaccccacccagttccaggactgcatcatccagggcctgaccgagaccggcaccgacctggaggccgtggccaagttcctggacgccagcggcgccaagctggactacagaagatacgccgagaccctgttcgacatcctggtggccggcggcatgctggcccccggcggcaccctggccgacgacatgatgagaaccgacgtgtgcgtgttcgccgcccaggaggacctggagaccatgcaggccttcgcccaggtgttcaacaagctgatcagaagatacaagtacctggagaagggcttcgaggacgaggtgaagaagctgctgctgttcctgaagggcttcagcgagagcgagagaaacaagctggccatgctgaccggcgtgctgctggccaacggcaccctgaacgccagcatcctgaacagcctgtacaacgagaacctggtgaaggagggcgtgagcgccgccttcgccgtgaagctgttcaagagctggatcaacgagaaggacatcaacgccgtggccgccagcctgagaaaggtgagcatggacaacagactgatggagctgttccccgccaacaagcagagcgtggagcacttcaccaagtacttcaccgaggccggcctgaaggagctgagcgagtacgtgagaaaccagcagaccatcggcgccagaaaggagctgcagaaggagctgcaggagcagatgagcagaggcgaccccttcaaggacatcatcctgtacgtgaaggaggagatgaagaagaacaacatccccgagcccgtggtgatcggcatcgtgtggagcagcgtgatgagcaccgtggagtggaacaagaaggaggagctggtggccgagcaggccatcaagcacctgaagcagtacagccccctgctggccgccttcaccacccagggccagagcgagctgaccctgctgctgaagatccaggagtactgctacgacaacatccacttcatgaaggccttccagaagatcgtggtgctgttctacaaggccgaggtgctgagcgaggagcccatcctgaagtggtacaaggacgcccacgtggccaagggcaagagcgtgttcctggagcagatgaagaagttcgtggagtggctgaagaacgccgaggaggagagcgagagcgaggccgaggagggcgactag

SEQ ID NO: 11692 - DNA, 1119 bp, synthetic construct; identical to SEQ ID NO: 9458
  source 1..1119: mol_type = other DNA; note = Synthetic coding sequence

SEQ ID NO: 11693 - DNA, 912 bp, synthetic construct
  source 1..912: mol_type = other DNA; note = Synthetic coding sequence
atgatggacgtgagcggcgtgggcttccccagcaaggtgccctggaagaagatgagcgccgaggagctggagaaccagtactgccccagcagatgggtggtgagactgggcgccgaggaggccctgagaacctacagccagatcggcatcgaggccaccaccagagccagagccaccagaaagagcctgctgcacgtgccctacggcgacggcgagggcgagaaggtggacatctacttccccgacgagagcagcgaggccctgcccttcttcctgttcttccacggcggctactggcagagcggcagcaaggacgagagcgccttcatggtgcaccccctgaccgcccagggcgtggccgtggtgatcgtggcctacggcatcgcccccaagggcaccctggaccacatggtggaccaggtgaccagaagcgtggccttcgtgcagaagagataccccagcaacaagggcatctacctgtgcggccacagcgccggcgcccacctggccgccatgatgctgctggccgactggaccaagcacggcgtgacccccaacctgagaggcttcttcctggtgagcggcgtgttcgacctggagcccatcgtgtacaccagccagaacgtggccctgcagctgaccctggaggacgcccagagaaacagcccccagctgaaggtggcccaggcccagcccgtggaccccacctgcagagtgctggtggtggtgggccagttcgacagccccgagttccacagacagagctgggagttctaccagaccctgtgccagggcgagtggaaggccagcttcgaggagctgcacgacgtggaccacttcgagatcgtggagaacctgacccagaaggacaacgtgctgacccagatcatcctgaagaccatcttccagtag

SEQ ID NO: 11694 - DNA, 684 bp, synthetic construct
  source 1..684: mol_type = other DNA; note = Synthetic coding sequence
atggccctgcacgacatggaggacttcaccttcgacggcaccaagagactgagcgtgaactacgtgaagggcatcctgcagcccaccgacacctgcgacatctgggacaagatctggaacttccaggccaagcccgacgacctgctgatcagcacctaccccaaggccggcaccacctggacccaggagatcgtggagctgatccagaacgagggcgacgtggagaagagcaagagagcccccacccaccagagattccccttcctggagatgaagatccccagcctgggcagcgtgtgctggggcagctggcacgagcacgtgaagggctggtgggaggccaaggacaagcacagaatcctgtacctgttctacgaggacatgaagaagaaccccaagcacgagatccagaagctggccgagttcatcggcaagaagctggacgacaaggtgctggacaagatcgtgcactacaccagcttcgacgtgatgaagcagaaccccatggccaactacagcagcatccccgccgagatcatggaccacagcatcagccccttcatgagaaagggcgccgtgggcgactggaagaagcacttcaccgtggcccagaacgagagattcgacgaggactacaagaagaagatgaccgacaccagactgaccttccacttccagttctag

SEQ ID NO: 11695 - DNA, 366 bp, synthetic construct
  source 1..366: mol_type = other DNA; note = Synthetic coding sequence
atggcccccgccaagaagggcggcgagaagaagaagggcagaagcgccatcaacgaggtggtgaccagagagtacaccatcaacatccacaagagaatccacggcgtgggcttcaagaagagagcccccagagccctgaaggagatcagaaagttcgccatgaaggagatgggcacccccgacgtgagaatcgacaccagactgaacaaggccgtgtgggccaagggcatcagaaacgtgccctacagaatcagagtgagactgagcagaaagagaaacgaggacgaggacagccccaacaagctgtacaccctggtgacctacgtgcccgtgaccaccttcaagagcaagttcagcatcccctag

SEQ ID NO: 11696 - DNA, 267 bp, synthetic construct
  source 1..267: mol_type = other DNA; note = Synthetic coding sequence
ctgagcttcagagccgacagcgcccacgccagcatggtgaacgtgcccaagaccagaagaaccttctgcaagaagtgcggcaagcaccagccccacaaggtgacccagtacaagaagggcaaggacagcctgtacgcccagggcaagagaagatacgacagaaagcagagcggctacggcggccagaccaagcccatcttcagaaagaagctgcaccagaactgcatcgagcccaacctgccccccagagcccagcagagcccctag

SEQ ID NO: 11697 - DNA, 582 bp, synthetic construct
  source 1..582: mol_type = other DNA; note = Synthetic coding sequence
atggacagcaccctggccgtgcagcagtacatccagcagaacatcagagccgactgcagcaacatcgacaagatcctggagccccccgagggccaggacgagggcgtgtggaagtacgagcacctgagacagttctgcctggagctgaacggcctggccgtgaagctgcagagcgagtgccaccccgacacctgcacccagatgaccgccaccgagcagtggatcttcctgtgcgccgcccacaagacccccaaggagtgccccgccatcgactacaccagacacaccctggacggcgccgcctgcctgctgaacagcaacaagtacttccccagcagagtgagcatcaaggagagcagcgtggccaagctgggcagcgtgtgcagaagaatctacagaatcttcagccacgcctacttccaccacagacagatcttcgacgagtacgagaacgagaccttcctgtgccacagattcaccaagttcgtgatgaagtacaacctgatgagcaaggacaacctgatcgtgcccatcctggaggaggaggtgcagaacagcgtgagcggcgagagcgaggcctag

SEQ ID NO: 11698 - DNA, 4137 bp, synthetic construct
  source 1..4137: mol_type = other DNA; note = Synthetic coding sequence
atgagcctggagagagagctgagacagctgagcaaggccaaggccaaggcccagagagccggccagagaagagaggaggccgccctgtgccaccagctgggcgagctgctggccggccacggcagatacgccgaggccctggagcagcactggcaggagctgcagctgagagagagagccgacgaccccctgggctgcgccgtggcccacagaaagatcggcgagagactggccgagatggaggactaccccgccgccctgcagcaccagcaccagtacctggagctggcccacagcctgagaaaccacaccgagctgcagagagcctgggccaccatcggcagaacccacctggacatctacgaccactgccagagcagagacgccctgctgcaggcccaggccgccttcgagaagagcctggccatcgtggacgaggagctggagggcaccctggcccagggcgagctgaacgagatgagaaccagactgtacctgaacctgggcctgaccttcgagagcctgcagcagaccgccctgtgcaacgactacttcagaaagagcatcttcctggccgagcagaaccacctgtacgaggacctgttcagagccagatacaacctgggcaccatccactggagagccggccagcacagccaggccatgagatgcctggagggcgccagagagtgcgcccacaccatgagaaagagattcatggagagcgagtgctgcgtggtgatcgcccaggtgctgcaggacctgggcgacttcctggccgccaagagagccctgaagaaggcctacagactgggcagccagaagcccgtgcagagagccgccatctgccagaacctgcagcacgtgctggccgtggtgagactgcagcagcagctggaggaggccgagggcagagacccccagggcgccatggtgatctgcgagcagctgggcgacctgttcagcaaggccggcgacttccccagagccgccgaggcctaccagaagcagctgagattcgccgagctgctggacagacccggcgccgagagagccatcatccacgtgagcctggccaccaccctgggcgacatgaaggaccaccacggcgccgtgagacactacgaggaggagctgagactgagaagcggcaacgtgctggaggaggccaagacctggctgaacatcgccctgagcagagaggaggccggcgacgcctacgagctgctggccccctgcttccagaaggccctgagctgcgcccagcaggcccagagaccccagctgcagagacaggtgctgcagcacctgcacaccgtgcagctgagactgcagccccaggaggcccccgagaccgagaccagactgagagagctgagcgtggccgaggacgaggacgaggaggaggaggccgaggaggccgccgccaccgccgagagcgaggccctggaggccggcgaggtggagctgagcgagggcgaggacgacaccgacggcctgaccccccagctggaggaggacgaggagctgcagggccacctgggcagaagaaagggcagcaagtggaacagaagaaacgacatgggcgagaccctgctgcacagagcctgcatcgagggccagctgagaagagtgcaggacctggtgagacagggccaccccctgaaccccagagactactgcggctggacccccctgcacgaggcctgcaactacggccacctggagatcgtgagattcctgctggaccacggcgccgccgtggacgaccccggcggccagggctgcgagggcatcacccccctgcacgacgccctgaactgcggccacttcgaggtggccgagctgctgctggagagaggcgccagcgtgaccctgagaaccagaaagggcctgagccccctggagaccctgcagcagtgggtgaagctgtacagaagagacctggacctggagaccagacagaaggccagagccatggagatgctgctgcaggccgccgccagcggccaggacccccacagcagccaggccttccacacccccagcagcctgctgttcgaccccgagaccagcccccccctgagcccctgccccgagccccccagcaacagcaccagactgcccgaggccagccaggcccacgtgagagtgagccccggccaggccgcccccgccatggccagacccagaagaagcagacacggccccgccagcagcagcagcagcagcgagggcgaggacagcgccggccccgccagacccagccagaagagacccagatgcagcgccaccgcccagagagtggccgcctggacccccggccccgccagcaacagagaggccgccaccgccagcaccagcagagccgcctaccaggccgccatcagaggcgtgggcagcgcccagagcagactgggccccggcccccccagaggccacagcaaggccctggccccccaggccgccctgatccccgaggaggagtgcctggccggcgactggctggagctggacatgcccctgaccagaagcagaagacccagacccagaggcaccggcgacaacagaagacccagcagcaccagcggcagcgacagcgaggagagcagacccagagccagagccaagcaggtgagactgacctgcatgcagagctgcagcgcccccgtgaacgccggccccagcagcctggccagcgagccccccggcagccccagcacccccagagtgagcgagcccagcggcgacagcagcgccgccggccagcccctgggccccgccccccccccccccatcagagtgagagtgcaggtgcaggaccacctgttcctgatccccgtgccccacagcagcgacacccacagcgtggcctggctggccgagcaggccgcccagagatactaccagacctgcggcctgctgcccagactgaccctgagaaaggagggcgccctgctggccccccaggacctgatccccgacgtgctgcagagcaacgacgaggtgctggccgaggtgaccagctgggacctgccccccctgaccgacagatacagaagagcctgccagagcctgggccagggcgagcaccagcaggtgctgcaggccgtggagctgcagggcctgggcctgagcttcagcgcctgcagcctggccctggaccaggcccagctgacccccctgctgagagccctgaagctgcacaccgccctgagagagctgagactggccggcaacagactgggcgacaagtgcgtggccgagctggtggccgccctgggcaccatgcccagcctggccctgctggacctgagcagcaaccacctgggccccgagggcctgagacagctggccatgggcctgcccggccaggccaccctgcagagcctggaggagctggacctgagcatgaaccccctgggcgacggctgcggccagagcctggccagcctgctgcacgcctgccccctgctgagcaccctgagactgcaggcctgcggcttcggccccagcttcttcctgagccaccagaccgccctgggcagcgccttccaggacgccgagcacctgaagaccctgagcctgagctacaacgccctgggcgcccccgccctggccagaaccctgcagagcctgcccgccggcaccctgctgcacctggagctgagcagcgtggccgccggcaagggcgacagcgacctgatggagcccgtgttcagatacctggccaaggagggctgcgccctggcccacctgaccctgagcgccaaccacctgggcgacaaggccgtgagagacctgtgcagatgcctgagcctgtgccccagcctgatcagcctggacctgagcgccaaccccgagatcagctgcgccagcctggaggagctgctgagcaccctgcagaagagaccccagggcctgagcttcctgggcctgagcggctgcgccgtgcagggccccctgggcctgggcctgtgggacaagatcgccgcccagctgagagagctgcagctgtgcagcagaagactgtgcgccgaggacagagacgccctgagacagctgcagcccagcagacccggccccggcgagtgcaccctggaccacggcagcaagctgttcttcagaagactgtag

SEQ ID NO: 11699 - DNA, 1218 bp, synthetic construct
  source 1..1218: mol_type = other DNA; note = Synthetic coding sequence
atgaactaccagcagcagctggccaacagcgccgccatcagagccgagatccagagattcgagagcgtgcaccccaacatctacagcatctacgagctgctggagagagtggaggagcccgtgctgcagaaccagatcagagagcacgtgatcgccatcgaggacgccttcgtgaacagccaggagtggaccctgagcagaagcgtgcccgagctgaaggtgggcatcgtgggcaacctggccagcggcaagagcgccctggtgcacagatacctgaccggcacctacgtgcaggaggagagccccgagggcggcagattcaagaaggagatcgtggtggacggccagagctacctgctgctgatcagagacgagggcggcccccccgaggcccagttcgccatgtgggtggacgccgtgatcttcgtgttcagcctggaggacgagatcagcttccagaccgtgtaccactactacagcagaatggccaactacagaaacaccagcgagatccccctggtgctggtgggcacccaggacgccatcagcagcgccaaccccagagtgatcgacgacgccagagccagaaagctgagcaacgacctgaagagatgcacctactacgagacctgcgccacctacggcctgaacgtggagagagtgttccaggacgtggcccagaagatcgtggccaccagaaagaagcagcagctgagcatcggcccctgcaagagcctgcccaacagccccagccacagcagcgtgtgcagcgcccaggtgagcgccgtgcacatcagccagaccagcaacggcggcggcagcctgagcgactacagcagcagcgtgcccagcacccccagcaccagccagaaggagctgagaatcgacgtgccccccaccgccaacacccccacccccgtgagaaagcagagcaagagaagaagcaacctgttcaccagcagaaagggcagcgaccccgacaaggagaagaagggcctggagagcagagccgacagcatcggcagcggcagagccatccccatcaagcagggcctgcccttcttcgtgctggccctgaccgccagcacctacctgagacccgccggcgccagagccagacagagcagcccctggcccggccccagaggcggccagaccagcccccactgcgccgagggcccccagagcgcccagctgagcggcgccatgatgaactag

SEQ ID NO: 11700 - DNA, 1245 bp, synthetic construct; identical to SEQ ID NO: 9295
  source 1..1245: mol_type = other DNA; note = Synthetic coding sequence

SEQ ID NO: 11701 - DNA, 645 bp, synthetic construct
  source 1..645: mol_type = other DNA; note = Synthetic coding sequence
atgggccccctgcccagaaccgtggagctgttctacgacgtgctgagcccctacagctggctgggcttcgagatcctgtgcagataccagaacatctggaacatcaacctgcagctgagacccagcctgatcaccggcatcatgaaggacagcggcaacaagccccccggcctgctgcccagaaagggcctgtacatggccaacgacctgaagctgctgagacaccacctgcagatccccatccacttccccaaggacttcctgagcgtgatgctggagaagggcagcctgagcgccatgagattcctgaccgccgtgaacctggagcaccccgagatgctggagaaggccagcagagagctgtggatgagagtgtggagcagagccgccgagaaggccggcatgagcgccgagcaggcccagggcctgctggagaagatcgccacccccaaggtgaagaaccagctgaaggagaccaccgaggccgcctgcagatacggcgccttcggcctgcccatcaccgtggcccacgtggacggccagacccacatgctgttcggcagcgacagaatggagctgctggcccacctgctgggcgagaagtggatgggccccatcccccccgccgtgaacgccagactgtag

SEQ ID NO: 11702 - DNA, 4206 bp, synthetic construct
  source 1..4206: mol_type = other DNA; note = Synthetic coding sequence
atggccgacaccgacctgttcatggagtgcgaggaggaggagctggagccctggcagaagatcagcgacgtgatcgaggacagcgtggtggaggactacaacagcgtggacaagaccaccaccgtgagcgtgagccagcagcccgtgagcgcccccgtgcccatcgccgcccacgccagcgtggccggccacctgagcaccagcaccaccgtgagcagcagcggcgcccagaacagcgacagcaccaagaagaccctggtgaccctgatcgccaacaacaacgccggcaaccccctggtgcagcagggcggccagcccctgatcctgacccagaaccccgcccccggcctgggcaccatggtgacccagcccgtgctgagacccgtgcaggtgatgcagaacgccaaccacgtgaccagcagccccgtggccagccagcccatcttcatcaccacccagggcttccccgtgagaaacgtgagacccgtgcagaacgccatgaaccaggtgggcatcgtgctgaacgtgcagcagggccagaccgtgagacccatcaccctggtgcccgcccccggcacccagttcgtgaagcccaccgtgggcgtgccccaggtgttcagccagatgacccccgtgagacccggcagcaccatgcccgtgagacccaccaccaacaccttcaccaccgtgatccccgccaccctgaccatcagaagcaccgtgccccagagccagagccagcagaccaagagcacccccagcaccagcaccacccccaccgccacccagcccaccagcctgggccagctggccgtgcagagccccggccagagcaaccagaccaccaaccccaagctggtgagcatcgccagcttcgtgaccgtgaagagacccggcgtgaccggcgagaacagcaacgaggtggccaagctggtgaacaccctgaacaccatccccagcctgggccagagccccggccccgtggtggtgagcaacaacagcagcgcccacggcagccagagaaccagcggccccgagagcagcatgaaggtgaccagcagcatccccgtgttcgacctgcaggacggcggcagaaagatctgccccagatgcaacgcccagttcagagtgaccgaggccctgagaggccacatgtgctactgctgccccgagatggtggagtaccagaagaagggcaagagcctggacagcgagcccagcgtgcccagcgccgccaagccccccagccccgagaagaccgcccccgtggccagcacccccagcagcacccccatccccgccctgagcccccccaccaaggtgcccgagcccaacgagaacgtgggcgacgccgtgcagaccaagctgatcatgctggtggacgacttctactacggcagagacggcggcaaggtggcccagctgaccaacttccccaaggtggccaccagcttcagatgcccccactgcaccaagagactgaagaacaacatcagattcatgaaccacatgaagcaccacgtggagctggaccagcagaacggcgaggtggacggccacaccatctgccagcactgctacagacagttcagcacccccttccagctgcagtgccacctggagaacgtgcacagcccctacgagagcaccaccaagtgcaagatctgcgagtgggccttcgagagcgagcccctgttcctgcagcacatgaaggacacccacaagcccggcgagatgccctacgtgtgccaggtgtgccagtacagaagcagcctgtacagcgaggtggacgtgcacttcagaatgatccacgaggacaccagacacctgctgtgcccctactgcctgaaggtgttcaagaacggcaacgccttccagcagcactacatgagacaccagaagagaaacgtgtaccactgcaacaagtgcagactgcagttcctgttcgccaaggacaagatcgagcacaagctgcagcaccacaagaccttcagaaagcccaagcagctggagggcctgaagcccggcaccaaggtgaccatcagagccagcagaggccagcccagaaccgtgcccgtgagcagcaacgacaccccccccagcgccctgcaggaggccgcccccctgaccagcagcatggaccccctgcccgtgttcctgtacccccccgtgcagagaagcatccagaagagagccgtgagaaagatgagcgtgatgggcagacagacctgcctggagtgcagcttcgagatccccgacttccccaaccacttccccacctacgtgcactgcagcctgtgcagatacagcacctgctgcagcagagcctacgccaaccacatgatcaacaaccacgtgcccagaaagagccccaagtacctggccctgttcaagaacagcgtgagcggcatcaagctggcctgcaccagctgcaccttcgtgaccagcgtgggcgacgccatggccaagcacctggtgttcaaccccagccacagaagcagcagcatcctgcccagaggcctgacctggatcgcccacagcagacacggccagaccagagacagagtgcacgacagaaacgtgaagaacatgtaccccccccccagcttccccaccaacaaggccgccaccgtgaagagcgccggcgccacccccgccgagcccgaggagctgctgacccccctggcccccgccctgcccagccccgccagcaccgccacccccccccccacccccacccacccccaggccctggccctgccccccctggccaccgagggcgccgagtgcctgaacgtggacgaccaggacgagggcagccccgtgacccaggagcccgagctggccagcggcggcggcggcagcggcggcgtgggcaagaaggagcagctgagcgtgaagaagctgagagtggtgctgttcgccctgtgctgcaacaccgagcaggccgccgagcacttcagaaacccccagagaagaatcagaagatggctgagaagattccaggccagccagggcgagaacctggagggcaagtacctgagcttcgaggccgaggagaagctggccgagtgggtgctgacccagagagagcagcagctgcccgtgaacgaggagaccctgttccagaaggccaccaagatcggcagaagcctggagggcggcttcaagatcagctacgagtgggccgtgagattcatgctgagacaccacctgaccccccacgccagaagagccgtggcccacaccctgcccaaggacgtggccgagaacgccggcctgttcatcgacttcgtgcagagacagatccacaaccaggacctgcccctgagcatgatcgtggccatcgacgagatcagcctgttcctggacaccgaggtgctgagcagcgacgacagaaaggagaacgccctgcagaccgtgggcaccggcgagccctggtgcgacgtggtgctggccatcctggccgacggcaccgtgctgcccaccctggtgttctacagaggccagatggaccagcccgccaacatgcccgacagcatcctgctggaggccaaggagagcggctacagcgacgacgagatcatggagctgtggagcaccagagtgtggcagaagcacaccgcctgccagagaagcaagggcatgctggtgatggactgccacagaacccacctgagcgaggaggtgctggccatgctgagcgccagcagcaccctgcccgccgtggtgcccgccggctgcagcagcaagatccagcccctggacgtgtgcatcaagagaaccgtgaagaacttcctgcacaagaagtggaaggagcaggccagagagatggccgacaccgcctgcgacagcgacgtgctgctgcagctggtgctggtgtggctgggcgaggtgctgggcgtgatcggcgactgccccgagctggtgcagagaagcttcctggtggccagcgtgctgcccggccccgacggcaacatcaacagccccaccagaaacgccgacatgcaggaggagctgatcgccagcctggaggagcagctgaagctgagcggcgagcacagcgagagcagcacccccagacccagaagcagccccgaggagaccatcgagcccgagagcctgcaccagctgttcgagggcgagagcgagaccgagagcttctacggcttcgaggaggccgacctggacctgatggagatctag

SEQ ID NO: 11703 - DNA, 1398 bp, synthetic construct; identical to SEQ ID NO: 9463
  source 1..1398: mol_type = other DNA; note = Synthetic coding sequence

SEQ ID NO: 11704 - DNA, 3210 bp, synthetic construct
  source 1..3210: mol_type = other DNA; note = Synthetic coding sequence
atgtacctgctggacggcagcggcgagcccgccagcccccccgccgacgccatgcccagaggcaccccccccagaaagaccgtgtacagaatcagcgtgaccatggtgagaaaggagcagctggccgcccccggcagcggcggccccgaccccagacccgtgagaagacccagacccgccagaagccccgacgcccccggcagactggaggaggaggccgaggaggccgagggcgccgaggagcccgagggccccagacccagagcctgggacttcagaaccttcagaaccagaagcaccggccagctggagctgggcagactgagaccctgcgccagaggcctggagcccgccgacctggccggcagcgcccccgccgaggaggagggcagaggcagccccgccagcggcagccccgacgtggagggcgccagagccgcccccctgagaagaagcctgagcttcagacactggagcggccccgaggccccccagggcagaaccctgggcggcggcagaagacacagcagcagcggcagcctggcctgggccccctgcgacgaggccgccgccggcaccaccctggagcccgccaccgccacccagcccgccagcgagaagagaaacaccctggacgtgggcgaggtgctgagcaagaacgacgccctgagcgacctggagagatgggagagaagcaagagcaagaacagaaccctggacaacagcgacctgcagagactggagagagccagagccgccgccggcgccggcgccgccagcgagcacagactgctgagattcttcagcggcatcttcgccagaagagacggcggccccggcggcggccccagccccagaagcggcgccagcagacccagaggctacttcagcctgagaagagcccccgccgaggcccacagcagcagcgccgagagcatcgacggcagccccagaagagacgccttcgtgaacagccaggagtggaccctgagcagaagcgtgcccgagctgaaggtgggcatcgtgggcaacctggccagcggcaagagcgccctggtgcacagatacctgaccggcacctacgtgcaggaggagagccccgagggcggcagattcaagaaggagatcgtggtggacggccagagctacctgctgctgatcagagacgagggcggcccccccgaggcccagttcgccatgtgggtggacgccgtgatcttcgtgttcagcctggaggacgagatcagcttccagaccgtgtaccactactacagcagaatggccaactacagaaacaccagcgagatccccctggtgctggtgggcacccaggacgccatcagcagcgccaaccccagagtgatcgacgacgccagagccagaaagctgagcaacgacctgaagagatgcacctactacgagacctgcgccacctacggcctgaacgtggagagagtgttccaggacgtggcccagaagatcgtggccaccagaaagaagcagcagctgagcatcggcccctgcaagagcctgcccaacagccccagccacagcagcgtgtgcagcgcccaggtgagcgccgtgcacatcagccagaccagcaacggcggcggcagcctgagcgactacagcagcagcgtgcccagcacccccagcaccagccagaaggagctgagaatcgacgtgccccccaccgccaacacccccacccccgtgagaaagcagagcaagagaagaagcaacctgttcaccagcagaaagggcagcgaccccgacaaggagaagaagggcctggagagcagagccgacagcatcggcagcggcagagccatccccatcaagcagggcatgctgctgaagagaagcggcaagagcctgaacaaggagtggaagaagaagtacgtgaccctgtgcgacaacggcgtgctgacctaccaccccagcctgcacgactacatgcagaacgtgcacggcaaggagatcgacctgctgagaaccaccgtgaaggtgcccggcaagagaccccccagagccaccagcgcctgcgcccccatcagcagccccaagaccaacggcctgagcaaggacatgagcagcctgcacatcagccccaacagcgacaccggcctgggcgacagcgtgtgcagcagccccagcatcagcagcaccaccagccccaagctggaccccccccccagcccccacgccaacagaaagaagcacagaagaaagaagagcaccagcaacttcaaggccgacggcctgagcggcaccgccgaggagcaggaggagaacttcgagttcatcatcgtgagcctgaccggccagacctggcacttcgaggccaccacctacgaggagagagacgcctgggtgcaggccatcgagagccagatcctggccagcctgcagagctgcgagagcagcaagaacaagagcagactgaccagccagagcgaggccatggccctgcagagcatcagaaacatgagaggcaacagccactgcgtggactgcgagacccagaaccccaactgggccagcctgaacctgggcgccctgatgtgcatcgagtgcagcggcatccacagaaacctgggcacccacctgagcagagtgagaagcctggacctggacgactggcccgtggagctgatcaaggtgatgagcagcatcggcaacgagctggccaacagcgtgtgggaggagagcagccagggcagaaccaagcccagcgtggacagcaccagagaggagaaggagagatggatcagagccaagtacgagcagaagctgttcctggcccccctgccctgcaccgagctgagcctgggccagcacctgctgagagccaccgccgacgaggacctgagaaccgccatcctgctgctggcccacggcagcagagacgaggtgaacgagacctgcggcgagggcgacggcagaaccgccctgcacctggcctgcagaaagggcaacgtggtgctggcccagctgctgatctggtacggcgtggacgtgaccgccagagacgcccacggcaacaccgccctggcctacgccagacaggccagcagccaggagtgcatcgacgtgctgctgcagtacggctgccccgacgagagattcgtgctgatggccacccccaacctgagcagaagaaacaacaacagaaacaacagcagcggcagagtgcccaccatcatctag

SEQ ID NO: 11705 - DNA, 1260 bp, synthetic construct
  source 1..1260: mol_type = other DNA; note = Synthetic coding sequence
atgaacaaccagaagcagcagaagcccaccctgagcggccagagattcaagaccagaaagagagacgagaaggagagattcgaccccacccagttccaggactgcatcatccagggcctgaccgagaccggcaccgacctggaggccgtggccaagttcctggacgccagcggcgccaagctggactacagaagatacgccgagaccctgttcgacatcctggtggccggcggcatgctggcccccggcggcaccctggccgacgacatgatgagaaccgacgtgtgcgtgttcgccgcccaggaggacctggagaccatgcaggccttcgcccaggtgttcaacaagctgatcagaagatacaagtacctggagaagggcttcgaggacgaggtgaagaagctgctgctgttcctgaagggcttcagcgagagcgagagaaacaagctggccatgctgaccggcgtgctgctggccaacggcaccctgaacgccagcatcctgaacagcctgtacaacgagaacctggtgaaggagggcgtgagcgccgccttcgccgtgaagctgttcaagagctggatcaacgagaaggacatcaacgccgtggccgccagcctgagaaaggtgagcatggacaacagactgatggagctgttccccgccaacaagcagagcgtggagcacttcaccaagtacttcaccgaggccggcctgaaggagctgagcgagtacgtgagaaaccagcagaccatcggcgccagaaaggagctgcagaaggagctgcaggagcagatgagcagaggcgaccccttcaaggacatcatcctgtacgtgaaggaggagatgaagaagaacaacatccccgagcccgtggtgatcggcatcgtgtggagcagcgtgatgagcaccgtggagtggaacaagaaggaggagctggtggccgagcaggccatcaagcacctgaagcagtacagccccctgctggccgccttcaccacccagggccagagcgagctgaccctgctgctgaagatccaggagtactgctacgacaacatccacttcatgaaggccttccagaagatcgtggtgctgttctacaaggccgaggtgctgagcgaggagcccatcctgaagtggtacaaggacgcccacgtggccaagggcaagagcgtgttcctggagcagatgaagaagttcgtggagtggctgaagaacgccgaggaggagagcgagagcgaggccgaggagggcgactag

SEQ ID NO: 11706 - DNA, 2769 bp, synthetic construct; identical to SEQ ID NO: 10882
  source 1..2769: mol_type = other DNA; note = Synthetic coding sequence

SEQ ID NO: 11707 - DNA, 363 bp, synthetic construct
  source 1..363: mol_type = other DNA; note = Synthetic coding sequence
atggcccccgccaagaagggcggcgagaagaagaagggcagaagcgccatcaacgaggtggtgaccagagagtacaccatcaacatccacaagagaatccacggcgtgggcttcaagaagagagcccccagagccctgaaggagatcagaaagttcgccatgaaggagatgggcacccccgacgtgagaatcgacaccagactgaacaaggccgtgtgggccaagggcatcagaaacgtgccctacagaatcagagtgagactgagcagaaagagaaacgaggacgaggacagccccaacaagctgtacaccctggtgacctacgtgcccgtgaccaccttcaagaactgccaccaccagtag

SEQ ID NO: 11708 - DNA, 378 bp, synthetic construct; identical to SEQ ID NO: 9739
  source 1..378: mol_type = other DNA; note = Synthetic coding sequence

SEQ ID NO: 11709 - DNA, 1500 bp, synthetic construct
  source 1..1500: mol_type = other DNA; note = Synthetic coding sequence
atgagcacccccagcggcatcagcacctggctgagcctgcccgtgagcacccccgccagcatcaccagcatcagagtgacccagaagagcagcggcccctgggccttcagcagctgcacctacgtgagcggccccggcgtgtgcatcagcagcctgagctgcagcagagtgggcagcagcagcttcagaggcggcctgggcggcggctacggcggcgccagcggcatgggcggcatcatcgccatcatggtgaaccagagcctgctgagccccctgaacctggaggtggaccccaacatccaggccgtgtgcacccaggagaaggagcagatcaagaccctgaacaacaagttcgccagcttcatcgacaaggtgtggttcctggagcagcagaacaaggtgctggagaccaagtggagcctgctgcagcagcagaagatggccagaagcaacatggacaacatgctggagagctacatcaacaacctgagaagacagctggagaccctgggccaggagaagctgaagctggaggccgagctgggcaacatgcagggcctgggcgaggacttcaagaacaagtacgaggacgagatcaacaagcacaccgaggtggagaacgagttcgtgctgatcaagaaggacgtggacgaggcctacatgaacaaggccgagctggagagcctgctggagggcctgaccgacgagatcaacttcctgagacagctgtacgaggaggagatcagagagctgcagagccagatcagcgacatgagcatggtgctgagcatggactacagctgcagcagagacatggacagcatcatccccgaggtgaaggtgcagtacgaggagatcgccaactgcagcagagccgaggccgagagcatgtaccagatcaagtacgaggagctgcagaccctggccggcaagtacggcgacgacctgagcagaaccaagaccgagatcagcgagatgaacagaaacatcagctggctgcaggccgagaccgagggcctgaagggccagagagccagcctggaggccgccatcaccgacgccgagcagagaggcgagctggccgtgaaggacgccaacgccaagctgagcgagctggaggccgccctgcagagagccaagcaggacatgatgggccagctgagagagtaccaggagctgatgaacgtgggcctgaccctggacatcgagatcgccacctacagaaagctgctggagggcgaggagagcagactggagagcggcatgcagaacgtgagcatccacaccaagaccaccagcagctacgccggcggcctgagcagcgcctacggcggcctgaccagccccggcatcatctacagactgggcagcagcttcggcagcgccgccggcagcagcagcttcagcagaaccagcagcaccagagccgtggtggtgagaaagatcgagacccacgacggcaagctggagagcgagagcagcgacgtgctgagcaagtag

SEQ ID NO: 11710 - DNA, 504 bp, synthetic construct
  source 1..504: mol_type = other DNA; note = Synthetic coding sequence
atgtacatgggcatgatgtgcaccgccaagaagtgcggcatcagattccagccccccgccatcatcctgatctacgagagcgagatcaagggcaagatcagacagagaatcatgcccgtgagaaacttcagcaagttcagcgactgcaccagagccgccgagcagctgaagaacaaccccagacacaagagctacctggagcaggtgagcctgagacagctggagaagctgttcagcttcctgagaggctacctgagcggccagagcctggccgagaccatggagcagatccagagagagaccaccatcgaccccgaggaggacctgaacaagctggacgacaaggagctggccaagagaaagagcatcatggacgagctgttcgagaagaaccagaagaagaaggacgaccccaacttcgtgtacgacatcgaggtggagttcccccaggacgaccagctgcagagctgcggctgggacaccgagagcgccgacgagttctag

SEQ ID NO: 11711 - DNA, 378 bp, synthetic construct; identical to SEQ ID NO: 9465
  source 1..378: mol_type = other DNA; note = Synthetic coding sequence

SEQ ID NO: 11712 - DNA, 1005 bp, synthetic construct
  source 1..1005: mol_type = other DNA; note = Synthetic coding sequence
atgaccagaagcctgttcaagggcaacttctggagcgccgacatcctgagcaccatcggctacgacaacatcatccagcacctgaacaacggcagaaagaactgcaaggagttcgaggacttcctgaaggagagagccgccatcgaggagagatacggcaaggacctgctgaacctgagcagaaagaagccctgcggccagagcgagatcaacaccctgaagagagccctggaggtgttcaagcagcaggtggacaacgtggcccagtgccacatccagctggcccagagcctgagagaggaggccagaaagatggaggagttcagagagaagcagaagctgcagagaaagaagaccgagctgatcatggacgccatccacaagcagaagagcctgcagttcaagaagaccatggacgccaagaagaactacgagcagaagtgcagagacaaggacgaggccgagcaggccgtgagcagaagcgccaacctggtgaaccccaagcagcaggagaagctgttcgtgaagctggccaccagcaagaccgccgtggaggacagcgacaaggcctacatgctgcacatcggcaccctggacaaggtgagagaggagtggcagagcgagcacatcaaggcctgcgaggccttcgaggcccaggagtgcgagagaatcaacttcttcagaaacgccctgtggctgcacgtgaaccagctgagccagcagtgcgtgaccagcgacgagatgtacgagcaggtgagaaagagcctggagatgtgcagcatccagagagacatcgagtacttcgtgaaccagagaaagaccggccagatcccccccgcccccatcatgtacgagaacttctacagcagccagaagaacgccgtgcccgccggcaaggccaccggccccaacctggccagaagaggccccctgcccatccccaagagcagccccgacgaccccaactacagcctggtggacgactacagcctgctgtaccagtag

SEQ ID NO: 11713 - DNA, 597 bp, synthetic construct
  source 1..597: mol_type = other DNA; note = Synthetic coding sequence
atgaagaaggtgagactgaaggagctggagagcagactgcagcaggtggacggcttcgagaagcccaagctgctgctggagcagtaccccaccagaccccacatcgccgcctgcatgctgtacaccatccacaacacctacgacgacatcgagaacaaggtggtggccgacctgggctgcggctgcggcgtgctgagcatcggcaccgccatgctgggcgccggcctgtgcgtgggcttcgacatcgacgaggacgccctggagatcttcaacagaaacgccgaggagttcgagctgaccaacatcgacatggtgcagtgcgacgtgtgcctgctgagcaacagaatgagcaagagcttcgacaccgtgatcatgaacccccccttcggcaccaagaacaacaagggcaccgacatggccttcctgaagaccgccctggagatggccagaaccgccgtgtacagcctgcacaagagcagcaccagagagcacgtgcagaagaaggccgccgagtggaagatcaagatcgacatcatcgccgagctgagatacgacctgcccgccagctacaagttccacaagaagaagagcgtgtag

SEQ ID NO: 11714 - DNA, 1125 bp, synthetic construct
  source 1..1125: mol_type = other DNA; note = Synthetic coding sequence
atgctggcccccggctgcgagctggaccccgaccaggaggtggtgagaaccagacccgaggacgtgcccgccagccccagcaccagcaccatgatcgtgagcgtgctgagaccccccagccacgccagctgcaccgcctgcggcaccgtgaccttccacatcgtggagagaatggccagcgtgatccccgccagcaacagaagcatgagaagcgacagaaacacctacgtgggcaagagattcgtgcacgtgaagaacccctacctggacctgatggacgaggacatcctgtaccacctggacctgggcaccaagacccacaacctgcccgccatgttcggcgacgtgaagttcgtgtgcgtgggcggcagccccaacagaatgaaggccttcgccctgttcatgcacaaggagctgggcttcgaggaggccgaggaggacatcaaggacatctgcgccggcaccgacagatactgcatgtacaagaccggccccgtgctggccatcagccacggcatgggcatccccagcatcagcatcatgctgcacgagctgatcaagctgctgcaccacgccagatgctgcgacgtgaccatcatcagaatcggcaccagcggcggcatcggcatcgcccccggcaccgtggtgatcaccgacatcgccgtggacagcttcttcaagcccagattcgagcaggtgatcctggacaacatcgtgaccagaagcaccgagctggacaaggagctgagcgaggagctgttcaactgcagcaaggagatccccaacttccccaccctggtgggccacaccatgtgcacctacgacttctacgagggccagggcagactggacggcgccctgtgcagcttcagcagagagaagaagctggactacctgaagagagccttcaaggccggcgtgagaaacatcgagatggagagcaccgtgttcgccgccatgtgcggcctgtgcggcctgaaggccgccgtggtgtgcgtgaccctgctggacagactggactgcgaccagatcaacctgccccacgacgtgctggtggagtaccagcagagaccccagctgctgatcagcaacttcatcagaagaagactgggcctgtgcgactag

SEQ ID NO: 11715 - DNA, 4149 bp, synthetic construct
  source 1..4149: mol_type = other DNA; note = Synthetic coding sequence
atgctgagaaagctgaccatcgagcagatcaacgactggttcaccatcggcaagaccgtgaccaacgtggagctgctgggcgccccccccgccttccccgccggcgccgccagagaggaggtgcagagacaggacgtggcccccggcgccggccccgccgcccaggcccccgccctggcccaggcccccgccagacccgccgccgccttcgagagaagcctgagccagagaagcagcgaggtggagtacatcaacaagtacagacagctggaggcccaggagctggacgtgtgcagaagcgtgcagcccaccagcggccccggccccagacccagcctggccaagctgagcagcgtgacctgcatccccggcaccacctacaagtaccccgacctgcccatcagcagatacaaggaggaggtggtgagcctgatcgagagcaacagcgtggtgatcatccacggcgccaccggcagcggcaagagcacccagctgccccagtacatcctggaccactacgtgcagagaagcgcctactgcagcatcgtggtgacccagcccagaaagatcggcgccagcagcatcgccagatggatcagcaaggagagagcctggaccctgggcggcgtggtgggctaccaggtgggcctggagaagatcgccaccgaggacaccagactgatctacatgaccaccggcgtgctgctgcagaagatcgtgagcgccaagagcctgatggagttcacccacatcatcatcgacgaggtgcacgagagaaccgaggagatggacttcctgctgctggtggtgagaaagctgctgagaaccaacagcagattcgtgaaggtggtgctgatgagcgccaccatcagctgcaaggagttcgccgactacttcgccgtgcccgtgcagaacaagatgaaccccgcctacatcttcgaggtggagggcaagccccacagcgtggaggagtactacctgaacgacctggagcacatccaccacagcaagctgagcccccacctgctggaggagcccgtgatcaccaaggacatctacgaggtggccgtgagcctgatccagatgttcgacgacctggacatgaaggagagcggcaacaaggcctggagcggcgcccagttcgtgctggagagaagcagcgtgctggtgttcctgcccggcctgggcgagatcaactacatgcacgagctgctgaccagcctggtgcacaagagactgcaggtgtaccccctgcacagcagcgtggccctggaggagcagaacaacgtgttcctgagccccgtgcccggctacagaaagatcatcctgagcaccaacatcgccgagagcagcgtgaccgtgcccgacgtgaagtacgtgatcgacttctgcctgaccagaaccctggtgtgcgacgaggacaccaactaccagagcctgagactgagctgggccagcaagaccagctgcaaccagagaaagggcagagccggcagagtgagcagaggctactgctacagactggtgcacaaggacttctgggacaacagcatccccgaccacgtggtgcccgagatgctgagatgccccctgggcagcaccatcctgaaggtgaagctgctggacatgggcgagcccagagccctgctggccaccgccctgagcccccccggcctgagcgacatcgagagaaccatcctgctgctgaaggaggtgggcgccctggccgtgagcggccagagagaggacgagaacccccacgacggcgagctgaccttcctgggcagagtgctggcccagctgcccgtgaaccagcagctgggcaagctgatcgtgctgggccacgtgttcggctgcctggacgagtgcctgatcatcgccgccgccctgagcctgaagaacttcttcgccatgcccttcagacagcacctggacggctacagaaacaaggtgaacttcagcggcagcagcaagagcgactgcatcgccctggtggaggccttcaagacctggaaggcctgcagacagaccggcgagctgagataccccaaggacgagctgaactggggcagactgaactacatccagatcaagagaatcagagaggtggccgagctgtacgaggagctgaagaccagaatcagccagttcaacatgcacgtggacagcagaagacccgtgatggaccaggagtacatctacaagcagagattcatcctgcaggtggtgctggccggcgccttctaccccaactacttcaccttcggccagcccgacgaggagatggccgtgagagagctggccggcaaggaccccaagaccaccgtggtgctgaagcacatccccccctacggcttcctgtactacaagcagctgcagagcctgttcagacagtgcggccaggtgaagagcatcgtgttcgacggcgccaaggccttcgtggagttcagcagaaaccccaccgagagattcaagaccctgcccgccgtgtacatggccatcaagatgagccagctgaaggtgagcctggagctgagcgtgcacagcgccgaggagatcgagggcaaggtgcagggcatgaacgtgagcaagctgagaaacaccagagtgaacgtggacttccagaagcagaccgtggaccccatgcaggtgagcttcaacaccagcgacagaagccagaccgtgaccgacctgctgctgaccatcgacgtgaccgaggtggtggaggtgggccacttctggggctacagaatcgacgagaacaacagcgagatcctgaagaagctgaccgccgagatcaaccagctgaccctggtgcccctgcccacccacccccaccccgacctggtgtgcctggcccccttcgccgacttcgacaagcagagatacttcagagcccaggtgctgtacgtgagcggcaacagcgccgaggtgttcttcgtggactacggcaacaagagccacgtggacctgcacctgctgatggagatcccctgccagttcctggagctgcccttccaggccctggagttcaagatctgcaagatgagacccagcgccaagagcctggtgtgcggcaagcactggagcgacggcgccagccagtggttcgccagcctggtgagcggctgcaccctgctggtgaaggtgttcagcgtggtgcacagcgtgctgcacgtggacgtgtaccagtacagcggcgtgcaggacgccatcaacatcagagacgtgctgatccagcagggctacgccgagctgaccgaggagagctacgagagcaagcagagccacgaggtgctgaagggcctgttcagcaagagcgtggagaacatgaccgacggcagcgtgcccttccccatgaaggacgacgagaagtacctgatcagaatcctgctggagagcttcagcaccaacaagctgggcacccccaactgcaaggccgagctgcacggccccttcaacccctacgagctgaagtgccacagcctgaccagaatcagcaagttcagatgcgtgtggatcgagaaggagagcatcaacagcgtgatcatcagcgacgcccccgaggacctgcaccagagaatgctggtggccgccagcctgagcatcaacgccaccggcagcaccatgctgctgagagagaccagcctgatgccccacatccccggcctgcccgccctgctgagcatgctgttcgcccccgtgatcgagctgagaatcgaccagaacggcaagtactacaccggcgtgctgtgcggcctgggctggaaccccgccaccggcgccagcatcctgcccgagcacgacatggagctggccttcgacgtgcagttcagcgtggaggacgtggtggaggtgaacatcctgagagccgccatcaacaagctggtgtgcgacggccccaacggctgcaagtgcctgggccccgagagagtggcccagctgcaggacatcgccagacagaagctgctgggcctgttctgccagagcaagcccagagagaagatcgtgcccaagtggcacgagaagccctacgagtggaaccaggtggaccccaagctggtgatggagcaggccgacagagagagcagcagaggcaagaacaccttcctgtaccagctgcacaagctggtggtgctgggcacctag

SEQ ID NO: 11716 - DNA, 357 bp, synthetic construct
  source 1..357: mol_type = other DNA; note = Synthetic coding sequence
atggacgtgttcctgatgatcagaagacacaagaccaccatcttcaccgacgccaaggagagcagcaccgtgttcgagctgaagagaatcgtggagggcatcctgaagagaccccccgacgagcagagactgtacaaggacgaccagctgctggacgacggcaagaccctgggcgagtgcggcttcaccagccagaccgccagaccccaggcccccgccaccgtgggcctggccttcagagccgacgacaccttcgaggccctgtgcatcgagcccttcagcagcccccccgagctgcccgacgtgatgaagccccaggacagcggcagcagcgccaacgagcaggccgtgcagtag

SEQ ID NO: 11717 - DNA, 3228 bp, synthetic construct; identical to SEQ ID NO: 10451
  source 1..3228: mol_type = other DNA; note = Synthetic coding sequence

SEQ ID NO: 11718 - DNA, 381 bp, synthetic construct
  source 1..381: mol_type = other DNA; note = Synthetic coding sequence
atgaccgccaccgagcagtggatcttcctgtgcgccgcccacaagacccccaaggagtgccccgccatcgactacaccagacacaccctggacggcgccgcctgcctgctgaacagcaacaagtacttccccagcagagtgagcatcaaggagagcagcgtggccaagctgggcagcgtgtgcagaagaatctacagaatcttcagccacgcctacttccaccacagacagatcttcgacgagtacgagaacgagaccttcctgtgccacagattcaccaagttcgtgatgaagtacaacctgatgagcaaggacaacctgatcgtgcccatcctggaggaggaggtgcagaacagcgtgagcggcgagagcgaggcctag

SEQ ID NO: 11719 - DNA, 2811 bp, synthetic construct; identical to SEQ ID NO: 9287
  source 1..2811: mol_type = other DNA; note = Synthetic coding sequence

SEQ ID NO: 11720 - DNA, 1860 bp, synthetic construct; identical to SEQ ID NO: 10300
  source 1..1860: mol_type = other DNA; note = Synthetic coding sequence

SEQ ID NO: 11721 - DNA, 513 bp, synthetic construct
  source 1..513: mol_type = other DNA; note = Synthetic coding sequence
atgaccagaggcaaccagagagagctggccagacagaagaacatgaagaagcagagcgacagcgtgaagggcaagagaagagacgacggcctgagcgccgccgccagaaagcagagagtgggcgtgcagcagcccaacgccgagctgagccccatccacttccacctgatcctgtgcgccctgcacccccccgccagctgccccttctgccccctggtgccccccagcgcccccagcagcctgccccccggcaccagaagaagctgcagcagaagcagaaagagacagaccagaagaagaagaaaccccagcagcttcgtggccagctgccccaccctgctgcccttcgcctgcgtgcccggcgccagccccaccaccctggccttcccccccgtggtgctgaccggccccagcaccgacggcatccccttcgccctgagcctgcagagagtgcccttcgtgctgcccagcccccaggtggccagcctgcccctgggccacagcagaggctag

SEQ ID NO: 11722 - DNA, 630 bp, synthetic construct; identical to SEQ ID NO: 9403
  source 1..630: mol_type = other DNA; note = Synthetic coding sequence

SEQ ID NO: 11723 - DNA, 1755 bp, synthetic construct
  source 1..1755: mol_type = other DNA; note = Synthetic coding sequence
atggccgccagcgccaagagaaagcaggaggagaagcacctgaagatgctgagagacatgaccggcctgccccacaacagaaagtgcttcgactgcgaccagagaggccccacctacgtgaacatgaccgtgggcagcttcgtgtgcaccagctgcagcggcagcctgagaggcctgaaccccccccacagagtgaagagcatcagcatgaccaccttcacccagcaggagatcgagttcctgcagaagcacggcaacgaggtgtgcaagcagatctggctgggcctgttcgacgacagaagcagcgccatccccgacttcagagacccccagaaggtgaaggagttcctgcaggagaagtacgagaagaagagatggtacgtgccccccgagcaggccaaggtggtggccagcgtgcacgccagcatcagcggcagcagcgccagcagcaccagcagcacccccgaggtgaagcccctgaagagcctgctgggcgacagcgcccccaccctgcacctgaacaagggcacccccagccagagccccgtggtgggcagaagccagggccagcagcaggagaagaagcagttcgacctgctgagcgacctgggcagcgacatcttcgccgcccccgccccccagagcaccgccaccgccaacttcgccaacttcgcccacttcaacagccacgccgcccagaacagcgccaacgccgacttcgccaacttcgacgccttcggccagagcagcggcagcagcaacttcggcggcttccccaccgccagccacagccccttccagccccagaccaccgccttcagaatgctgagcagcagctgcagcttcggcgagttcaccagcgccttccccctgcaggccacccacagcggcagcgccgccagcgtgaacgccaacttcgcccacttcgacaacttccccaagagcagcagcgccgacttcggcaccttcaacaccagccagagccaccagaccgccagcgccgtgagcaaggtgagcaccaacaaggccggcctgcagaccgccgacaagtacgccgccctggccaacctggacaacatcttcagcgccggccagggcggcgaccagggcagcggcttcggcaccaccggcaaggcccccgtgggcagcgtggtgagcgtgcccagccagagcagcgccagcagcgacaagtacgccgccctggccgagctggacagcgtgttcagcagcgccgccaccagcagcaacgcctacaccagcaccagcaacgccagcagcaacgtgttcggcaccgtgcccgtggtggccagcgcccagacccagcccgccagcagcagcgtgcccgcccccttcggcgccacccccagcaccaaccccttcgtggccgccgccggccccagcgtggccagcagcaccaaccccttccagaccaacgccagaggcgccaccgccgccaccttcggcaccgccagcatgagcatgcccaccggcttcggcacccccgccccctacagcctgcccaccagcttcagcggcagcttccagcagcccgccttccccgcccaggccgccttcccccagcagaccgccttcagccagcagcccaacggcttcgccgccttcggccagaccaagcccgtggtgacccccttcggccaggtggccgccgccggcgtgagcagcaaccccttcatgaccggcgcccccaccggccagttccccaccggcagcagcagcaccaaccccttcctgtag

SEQ ID NO: 11724 - DNA, 795 bp, synthetic construct; identical to SEQ ID NO: 10335
  source 1..795: mol_type = other DNA; note = Synthetic coding sequence

SEQ ID NO: 11725 - DNA, 1506 bp, synthetic construct
  source 1..1506: mol_type = other DNA; note = Synthetic coding sequence
atgagcagcgagcaggacaagagcgccagcaaggagaagagcaagaagcccgtgagattcctgccccagctgagcatggagaagctggccagcaaggagaagttcaaggcccccgccagagccctgccccagctgagcatggtgagcaccaagccccactggcagcaggccgcccccagcttccacctgagcgtgaagcaggacgacgagagccccgagcccttcagcgtgaagaacgagcagagccacgccgagtacatggagagattcggcaagaagggcaagctgccccaccaggtggacgacagctacgtgggccccagcaccagcaagagcaagggcaagagcccccacaaggagagagagaacttcagaagcaccctggtgaacgtgatcatgcagcaggacgccgacctggacagcgccgtgcccgacggcagcaccatccccaagcccaccgccagcgccatcgagaaggacatcctgagatactactactacatccaccacggcatcgacaccgaccacgtggcccccatggaggacagctggctggagcacgtgctggacctggtgccccagcacctgaaggtgttcaccgacagcatcgtgaccctgagcgacgagatgagagaggactacctgctgagcgtgagaaagagcatcgtggacttcgtgctgaaggaccccagagagaagggcgacgacaagaagaccgacgagctgcccgcccacagagccgagatggagatcctgcccaagccctggagaaagagcttcctggccgccagcagctacatcagagaccacctgaacgccatgaaccccaccatgctggccgtgctggacctgtggcacaccaacttcaagaagctgagactggtggacatcaaggagttccacaactgccaggacgccctggagctgagcagcttccagaacatcatcatgagacacatggacagcgccaaggagaccctgctgaagatgtggttccccgaggtgcagaacatctactaccagggcaacaagaagaagcagctgcccaccggcgacagcagcgccaagctggagagcttcttcaactgcgccgccgccctgatgaccctgcagctgcaggacctgaccctggtgagcatgcaggacttcaccgacctgatcgcccagccccccgacagcgtgagagccttcgagcaccccggcttcatcatgagactgatcctggacaacgacaccatcaagttcgagcccgagctgagcgactacatcgacatcttcctgaacgtgtacgacgtgatgatcaaggccgtgagcttcgtgcccagagtggagaccaagctgtacagcaagtggagaaacaaggccaagcccggccacttctacttcagccacatccagagaagcgtgaccttccagcacagcgaggtgagcagcccccagaacagccacttcaagatcgtgagccccttcagcgtgctgggcttcacctggagatgccagctgtag

SEQ ID NO: 11726 - DNA, 855 bp, synthetic construct
  source 1..855: mol_type = other DNA; note = Synthetic coding sequence
atgaccgacgtgcccgccaccttcacccaggccgagtgcaacggcgacaagccccccgagaacggccagcagaccatcaccaagatcagcgaggagctgaccgacgtggacagccccctgccccactacagagtggagcccagcctggagggcgccctgaccaagggcagccaggaggagagaagaaagctgcagggcaacatgctgctgaacagcagcatggaggacaagatgctgaaggagaaccccgaggagaagctgttcatcgtgcacaaggccatcaccgacctgagcctgcaggagaccagcgccgacgagatgaccttcagagagggccaccagtgggagaagatccccctgagcggcagcaaccaggagatcagaagacagaaggagagaatcaccgagcagcccctgaaggaggaggaggacgaggacagaaagaacaagggccaccaggccgccgagatcgagtggctgggcttcagaaagcccagccaggccgacatgctgcacagcaagcacgacgaggagcagaaggtgtgggacgaggagatcgacgacgacgacgacgacaactgcaacaacgacgaggacgaggtgagagtgatcgagttcaagaagaagcacgaggaggtgagccagttcaaggaggagggcgacgccagcgaggacagccccctgagcagcgccagcagccaggccgtgacccccgacgagcagcccaccctgggcaagaagagcgacatcagcagaaacgcctacagcagatacaacaccatcagctacagaaagatcagaaagggcaacaccaagcagagaatcgacgagttcgagagcatgatgcacctgtag

SEQ ID NO: 11727 - DNA, 735 bp, synthetic construct
  source 1..735: mol_type = other DNA; note = Synthetic coding sequence
atgaagaaggtgagactgaaggagctggagagcagactgcagcaggtggacggcttcgagaagcccaagctgctgctggagcagtaccccaccagaccccacatcgccgcctgcatgctgtacaccatccacaacacctacgacgacatcgagaacaaggtggtggccgacctgggctgcggctgcggcgtgctgagcatcggcaccgccatgctgggcgccggcctgtgcgtgggcttcgacatcgacgaggacgccctggagatcttcaacagaaacgccgaggagttcgagctgaccaacatcgacatggtgcagtgcgacgtgtgcctgctgagcaacagaatgagcaagagcttcgacaccgtgatcatgaacccccccttcggcaccaagaacaacaagggcaccgacatggccttcctgaagaccgccctggagatggccagaaccgccgtgtacagcctgcacaagagcagcaccagagagcacgtgcagaagaaggccgccgagtggaagatcaagatcgacatcatcgccgagctgagatacgacctgcccgccagctacaagttccacaagaagaagagcgtgagcctgctgatcctggccggcctgcacagcgtgctgaagagcttcctgggcagaatgtggtggttcatgcccgtgatccccgccaccagagaggccgaggccagagagagcctggagctgagaagacagagactgcagtag

SEQ ID NO: 11728 - DNA, 885 bp, synthetic construct
  source 1..885: mol_type = other DNA; note = Synthetic coding sequence
atgaacaaccagaagcagcagaagcccaccctgagcggccagagattcaagaccagaaagagagacgagaaggagagattcgaccccacccagttccaggactgcatcatccagggcctgaccgagaccggcaccgacctggaggccgtggccaagttcctggacgccagcggcgccaagctggactacagaagatacgccgagaccctgttcgacatcctggtggccggcggcatgctggcccccggcggcaccctggccgacgacatgatgagaaccgacgtgtgcgtgttcgccgcccaggaggacctggagaccatgcaggccttcgcccaggtgttcaacaagctgatcagaagatacaagtacctggagaagggcttcgaggacgaggtgaagaagctgctgctgttcctgaagggcttcagcgagagcgagagaaacaagctggccatgctgaccggcgtgctgctggccaacggcaccctgaacgccagcatcctgaacagcctgtacaacgagaacctggtgaaggagggcgtgagcgccgccttcgccgtgaagctgttcaagagctggatcaacgagaaggacatcaacgccgtggccgccagcctgagaaaggtgagcatggacaacagactgatggagctgttccccgccaacaagcagagcgtggagcacttcaccaagtacttcaccgaggccggcctgaaggagctgagcgagtacgtgagaaaccagcagaccatcggcgccagaaaggagctgcagaaggagctgcaggagcagatgagcagaggcgaccccttcaaggacatcatcctgtacgtgaaggaggagatgaagaagaacaacatccccgagcccgtggtgatcggctag

SEQ ID NO: 11729 - DNA, 1374 bp, synthetic construct; identical to SEQ ID NO: 11556
  source 1..1374: mol_type = other DNA; note = Synthetic coding sequence

SEQ ID NO: 11730 - DNA, 1638 bp, synthetic construct
  source 1..1638: mol_type = other DNA; note = Synthetic coding sequence
atgagcagcagcggctacccccccaaccagggcgccttcagcaccgagcagagcagataccccccccacagcgtgcagtacaccttccccaacaccagacaccagcaggagttcgccgtgcccgactacagaagcagccacctggaggtgagccaggccagccagctgctgcagcagcagcagcagcagcagctgagaagaagacccagcctgctgagcgagttccaccccggcagcgacagaccccaggagagaagaaccagctacgagcccttccaccccggccccagccccgtggaccacgacagcctggagagcaagagacccagactggagcaggtgagcgacagccacttccagagagtgagcgccgccgtgctgcccctggtgcaccccctgcccgagggcctgagagccagcgccgacgccaagaaggaccccgccttcggcggcaagcacgaggcccccagcagccccatcagcggccagccctgcggcgacgaccagaacgccagccccagcaagctgagcaaggaggagctgatccagagcatggacagagtggacagagagatcgccaaggtggagcagcagatcctgaagctgaagaagaagcagcagcagctggaggaggaggccgccaagccccccgagcccgagaagcccgtgagccccccccccgtggagcagaagcacagaagcatcgtgcagatcatctacgacgagaacagaaagaaggccgaggaggcccacaagatcttcgagggcctgggccccaaggtggagctgcccctgtacaaccagcccagcgacaccaaggtgtaccacgagaacatcaagaccaaccaggtgatgagaaagaagctgatcctgttcttcaagagaagaaaccacgccagaaagcagagagagcagaagatctgccagagatacgaccagctgatggaggcctgggagaagaaggtggacagaatcgagaacaaccccagaagaaaggccaaggagagcaagaccagagagtactacgagaagcagttccccgagatcagaaagcagagagagcagcaggagagattccagagagtgggccagagaggcgccggcctgagcgccaccatcgccagaagcgagcacgagatcagcgagatcatcgacggcctgagcgagcaggagaacaacgagaagcagatgagacagctgagcgtgatcccccccatgatgttcgacgccgagcagagaagagtgaagttcatcaacatgaacggcctgatggaggaccccatgaaggtgtacaaggacagacagttcatgaacgtgtggaccgaccacgagaaggagatcttcaaggacaagttcatccagcaccccaagaacttcggcctgatcgccagctacctggagagaaagagcgtgcccgactgcgtgctgtactactacctgaccaagaagaacgagaactacaaggccctggtgagaagaaactacggcaagagaagaggcagaaaccagcagcagatcgccagacccagccaggaggagaaggtggaggagaaggaggaggacaaggccgagaagaccgagaagaaggaggaggagaagaaggacgaggaggagaaggacgagaaggaggacagctag

SEQ ID NO: 11731 - DNA, 480 bp, synthetic construct
  source 1..480: mol_type = other DNA; note = Synthetic coding sequence
atgacccactgctgcagcccctgctgccagcccacctgctgcagaaccacctgctggcagcccaccaccgtgaccacctgcagcagcaccccctgctgccagcccagctgctgcgtgagcagctgctgccagccctgctgccaccccacctgctgccagaacacctgctgcagaaccacctgctgccagcccatctgcgtgaccagctgctgccagcccagctgctgcagcaccccctgctgccagcccacctgctgcggcagcagctgcggccagagcagcagctgcgcccccgtgtactgcagaagaacctgctaccaccccaccagcgtgtgcctgcccggctgcctgaaccagagctgcggcagcaactgctgccagccctgctgcagacccgcctgctgcgagaccacctgctgcagaaccacctgcttccagcccacctgcgtgtacagctgctgccagcccagctgctgctag

SEQ ID NO: 11732 - DNA, 1071 bp, synthetic construct
  source 1..1071: mol_type = other DNA; note = Synthetic coding sequence
atggagggccacgaccccaaggagcccgagcagctgagaaagctgttcatcggcggcctgagcttcgagaccaccgacgacagcctgagagagcacttcgagaagtggggcaccctgaccgactgcgtggtgatgagagacccccagaccaagagaagcagaggcttcggcttcgtgacctacagctgcgtggaggaggtggacgccgccatgtgcgccagaccccacaaggtggacggcagagtggtggagcccaagagagccgtgagcagagaggacagcgtgaagcccggcgcccacctgaccgtgaagaagatcttcgtgggcggcatcaaggaggacaccgaggagtacaacctgagagactacttcgagaagtacggcaagatcgagaccatcgaggtgatggaggacagacagagcggcaagaagagaggcttcgccttcgtgaccttcgacgaccacgacaccgtggacaagatcgtggtgcagaagtaccacaccatcaacggccacaactgcgaggtgaagaaggccctgagcaagcaggagatgcagagcgccggcagccagagaggcagaggcggcggcagcggcaacttcatgggcagaggcggcaacttcggcggcggcggcggcaacttcggcagaggcggcaacttcggcggcagaggcggctacggcggcggcggcggcggcagcagaggcagctacggcggcggcgacggcggctacaacggcttcggcggcgacggcggcaactacggcggcggccccggctacagcagcagaggcggctacggcggcggcggccccggctacggcaaccagggcggcggctacggcggcggcggcggctacgacggctacaacgagggcggcaacttcggcggcggcaactacggcggcggcggcaactacaacgacttcggcaactacagcggccagcagcagagcaactacggccccatgaagggcggcagcttcggcggcagaagcagcggcagcccctacggcggcggctacggcagcggcggcggcagcggcggctacggcagcagaagattctag

SEQ ID NO: 11733 - DNA, 186 bp, synthetic construct
  source 1..186: mol_type = other DNA; note = Synthetic coding sequence
atgcccttcttcggcaacaccttcagccccaagaagaccccccccagaaagagcgccagcctgagcaacctgcacagcctggacagaagcaccagagaggtggagctgggcctggagtacggcagccccaccatgaacctggccggccagagcctgaagttcgagaacggccagtggatcgcctag

SEQ ID NO: 11734 - DNA, 981 bp, synthetic construct
  source 1..981: mol_type = other DNA; note = Synthetic coding sequence
atgccccacctgcccctggccagcttcagaccccccttctggggcctgagacacagcagaggcctgcccagattccacagcgtgagcacccagagcgagccccacggcagccccatcagcagaagaaacagagaggccaagcagaagagactgagagagaagcaggccaccctggaggccgagatcgccggcgagagcaagagccccgccgagagcatcaaggcctggagacccaaggagctggtgctgtacgagatccccaccaagcccggcgagaagaaggacgtgagcggccccctgccccccgcctacagccccagatacgtggaggccgcctggtacccctggtgggtgagagagggcttcttcaagcccgagtaccaggccagactgccccaggccaccggcgagaccttcagcatgtgcatccccccccccaacgtgaccggcagcctgcacatcggccacgccctgaccgtggccatccaggacgccctggtgagatggcacagaatgagaggcgaccaggtgctgtgggtgcccggcagcgaccacgccggcatcgccacccaggccgtggtggagaagcagctgtggaaggagagaggcgtgagaagacacgagctgagcagagaggccttcctgagagaggtgtggcagtggaaggaggccaagggcggcgagatctgcgagcagctgagagccctgggcgccagcctggactgggacagagagtgcttcaccatggacgtgggcagcagcgtggccgtgaccgaggccttcgtgagactgtacaaggccggcctgctgtacagaaaccaccagctggtgaactggagctgcgccctgagaagcgccatcagcgacatcgaggtggagaacagacccctgcccggccacacccagctgagactgcccggctgccccacccccgtgagcttcggcctgctgttcagcgtggccttccccgtggacggctag

SEQ ID NO: 11735 - DNA, 2031 bp, synthetic construct
  source 1..2031: mol_type = other DNA; note = Synthetic coding sequence
atgatccccccccaggaggccagcgccagaagaagagagatcgaggacaagctgaagcaggaggaggagaccctgagcttcatcagagacagcctggagaagagcgaccagctgaccaagaacatggtgagcatcctgagcagcttcgagagcagactgatgaagctggagaacagcatcatccccgtgcacaagcagaccgagaacctgcagagactgcaggagaacgtggagaagaccctgagctgcctggaccacgtgatcagctactaccacgtggccagcgacaccgagaagatcatcagagagggccccaccggcagactggaggagtacctgggcagcatggccaagatccagaaggccgtggagtacttccaggacaacagccccgacagccccgagctgaacaaggtgaagctgctgttcgagagaggcaaggaggccctggagagcgagttcagaagcctgatgaccagacacagcaaggtggtgagccccgtgctgatcctggacctgatcagcggcgacgacgacctggaggcccaggaggacgtgaccctggagcacctgcccgagagcgtgctgcaggacgtgatcagaatcagcagatggctggtggagtacggcagaaaccaggacttcatgaacgtgtactaccagatcagaagcagccagctggacagaagcatcaagggcctgaaggagcacttccacaagagcagcagcagcagcggcgtgccctacagccccgccatccccaacaagagaaaggacacccccaccaagaagcccgtgaagagacccggccacgagcacgacttcagagtgaagcacctgagcgaggccctgaacgacaagcacggccccctggccggcagagacgacatgctggacgtggagaccgacgcctacatccactgcgtgagcgccttcgtgaagctggcccagagcgagtaccagctgctggccgacatcatccccgagcaccaccagaagaagaccttcgacagcctgatccaggacgccctggacggcctgatgctggagggcgagaacatcgtgagcgccgccagaaaggccatcgtgagacacgacttcagcaccgtgctgaccgtgttccccatcctgagacacctgaagcagaccaagcccgagttcgaccaggtgctgcagggcaccgccgccagcaccaagaacaagctgcccggcctgatcaccagcatggagaccatcggcgccaaggccctggaggacttcgccgacaacatcaagaacgaccccgacaaggagtacaacatgcccaaggacggcaccgtgcacgagctgaccagcaacgccatcctgttcctgcagcagctgctggacttccaggagaccgccggcgccatgctggccagccaggagaccagcagcagcgccaccagctacagcagcgagttcagcaagagactgctgagcacctacatctgcaaggtgctgggcaacctgcagctgaacctgctgagcaagagcaaggtgtacgaggaccccgccctgagcgccatcttcctgcacaacaactacaactacatcctgaagagcctggagaagagcgagctgatccagctggtggccgtgacccagaagaccgccgagagaagctacagagagcacatcgagcagcagatccagacctaccagagaagctggctgaaggtgaccgactacatcgccgagaagaacctgcccgtgttccagcccggcgtgaagctgagagacaaggagagacagatcatcaaggagagattcaagggcttcaacgacggcctggaggagctgtgcaagatccagaaggcctgggccatccccgacaccgagcagagagacagaatcagacaggcccagaagaccatcgtgaaggagacctacggcgccttcctgcagaagttcggcagcgtgcccttcaccaagaaccccgagaagtacatcaagtacggcgtggagcaggtgggcgacatgatcgacagactgttcgacaccagcgcctag

SEQ ID NO: 11736 - DNA, 459 bp, synthetic construct
  source 1..459: mol_type = other DNA; note = Synthetic coding sequence
atgaccgacgtgcccgccaccttcacccaggccgagtgcaacggcgacaagccccccgagaacggccagcagaccatcaccaagatcagcgaggagctgaccgacgtggacagccccctgccccactacagagtggagcccagcctggagggcgccctgaccaagggcagccaggaggagagaagaaagctgcagggcaacatgctgctgaacagcagcatggaggacaagatgctgaaggagaaccccgaggagaagctgttcatcgtgcacaaggccatcaccgacctgagcctgcaggagaccagcgccgacgagatgaccttcagagagggccaccagtgggagaagatccccctgagcggcagcaaccaggagatcagaagacagaaggagagaatcaccgagcagcccctgaaggaggaggaggacgaggacagaaagaacaagggccactag

SEQ ID NO: 11737 - DNA, 768 bp, synthetic construct
  source 1..768: mol_type = other DNA; note = Synthetic coding sequence
atgtggcccttccccagcagaagcctgttccccccccccacccaggcctggctgcagaccgtgagcagcgaccccgaggcccagggctggggcgcctggaacgagaccaaggagatcctgggccccgagggcggcgagggcaaggaggagaaggaggaggaggaggacgccgaggaggaccaggacggcgacgccggcttcctgctgagcctgctggagcaggagaacctggccgagtgccccctgcccgaccaggagctggaggccatcaagatgaaggtgtgcgccatggagcaggccgagggcacccccagaccccccggcgtgcagcagcaggccgaggaggaggagggcaccgccgccggccagctgctgagccccgagaccgtgggctgccccctgagcggcacccccgaggagaaggtggaggccgaccacagaagcgtgtacgtgggcaacgtggactacggcggcagcgccgaggagctggaggcccacttcagcagatgcggcgaggtgcacagagtgaccatcctgtgcgacaagttcagcggccaccccaagggctgctgcagaaaggagcccaccagcctgggcagcgccccccagaccgccggcgccttcgaggacacccaggcccccggcggccaccccagccccaccgccgccagcagagccggccccggcagcgaccacaagggcagaaccggccccgtggagaacagccaccacggcttccacagaatcaagggcaagaccagattctag

SEQ ID NO: 11738 - DNA, 3561 bp, synthetic construct
  source 1..3561: mol_type = other DNA; note = Synthetic coding sequence
atggagaaggccaccgtgcccgtggccgccgccaccgccgccgagggcgagggcagcccccccgccgtggccgccgtggccggcccccccgccgccgccgaggtgggcggcggcgtgggcggcagcagcagagccagaagcgccagcagccccagaggcatggtgagagtgtgcgacctgctgctgaagaagaagcccccccagcagcagcaccacaaggccaagagaaacagaacctgcagaccccccagcagcagcgagagcagcagcgacagcgacaacagcggcggcggcggcggcggcggcggcggcggcggcggcggcggcggcaccagcagcaacaacagcgaggaggaggaggacgacgacgacgaggaggaggaggtgagcgaggtggagagcttcatcctggaccaggacgacctggagaaccccatgctggagaccgccagcaagctgctgctgagcggcaccgccgacggcgccgacctgagaaccgtggaccccgagacccaggccagactggaggccctgctggaggccgccggcatcggcaagctgagcaccgccgacggcaaggccttcgccgaccccgaggtgctgagaagactgaccagcagcgtgagctgcgccctggacgaggccgccgccgccctgaccagaatgagagccgagagcaccgccaacgccggccagagcgacaacagaagcctggccgaggcctgcagcgagggcgacgtgaacgccgtgagaaagctgctgatcgagggcagaagcgtgaacgagcacaccgaggagggcgagagcctgctgtgcctggcctgcagcgccggctactacgagctggcccaggtgctgctggccatgcacgccaacgtggaggacagaggcatcaagggcgacatcacccccctgatggccgccgccaacggcggccacgtgaagatcgtgaagctgctgctggcccacaaggccgacgtgaacgcccagagcagcaccggcaacaccgccctgacctacgcctgcgccggcggctacgtggacgtggtgaaggtgctgctggagagcggcgccagcatcgaggaccacaacgagaacggccacacccccctgatggaggccggcagcgccggccacgtggaggtggccagactgctgctggagaacggcgccggcatcaacacccacagcaacgagttcaaggagagcgccctgaccctggcctgctacaagggccacctggagatggtgagattcctgctggaggccggcgccgaccaggagcacaagaccgacgagatgcacaccgccctgatggaggcctgcatggacggccacgtggaggtggccagactgctgctggacagcggcgcccaggtgaacatgcccgccgacagcttcgagagccccctgaccctggccgcctgcggcggccacgtggagctggccgccctgctgatcgagagaggcgccagcctggaggaggtgaacgacgagggctacacccccctgatggaggccgccagagagggccacgaggagatggtggccctgctgctgggccagggcgccaacatcaacgcccagaccgaggagacccaggagaccgccctgaccctggcctgctgcggcggcttcctggaggtggccgacttcctgatcaaggccggcgccgacatcgagctgggctgcagcacccccctgatggaggccgcccaggagggccacctggagctggtgaagtacctgctggccgccggcgccaacgtgcacgccaccaccgccaccggcgacaccgccctgacctacgcctgcgagaacggccacaccgacgtggccgacgtgctgctgcaggccggcgccgacctggagcacgagagcgagggcggcagaacccccctgatgaaggccgccagagccggccacgtgtgcaccgtgcagttcctgatcagcaagggcgccaacgtgaacagaaccaccgccaacaacgaccacaccgtgctgagcctggcctgcgccggcggccacctggccgtggtggagctgctgctggcccacggcgccgaccccacccacagactgaaggacggcagcaccatgctgatcgaggccgccaagggcggccacaccagcgtggtgtgctacctgctggactaccccaacaacctgctgagcgcccccccccccgacgtgacccagctgaccccccccagccacgacctgaacagagcccccagagtgcccgtgcaggccctgcccatggtggtgcccccccaggagcccgacaagccccccgccaacgtggccaccaccctgcccatcagaaacaaggccgccagcaagcagaagagcagcagccacctgcccgccaacagccaggacgtgcagggctacatcaccaaccagagccccgagagcatcgtggaggaggcccagggcaagctgaccgagctggagcagagaatcaaggaggccatcgagaagaacgcccagctgcagagcctggagctggcccacgccgaccagctgaccaaggagaagatcgaggagctgaacaagaccagagaggagcagatccagaagaagcagaagatcctggaggagctgcagaaggtggagagagagctgcagctgaagacccagcagcagctgaagaagcagtacctggaggtgaaggcccagagaatccagctgcagcagcagcagcagcagagctgccagcacctgggcctgctgacccccgtgggcgtgggcgagcagctgagcgagggcgactacgccagactgcagcaggtggaccccgtgctgctgaaggacgagccccagcagaccgccgcccagatgggcttcgcccccatccagcccctggccatgccccaggccctgcccctggccgccggccccctgccccccggcagcatcgccaacctgaccgagctgcagggcgtgatcgtgggccagcccgtgctgggccaggcccagctggccggcctgggccagggcatcctgaccgagacccagcagggcctgatggtggccagccccgcccagaccctgaacgacaccctggacgacatcatggccgccgtgagcggcagagccagcgccatgagcaacacccccacccacagcatcgccgccagcatcagccagccccagacccccacccccagccccatcatcagccccagcgccatgctgcccatctaccccgccatcgacatcgacgcccagaccgagagcaaccacgacaccgccctgaccctggcctgcgccggcggccacgaggagctggtgcagaccctgctggagagaggcgccagcatcgagcacagagacaagaagggcttcacccccctgatcctggccgccaccgccggccacgtgggcgtggtggagatcctgctggacaacggcgccgacatcgaggcccagagcgagagaaccaaggacacccccctgagcctggcctgcagcggcggcagacaggaggtggtggagctgctgctggccagaggcgccaacaagagcaccggcatgttcctgatcacccacctgtag

SEQ ID NO: 11739 - DNA, 2682 bp, synthetic construct
  source 1..2682: mol_type = other DNA; note = Synthetic coding sequence
atggccgccaccgtggagggccccgagctggaggccgccgccgccgccggcgacgccagcgaggacagcgacgccggcagcagagccctgcccttcctgggcggcaacagactgagcctggacctgtaccccggcggctgccagcagctgctgcacctgtgcgtgcagcagcccctgcagctgctgcaggtggagttcctgagactgagcacccacgaggacccccagctgctggaggccaccctggcccagctgccccagagcctgagctgcctgagaagcctggtgctgaagggcggccagagaagagacaccctgggcgcctgcctgagaggcgccctgaccaacctgcccgccggcctgagcggcctggcccacctggcccacctggacctgagcttcaacagcctggagaccctgcccgcctgcgtgctgcagatgagaggcctgggcgccctgctgctgagccacaactgcctgagcgagctgcccgaggccctgggcgccctgcccgccctgaccttcctgaccgtgacccacaacagactgcagaccctgccccccgccctgggcgccctgagcaccctgcagagactggacctgagccagaacctgctggacaccctgccccccgagatcggcggcctgggcagcctgctggagctgaacctggccagcaacagactgcagagcctgcccgccagcctggccggcctgagaagcctgagactgctggtgctgcacagcaacctgctggccagcgtgcccgccgacctggccagactgcccctgctgaccagactggacctgagagacaaccagctgagagacctgccccccgagctgctggacgcccccttcgtgagactgcagggcaaccccctgggcgaggccagccccgacgcccccagcagccccgtggccgccctgatccccgagatgcccagactgttcctgaccagcgacctggacagcttccccgtgaccccccagggctgcagcgtgaccctggcctgcggcgtgagactgcagttccccgccggcgccaccgccacccccatcaccatcagatacagactgctgctgcccgagcccggcctggtgcccctgggcccccacgacgccctgctgagccacgtgctggagctgcagccccacggcgtggccttccagcaggacgtgggcctgtggctgctgttcacccccccccaggccagaagatgcagagaggtggtggtgagaaccagaaacgacaacagctggggcgacctggagacctacctggaggaggaggccccccagagactgtgggcccactgccaggtgccccacttcagctggttcctggtggtgagcagacccgtgagcaacgcctgcctggtgccccccgagggcaccctgctgtgcagcagcggccaccccggcgtgaaggtgatcttcccccccggcgccaccgaggagcccagaagagtgagcatgcaggtggtgagaatggccggcagagagctgcaggccctgctgggcgagcccgaggccgccgtgagccccctgctgtgcctgagccagagcggcccccccagcttcctgcagcccgtgaccgtgcagctgcccctgcccagcggcatcaccggcctgagcctggacagaagcagactgcacctgctgtactgggccccccccgccgccacctgggacgacatcaccgcccaggtggtgctggagctgacccacctgtacgccagattccaggtgacccacttcagctggtactggctgtggtacaccaccaagaactgcgtgggcggcctggccagaaaggcctgggagagactgagactgcacagagtgaacctgatcgccctgcagagaagaagagaccccgagcaggtgctgctgcagtgcctgcccagaaacaaggtggacgccaccctgagaagactgctggagagatacagaggccccgagcccagcgacaccgtggagatgttcgagggcgaggagttcttcgccgccttcgagagaggcatcgacgtggacgccgacagacccgactgcgtggagggcagaatctgcttcgtgttctacagccacctgaagaacgtgaaggaggtgagcttctacagaggcgccgtgcccgtgagagtgcccgaggaggccgaggccgccagacagagaaagggcgccgacgccctgtggatggccaccctgcccatcaagctgcccagactgagaggcagcgagggccccagaagaggcgccggcctgagcctggcccccctgaacctgggcgacgccgagaccggcttcctgacccagagcaacctgctgagcgtggccggcagactgggcctggactggcccgccgtggccctgcacctgggcgtgagctacagagaggtgcagagaatcagacacgagttcagagacgacctggacgagcagatcagacacatgctgttcagctgggccgagagacaggccggccagcccggcgccgtgggcctgctggtgcaggccctggagcagagcgacagacaggacgtggccgaggaggtgagagccgtgctggagctgggcagaagaaagtaccaggacagcatcagaagaatgggcctggcccccaaggaccccgccctgcccggcagcagcgccccccagccccccgagcccgcccaggcctag

SEQ ID NO: 11740 - DNA, 1482 bp, synthetic construct
  source 1..1482: mol_type = other DNA; note = Synthetic coding sequence
atggacttcctgctgggcaaccccttcagcagccccgtgggccagagaatcgagaaggccaccgacggcagcctgcagagcgaggactgggccctgaacatggagatctgcgacatcatcaacgagaccgaggagggccccaaggacgccctgagagccgtgaagaagagaatcgtgggcaacaagaacttccacgaggtgatgctggccctgaccgtgctggagacctgcgtgaagaactgcggccacagattccacgtgctggtggccagccaggacttcgtggagagcgtgctggtgagaaccatcctgcccaagaacaacccccccaccatcgtgcacgacaaggtgctgaacctgatccagagctgggccgacgccttcagaagcagccccgacctgaccggcgtggtgaccatctacgaggacctgagaagaaagggcctggagttccccatgaccgacctggacatgctgagccccatccacaccccccagagaaccgtgttcaacagcgagacccagagcggccaggacagcgtgggcaccgacagcagccagcaggaggacagcggccagcacgccgcccccctgcccgccccccccatcctgagcggcgacacccccatcgcccccacccccgagcagatcggcaagctgagaagcgagctggagatggtgagcggcaacgtgagagtgatgagcgagatgctgaccgagctggtgcccacccaggccgagcccgccgacctggagctgctgcaggagctgaacagaacctgcagagccatgcagcagagagtgctggagctgatcccccagatcgccaacgagcagctgaccgaggagctgctgatcgtgaacgacaacctgaacaacgtgttcctgagacacgagagattcgagagattcagaaccggccagaccaccaaggcccccagcgaggccgagcccgccgccgacctgatcgacatgggccccgaccccgccgccaccggcaacctgagcagccagctggccggcatgaacctgggcagcagcagcgtgagagccggcctgcagagcctggaggccagcggcagactggaggacgagttcgacatgttcgccctgaccagaggcagcagcctggccgaccagagaaaggaggtgaagtacgaggccccccaggccaccgacggcctggccggcgccctggacgccagacagcagagcaccggcgccatccccgtgacccaggcctgcctgatggaggacatcgagcagtggctgagcaccgacgtgggcaacgacgccgaggagcccaagggcgtgaccagcgagggcaagttcgacaagttcctggaggagagagccaaggccgccgacagactgcccaacctgagcagccccagcgccgagggcccccccggcccccccagcggccccgcccccagaaagaagacccaggagaaggacgacgacatgctgttcgccctgtag

SEQ ID NO: 11741 - DNA, 663 bp, synthetic construct
  source 1..663: mol_type = other DNA; note = Synthetic coding sequence
atgaacagccagccccagaccagaagcccccccagcagaaccgtgcccatccactgcaccgacaactggaagagaagaaaggtgctggagcagacccccgtgtacagaagcctggccggcagaggctggatcaagtactgcatcttcttccagagaccccagatccagccccccagagccaccatccccaacagcagccccagcatcagacccggcgcccagacccccaccgccgtgtaccaggccaaccagcacatcatgatggtgaaccacctgcccatgccctaccccgtgccccagggcccccagtactgcatcccccagtacagacacagcggccccccctacgtgggccccccccagcagtaccccgtgcagccccccggccccggccccttctaccccggccccggccccggcgacttccccaacgcctacggcacccccttctaccccagccagcccgtgtaccagagcgcccccatcatcgtgcccacccagcagcagcccccccccgccaagagagagaagaagaccatcagaatcagagaccccaaccagggcggcaaggacatcaccgaggagatcatgagcggcggcggcagcagaaaccccaccccccccatcggcagacccaccagcacccccacccccccccagtag

SEQ ID NO: 11742 - DNA, 414 bp, synthetic construct
  source 1..414: mol_type = other DNA; note = Synthetic coding sequence
atgagcctgttcggcaccaccagcggcttcggcaccagcggcaccagcatgttcggcagcgccaccaccgacaaccacaaccccatgaaggacatcgaggtgaccagcagccccgacgacagcatcggctgcctgagcttcagcccccccaccctgcccggcaacttcctgatcgccggcagctgggccaacgacgtgagatgctgggaggtgcaggacagcggccagaccatccccaaggcccagcagatgcacaccggccccgtgctggacgtgtgctggagcgacgacggcagcaaggtgttcaccgccagctgcgacaagaccgccaagatgtgggacctgagcagcaaccaggccatccagatcgcccagcacgacgcccccgtgaagaccatccactggatcaagtag

SEQ ID NO: 11743 - DNA, 7809 bp, synthetic construct
  source 1..7809: mol_type = other DNA; note = Synthetic coding sequence
atgaagagaaaggtggtgaacacccacaagctgagactgagccccaacgaggaggccttcatcctgaaggaggactacgagagaagaagaaagctgagactgctgcaggtgagagagcaggagagagacatcgccctgcagatcagagaggacatcaagcagagaagaaaccagcagttcaccagactggccgaggagctgagagccgagtgggaggagagccagacccagaagatccagaacctggagaagctgtacctggccagcctgagaagcatgggcgagggccacagacaggccaaggagaacgagcccgacctggacgccctggcccagagagccgccgagagaaagagaaaggccgacctgagacacaaggaggccctgaaggtgcagaagaaccagaaggagatcctgctgaagcagaagacctggcacatcaaggccagaaaggaggccctgctggtggagaaggagagaagcgccaagatcaccagcctgcccccccccccccccaccctgttcgagaacatcgaggtgaagagaatcagcgccgtgaagaccaacagcagcacctaccaccacctgcacaccttcgtgaacagagagaccgacaccaagagacccgacgccagactggccgccgaggaggaggccaagagactggaggagctgcagaagcaggccgcccaggagagaatggagagattcgagaaggcccacgtgagaggcttccaggccatgaagaagatccacctggcccagaaccaggagaagctgatgaaggagctgaagcagctgcagcaggaggacctggccagaagaagacagaccgtggcccagatgcccccccagctggtggagctgccctacaagagaagcgagatgaaggaggactggcagagagagctggagttcgccttcgaggacatgtacaacgccgacagaaaggtgaagggcaacctgatcctgcacctggagcccgagcccctgcccaccgtgaccaaccagatccaggacgaggagctggacctgagcatggagcaggagaacctgggcgccgccgaggacctgcccgtgaccgaggccgagatctgcagcagcgagaccgacgtgcccctggtgatgaagacccagcagatccccagcaaggtgctgttcaagaagctgctgaacaagatcagaagccagaagagcctgtggaccatcaagagcatgagcgaggacgagagcgagatgatcaccaccgtgagcgagatcgagagcaaggcccccaccgtggagagcggcaccatcgccagcaaggagagaaccctgagcagcggccaggagcaggtggtggagagcgacaccctgaccatcgagagcggccccctggccagcgaggacaagcccctgagctgcggcaccaacagcggcaaggagcaggagatcaacgagaccctgcccatcaccaccgtggcccagagcagcgtgctgctgcacccccaggaggccgccgccagaatcagaatgagcgccagacagaagcagatcatggagatcgaggagcagaagcagaagcagctggagctgctggagcagatcgagcagcagaagctgagactggagaccgactgcttcagagcccagctggaggaggagaagagaaagaagacccagcccaccggcgtgggcatcgcccccgccagctgccccgtgatcagcgacgaggacagccacagacagatgatcagaaactaccagcaccagctgctgcagcagaacagactgcacagacagagcgtggagaccgccagaaagcagctgctggagtaccagaccatgctgaagggcagatgccccagcgtgagcgcccccagcctgatcaccgacagcgtgatcagcgtgcccagctggaagagcgagagacccaccgccatcagcgagcactgggaccagggccagagactgaagctgagccccaacaagtaccagcccatccagcccatccagaccagcaagctggagcaggaccacttccaggtggccagacagaaccacttcccccagagacaggtggagaccaccgagaccctgagagccagcgacatcctgaccaaccaggccctggagagccaggagcacctgagacagttcagccagaccgagacccagcagagagactacaagctggtgcccaaggacagcgagaccctgagcagagccctgagccacgacagacagctgatcagccaggacgccagaaagatcagcgagaccttcggcgccaccaccttccagagcctggagagccagcagctgttcagcgagaacagcgagaacatcagctaccacctgaccgagcccagcagcttcgtgcccctggtgccccagcacagcttcagcagcctgcccgtgaaggtggagagcggcaagatccaggagcccttcagcgccatgagcaagagcaccgtgagcaccagccacagcatcatcagccagatgcacgacagacccctgctgcccagcgagaacatcaccgcccagcagggcaacatgaaggccctgcaggagcagctggacctgcagaagaaggtgctgcaggccacccaggaggcccaggagcagctgctgctgtgcaagcagaaggaggtggagcagcagaccggcctgagcgtgttcctgcccctggtgacccccgacagcagcgccctgctgcccagcgccaaggccgacctgggcagaatccaggagagcagccccaccaagaacaacatcgccgtgagcagcgaccaccacgtgatcagccagctgcaggacaagagactgagcctgagccagcccatcctgagccagcagaacaacttcaagttcctgcaggagcagctgaacatccagaaggacagcctgcaggccagaagagaggcccaggaggtgctgtacgtgcacaagcagagcgagctggacagaagagtgtgcagcgagcaggccgagcccagcttccccttccaggtggcccagcacaccttcaccagcctgcccagcgccgacaccaagagcggcaagatccaggagcagcacagcagcaagagcgagaagggcctggtgagctgccagagcgacatccccatcagccaggacggcagcctgagcttcctgcagcagttcctgcccctgcacgacagcctgaagctgctgcaggagcagctgaccaagcagagagacaccctgcaggccagacacgaggcccaggtggagctgctgctgcacagacagagagacctgggcgacagcaagagcggcctggtgagcagcagcagcagccccgtggtggtgcagcacagcgtggccagccaggccagcgccaaggccgagcccagaagaatccaggagctgtacctgagcgagaaggagaacgtgggccccagctgccacctgatcatccccaccttccaggacaagagcctgagcttcccccagcacagcctggcccagcaggagaacctgaccatcctgcaggagcagagccagatccagagagtgatcctgggcgccaaggagggcacccaggagttcgtgcacaccgagagcgagctggagaagagaatcagcagcgagcagaccggcaccagcagcagcctgagccaggtggacgagagcgagagattccaggagtgcatcagcatcaagagcgacagcaccatccccctgagccaccccaagatccccagatgccaggagagactgctgagagtgagccagcacatgctgcccctgcaggacaacctggaggagcaccaggcctggctggacaccgagaaggaggccttccacttcagccagaagacccaggagaacaccagcagcgagcagaccggcagcagcagcttcatcccccagctggtgcagctgagcttcaccagcctggccagcgccgagagcggcaccatcctggagcccctgttcaccgagagcgagagcaagatcttcagcagccacctgcagatcccccagctgcaggacagactgctgagaatcagccagctgatccagccccagcaggacaacctgaaggccctgcaggagcagctggccacccagagagaggccatcatcctggccagacaggaggccagagaggagctgctgctgcaccagagcgagtgggagggcagaatcagccccgagcaggtggacaccagcagcctgcccctggtgccccagcacagcttcgccagcctgcccctgaacgagagcgagagaaaccaggagccctgcagcatcaacagcgacaacatcgtgagcagcggccacagcgagatccccaccctgcccgacggcctgctgggcctgagccacctggtgctgccccagcaggacaacctgatcgccctggaggagcacctgcacgcccagaccgacttcctgcccagcatcgagaagacccagaaggagctggtgctgagcaagccctgcaagttcgaggagaaggtgagcagcgagcacttcatccagagccaccacggcgacctgcaggccctgcagcagcagctggacacccagaagaaggccatcagaagcatccaggaggtgcaggaggagctgctgctgcagagactgagcgagctggagaagagagtgagcagcgagcaggtgtgcagcagcagcttcgtgagccaggtgcccgtggccgacagcgagagaacccagaagagcttccccaccaagagcaacgacaccctgcccagcagccacagagagatccccagactgcaggacagactgctgagcctgagcaagcccatcctgccccagcaggacaacatgaccgcccagctggacgcccagagagaggtgatgtacagctacgagaagccccaggaggagctgagcctgaacaagcagagaaagctgaacaagagcgagagcgccgagcacaccatccccagcctgttcctgcccaaggagaccgagcacagcttcatccccctgcccttcgccgaggccaagcccaagagcacctgcgagctgtacagcagccagaacgagcacgccgccccccccagcaaccccgtgatccccggcttccaggacagactgctgagcttcagccagagcgtgctgacccagcaggacaacctgggcctgcagaagcagctggacctgcagagagaggtgctgcactacagccagaaggcccaggagaagctgctggtgcagagacagaccgccctgcagcagcagatccagaagcacgaggagaccctgaaggacttcttcaaggacagccagatcagcaagcccaccgtggagaacgacctgaagacccagaagatgggccagctgagagactggttccccaacacccaggacctggccggcaacgaccaggagaacatcagacacgccgacagaaacaacagcgacgacaaccacctggccagcgaggacaccagcgccaagcagagcggcgagcacctggagaaggacctgggcagaagaagcagcaagccccccgtggccaaggtgaagtgcggcctggacctgaaccagcacgagctgagcgccatccaggaggtggagagccccgccatcggcagaaccagcatcctgggcaagcccggcatctacgaggacagagaccccctgagagtgagcatcagcagagagcagagcttcttcggcagccccctggcccacgaccccttcagctgcctgcagctggtgggccaggagaacgtgtgcggcgacgactacgacgaggccgtgaagctgaaggagagcgtggtggagaaccacgccgtgctgagctacgccgtggaggaggagcacgcctacctgggccccaccgtgaagcccgacgacaaggccaagaccctgagctacgagcccctgagcagcgccaccgtgagcaccggcagcctgctgagctacgagaacaccgacctgagcctgaccgaccccgagagcttcagcgagcacatggacgacagcaagcaggagagcaccaccagcaaggaggaggagaccaacatcatcagcagcatcgtgcccagcacccaggacatctaccagagacagaacagcagcgacgtgcacaagagcctgctgcccgccgtggacgagaccacctgcggccacacccacttccagcagatgatcgacaagtacatcaacgaggccaacctgatccccgagaagaccgacctgcaggagctggagcacatcttccccaacctgcaccaccagctgttcaagcccctggagccccaccccgacttcgacctgagcagcagcagcagcggcatcagccccgacaacagagacttctaccagagaagcgacagcagcagcgagagccactgcgccaccggcctgagcaagagcaccgtgtacttcaccgccctgagaagaaccagcatgcacagcagcctgaacaccagccccaaccagcagcccgacaccaacctggcccacgtgggcgcccacagcttcgccaccgagaacatcatcggcggcagcgagcagtgcttcgagcagctgcagcccgagtacagcagccaggaggagagccagcacgccgacctgcccagcatcttcagcatcgaggccagagacagcagccagggcatgaagaaccagaactaccccagcgaggagcacaccgagatcctgcagaacaagaagaagatcgtgcacttccagctgagcatcggcaacctgagcagcgtgtacagcagcagcgacgaggccaacgtgttcgaccagctgaacgtgcagcacagcaccccctgcggcagcaacagcagcgagtgcagcaccaagcaccagctggagagcagaaaggagagcatgggcttcgaggagctgagcaagagaggcgtggtgaccatgctgcagagccagggcctgatcgaggacaacaagaacgagacctgcagagtgctggacatcaacccccaggtggaggagaccgacagcagactgtgcgtgagaaccgtggagatgggcaccagcatccaggccccctacagcctgaccacccagaacgagaagtacttcgagaacagcgccgagaccgacatccccaagatcaccaagaagctgagccagctgggcgagagcgagctgttcgccagcagcggcagcttcagcctgcagagcagcatccccgtgtgggagaccgagaccggccacggcatcatggaggagcccgagctgaccctgatcagcaccaccgacaccagcatcgccgagatggacttcgccaacctgaccctggaggagaagagcgagaacgaggccaagtgcttcttccaggtgagcgagttcctgcccctggtgagcgccaccgaggccagcgactaccccgccgtgagcgagctgagcatcgagaagcccagaaccgccagcaccgccgagacccccagaagactgacccccgtgcccggcagcctgcaggaggccttcatcaagagaaagaagagcttcatggagagaagccaccagagacagaaggagatcagaaacaagatccacgtgagcgagaacagccagatcaagaccgtgaaggagaagcccagcatcagcagcagcgtgagcagactgaagggcgtgaacaaggtgagagccagcttccccgaggacagaaagaccacccaggccctgagacaccagagaggcctgagactgtacaaccagctggccgaggtgaagcagcagaaggaggagaagaccaagcaggaggcctacgcccagaacagagccagagccaaggagttccacaagaagaccctggagaagctgagagccaagaacacctgctag

SEQ ID NO: 11744 - DNA, 1602 bp, synthetic construct
  source 1..1602: mol_type = other DNA; note = Synthetic coding sequence
agcgcccccagcgtgggcaacgacatgggcaacgacgacgccatcggcggcaacgtgagcaagtacatcgtgctgcccaccggctactgcggccagcccaagaagggccacctgatcttcgacgcctgcttcgagagcggcaacctgggcagagtggaccaggtgagcgagttcgagtacgacctgttcatcagacccgacacctgcaaccccagattcagagtgtggttcaacttcaccgtggagaacgtgaaggagagccagagagtgatcttcaacatcgtgaacttcagcaagaccaagagcctgtacagagacggcatggcccccatggtgaagagcaccagcagacccaagtggcagagactgccccccaagaacgtgtactactacagatgccccgaccacagaaagaactacgtgatgagcttcgccttctgcttcgacagagaggaggacatctaccagttcgcctactgctacccctacacctacaccagattccagcactacctggacagcctgcagaagagaaacatggactacttcttcagagagcagctgggccagagcgtgcagcagagaaagctggacctgctgaccatcaccagccccgacaacctgagagagggcgccgagcagaaggtggtgttcatcaccggcagagtgcaccccggcgagacccccagcagcttcgtgtgccagggcatcatcgacttcctggtgagccagcaccccatcgcctgcgtgctgagagagtacctggtgttcaagatcgcccccatgctgaaccccgacggcgtgtacctgggcaactacagatgcagcctgatgggcttcgacctgaacagacactggctggaccccagcccctgggtgcaccccaccctgcacggcgtgaagcagctgatcgtgcagatgtacaacgaccccaagaccagcctggagttctacatcgacatccacgcccacagcaccatgatgaacggcttcatgtacggcaacatcttcgaggacgaggagagattccagagacaggccatcttccccaagctgctgtgccagaacgccgaggacttcagctacagcagcaccagcttcaacagagacgccgtgaaggccggcaccggcagaagattcctgggcggcctgctggaccacaccagctactgctacaccctggaggtgagcttctacagctacatcatcagcggcaccaccgccgccgtgccctacaccgaggaggcctacatgaagctgggcagaaacgtggccagaaccttcctggactactacagactgaaccccgtggtggagaaggtggccatccccatgcccagactgagaaacaaggagatcgaggtgcagagaagaaaggagaagagccccccctacaagcaccccctgctgagaggccccgccagcaactaccccaacagcaagggcgacaagaagagcagcgtgaaccacaaggaccccagcacccccttcaagaccagaagccccggcagaagctacggcgacagaagcatgcacttcctgctgggcaacgagatcaaccacagcagcctggccagcaaggacctgtggatcaacgcctag

SEQ ID NO: 11745 - DNA, 1509 bp, synthetic construct
  source 1..1509: mol_type = other DNA; note = Synthetic coding sequence
atgcccgagatcagagtgacccccctgggcgcctgccccgtgctgagctggaacctggtgctgccccccggcagaggcagcagagcccccagcagcaccgacaccagaaccggcttccacgtgctgccccacggcgtggacgacgagctggagatcaaggcctactacgccggccacgtgctgggcgccgccatgttccagatcaaggtgggcagcgagagcgtggtgtacaccggcgactacaacatgacccccgacagacacctgggcgccgcctggatcgacaagtgcagacccaacctgctgatcaccgagagcacctacgccaccaccatcagagacagcaagagatgcagagagagagacttcctgaagaaggtgcacgagaccgtggagagaggcggcaaggtgctgatccccgtgttcgccctgggcagagcccaggagctgtgcatcctgctggagaccttctgggagagaatgaacctgaaggtgcccatctacttcagcaccggcctgaccgagaaggccaaccactactacaagctgttcatcccctggaccaaccagaagatcagaaagaccttcgtgcagagaaacatgttcgagttcaagcacatcaaggccttcgacagagccttcgccgacaaccccggccccatggtggtgttcgccacccccggcatgctgcacgccggccagagcctgcagatcttcagaaagtgggccggcaacgagaagaacatggtgatcatgcccggctactgcgtgcagggcaccgtgggccacaagatcctgagcggccagagaaagctggagatggagggcagacaggtgctggaggtgaagatgcaggtggagtacatgagcttcagcgcccacgccgacgccaagggcatcatgcagctggtgggccaggccgagcccgagagcgtgctgctggtgcacggcgaggccaagaagatggagttcctgaagcagaagatcgagcaggagctgagagtgaactgctacatgcccgccaacggcgagaccgtgaccctgcccaccagccccagcatccccgtgggcatcagcctgggcctgctgaagagagagatggcccagggcctgctgcccgaggccaagaagcccagactgctgcacggcaccctgatcatgaaggacagcaacttcagactggtgagcagcgagcaggccctgaaggagctgggcctggccgagcaccagctgagattcacctgcagagtgcacctgcacgacaccagaaaggagcaggagaccgccctgagagtgtacagccacctgaagagcgtgctgaaggaccactgcgtgcagcacctgcccgacggcagcgtgaccgtggagagcgtgctgctgcaggccgccgcccccagcgaggaccccggcaccaaggtgctgctggtgagctggacctaccaggacgaggagctgggcagcttcctgaccagcctgctgaagaagggcctgccccaggcccccagctag

SEQ ID NO: 11746 - DNA, 1371 bp, synthetic construct
  source 1..1371: mol_type = other DNA; note = Synthetic coding sequence
atggccgacagcctggagagcacccccctgcccagccccgaggacagactggccaagctgcaccccagcaaggagctgctggagtactaccagaagaagatggccgagtgcgaggccgagaacgaggacctgctgaagaagctggagctgtacaaggaggcctgcgagggccagcacaagctggagtgcgacctgcagcagagagaggaggagatcgccgagctgcagaaggccctgagcgacatgcaggtgtgcctgttccaggagagagagcacgtgctgagactgtacagcgagaacgacagactgagaatcagagagctggaggacaagaagaagatccagaacctgctggccctggtgggcaccgacgccggcgaggtgacctacttctgcaaggagcccccccacaaggtgaccatcctgcagaagaccatccaggccgtgggcgagtgcgagcagagcgagagcagcgccttcaaggccgaccccaagatcagcaagagaagacccagcagagagagaaaggagagcagcgagcactaccagagagacatccagaccctgatcctgcaggtggaggccctgcaggcccagctgggcgagcagaccaagctgagcagagagcagatcgagggcctgatcgaggacagaagaatccacctggaggagatccaggtgcagcaccagagaaaccagaacaagatcaaggagctgaccaagaacctgcaccacacccaggagctgctgtacgagagcaccaaggacttcctgcagctgagaagcgagaaccagaacaaggagaagagctggatgctggagaaggacaacctgatgagcaagatcaagcagtacagagtgcagtgcaagaagaaggaggacaagatcggcaaggtgctgcccgtgatgcacgagagccaccacgcccagagcgagtacatcaagagcctgaaggacaagctggtgcaggagaagaagctgagcaacatgtaccaggagcagtgcatcagcctggaggaggagctggccagaatcagagaggaggagggcatgagaagagagatcttcaaggacagaaccaacaagatgggcaagagactgcagatcatgaccaagagatacgaggccctggagagaagaagaatcctggaggtggagggcttcaagaccgacatcaaggtgctgagacagaagctgaaggacctggagcagatgctgtacaaggccaccgtgaacgccagagccaaccaggacctggccctgctgtgcgaggtgagagacagcaacagaagagcccacaagatccagggcgagctgaagaacctgaagagcaaggtgttcggcctggagaacgagctgagactgtgctag

SEQ ID NO: 11747 - DNA, 270 bp, synthetic construct; identical to SEQ ID NO: 11466
  source 1..270: mol_type = other DNA; note = Synthetic coding sequence

SEQ ID NO: 11748 - DNA, 453 bp, synthetic construct
  source 1..453: mol_type = other DNA; note = Synthetic coding sequence
atgcaccccgaggacagcgtggtgagcagcaaggtgctgggctgcagccacttccccgtggccagcagacccgccggcagccacgacccccagcccggccacagaggcagagtgctgggccccgccagagcccccggctgggtgagatacgccgagagagtgctgggcagacccatcaccgcccacctgtgcaccgccaagagcccccagcaggtgatgggcagcctggtgaaggactacttcgccagacagcagaacctgagccccgagaagatcttccacgtgatcgtggccccctgctacgacaagaagctggaggccctgcaggagagcctgccccccgccctgcacggcagcagaggcgccgactgcgtgctgaccagcggcgagatcgcccagatcatggagcagggcgacctgagcgtgagagacgccgccgtggacaccctgtag

SEQ ID NO: 11749 - DNA, 534 bp, synthetic construct
  source 1..534: mol_type = other DNA; note = Synthetic coding sequence
atgggctgctgcggctgcagcagaggctgcggcagcggctgcggcggctgcggcagcagctgcggcggctgcggcagcggctgcggcggctgcggcagcggcagaggcggctgcggcagcggctgcggcggctgcagcagcagctgcggcggctgcggcagcagatgctacgtgcccgtgtgctgctgcaagcccgtgtgcagctgggtgcccgcctgcagctgcaccagctgcggcagctgcggcggcagcaagggcggctgcggcagctgcggcggcagcaagggcggctgcggcagctgcggcggcagcaagggcggctgcggcagctgcggctgcagccagagcagctgctgcaagccctgctgctgcagcagcggctgcggcagcagctgctgccagagcagctgctgcaagccctgctgctgccagagcagctgctgcgtgcccgtgtgctgccagagcagctgctgcaagccctgctgctgccagagcaactgctgcgtgcccgtgtgctgccagtgcaagatctag

SEQ ID NO: 11750 - DNA, 294 bp, synthetic construct
  source 1..294: mol_type = other DNA; note = Synthetic coding sequence
atgcccgccgagctgtggctgaccagctacggcgtgagagaggtggaccaggtgaagagactgaccggccccggcctgagcgagggccccgagcccagcatcagcgtgatggtgaccggcggcccctggcccaccagactgagcagaacctgcctgcactacctgggcgagttcggcgaggaccagatctacgaggcccaccagcagggcagaggcgccctggaggccctgctgtgcggcggcccccagggcgcctgcagcgagaaggtgagcgccaccagagaggagctgtag

SEQ ID NO: 11751 - DNA, 264 bp, synthetic construct
  source 1..264: mol_type = other DNA; note = Synthetic coding sequence
atggagaaccagctggccaagagcaccgaggagagaaccttccagtaccaggacagcctgcccagcctgcccgtgcccagcctggaggagagcctgaagaagtacctggagagcgtgaagcccttcgccaaccaggaggagtacaagaagaccgaggagatcgtgcagaagttccagagcggcatcggcgagaagctgcaccagaagctgctggagagagccaagggcaagagaaactgggtgttcgtggtgatcatcgagtag

SEQ ID NO: 11752 - DNA, 1881 bp, synthetic construct; identical to SEQ ID NO: 10843
  source 1..1881: mol_type = other DNA; note = Synthetic coding sequence

SEQ ID NO: 11753 - DNA, 2940 bp, synthetic construct
  source 1..2940: mol_type = other DNA; note = Synthetic coding sequence
atgctgtgctggggcaacgccagcttcggccagctgggcctgggcggcatcgacgaggagatcgtgctggagcccagaaagagcgacttcttcatcaacaagagagtgagagacgtgggctgcggcctgagacacaccgtgttcgtgctggacgacggcaccgtgtacacctgcggctgcaacgacctgggccagctgggccacgagaagagcagaaagaagcccgagcaggtggtggccctggacgcccagaacatcgtggccgtgagctgcggcgaggcccacaccctggccctgaacgacaagggccaggtgtacgcctggggcctggacagcgacggccagctgggcctggtgggcagcgaggagtgcatcagagtgcccagaaacatcaagagcctgagcgacatccagatcgtgcaggtggcctgcggctactaccacagcctggccctgagcaaggccagcgaggtgttctgctggggccagaacaagtacggccagctgggcctgggcaccgactgcaagaagcagaccagcccccagctgctgaagagcctgctgggcatccccttcatgcaggtggccgccggcggcgcccacagcttcgtgctgaccctgagcggcgccatcttcggctggggcagaaacaagttcggccagctgggcctgaacgacgagaacgacagatacgtgcccaacctgctgaagagcctgagaagccagaagatcgtgtacatctgctgcggcgaggaccacaccgccgccctgaccaaggagggcggcgtgttcaccttcggcgccggcggctacggccagctgggccacaacagcaccagccacgagatcaaccccagaaaggtgttcgagctgatgggcagcatcgtgaccgagatcgcctgcggcagacagcacaccagcgccttcgtgcccagcagcggcagaatctacagcttcggcctgggcggcaacggccagctgggcaccggcagcaccagcaacagaaagagccccttcaccgtgaagggcaactggtacccctacaacggccagtgcctgcccgacatcgacagcgaggagtacttctgcgtgaagagaatcttcagcggcggcgaccagagcttcagccactacagcagcccccagaactgcggcccccccgacgacttcagatgccccaaccccaccaagcagatctggaccgtgaacgaggccctgatccagaagtggctgagctaccccagcggcagattccccgtggagatcgccaacgagatcgacggcaccttcagcagcagcggctgcctgaacggcagcttcctggccgtgagcaacgacgaccactacagaaccggcaccagattcagcggcgtggacatgaacgccgccagactgctgttccacaagctgatccagcccgaccacccccagatcagccagcaggtggccgccagcctggagaagaacctgatccccaagctgaccagcagcctgcccgacgtggaggccctgagattctacctgaccctgcccgagtgccccctgatgagcgacagcaacaacttcaccaccatcgccatccccttcggcaccgccctggtgaacctggagaaggcccccctgaaggtgctggagaactggtggagcgtgctggagccccccctgttcctgaagatcgtggagctgttcaaggaggtggtggtgcacctgctgaagctgtacaagatcggcatcccccccagcgagagaagaatcttcaacagcttcctgcacaccgccctgaaggtgctggagatcctgcacagagtgaacgagaagatgggccagatcatccagtacgacaagttctacatccacgaggtgcaggagctgatcgacatcagaaacgactacatcaactgggtgcagcagcaggcctacggcatggacgtgaaccacggcctgaccgagctggccgacatccccgtgaccatctgcacctaccccttcgtgttcgacgcccaggccaagaccaccctgctgcagaccgacgccgtgctgcagatgcagatggccatcgaccaggcccacagacagaacgtgagcagcctgttcctgcccgtgatcgagagcgtgaacccctgcctgatcctggtggtgagaagagagaacatcgtgggcgacgccatggaggtgctgagaaagaccaagaacatcgactacaagaagcccctgaaggtgatcttcgtgggcgaggacgccgtggacgccggcggcgtgagaaaggagttcttcctgctgatcatgagagagctgctggaccccaagtacggcatgttcagatactacgaggacagcagactgatctggttcagcgacaagatcaccgtggagaacttcggcgccaccgaggtgaaggagctggtgctgaacggcgccgacaccgccgtgaacaagcagaacagacaggagttcgtggacgcctacgtggactacatcttcaacaagagcgtggccagcctgttcgacgccttccacgccggcttccacaaggtgtgcggcggcaaggtgctgctgctgttccagcccaacgagctgcaggccatggtgatcggcaacaccaactacgactggaaggagctggagaagaacaccgagtacaagggcgagtactgggccgagcaccccaccatcaagatcttctgggaggtgttccacgagctgcccctggagaagaagaagcagttcctgctgttcctgaccggcagcgacagaatccccatcctgggcatgaagagcctgaagctggtgatccagagcaccggcggcggcgaggagtacctgcccgtgagccacacctgcttcaacctgctggacctgcccaagtacaccgagaaggagaccctgagaagcaagctgatccaggccatcgaccacaacgagggcttcagcctgatctag

SEQ ID NO: 11754 - DNA, 1020 bp, synthetic construct
  source 1..1020: mol_type = other DNA; note = Synthetic coding sequence
atgaagatcttcgtgggcaacgtggacggcgccgacaccacccccgaggagctggccgccctgttcgccccctacggcaccgtgatgagctgcgccgtgatgaagcagttcgccttcgtgcacatgagagagaacgccggcgccctgagagccatcgaggccctgcacggccacgagctgagacccggcagagccctggtggtggagatgagcagacccagacccctgaacacctggaagatcttcgtgggcaacgtgagcgccgcctgcaccagccaggagctgagaagcctgttcgagagaagaggcagagtgatcgagtgcgacgtggtgaagggcaagagaatgcacgtgcagctgagcaccagcagactgagaaccgcccccggcatgggcgaccagagcggctgctacagatgcggcaaggagggccactggagcaaggagtgccccatcgacagaagcggcagagtggccgacctgaccgagcagtacaacgagcagtacggcgccgtgagaaccccctacaccatgagctacggcgacagcctgtactacaacaacgcctacggcgccctggacgcctactacaagagatgcagagccgccagaagctacgaggccgtggccgccgccgccgccagcgtgtacaactacgccgagcagaccctgagccagctgccccaggtgcagaacaccgccatggccagccacctgaccagcaccagcctggacccctacgacagacacctgctgcccaccagcggcgccgccgccaccgccgccgccgccgccgccgccgccgccgccgtgaccgccgccagcaccagctactacggcagagacagaagccccctgagaagagccaccgcccccgtgcccaccgtgggcgagggctacggctacggccacgagagcgagctgagccaggccagcgccgccgccagaaacagcctgtacgacatggccagatacgagagagagcagtacgccgacagagccagatacagcgccttctag

SEQ ID NO: 11755 - DNA, 390 bp, synthetic construct; identical to SEQ ID NO: 10956
  source 1..390: mol_type = other DNA; note = Synthetic coding sequence

SEQ ID NO: 11756 - DNA, 1695 bp, synthetic construct
  source 1..1695: mol_type = other DNA; note = Synthetic coding sequence
atgagctaccccgccgacgactacgagagcgaggccgcctacgacccctacgcctaccccagcgactacgacatgcacaccggcgaccccaagcaggacctggcctacgagagacagtacgagcagcagacctaccaggtgatccccgaggtgatcaagaacttcatccagtacttccacaagaccgtgagcgacctgatcgaccagaaggtgtacgagctgcaggccagcagagtgagcagcgacgtgatcgaccagaaggtgtacgagatccaggacatctacgagaacagctggaccaagctgaccgagagattcttcaagaacaccccctggcccgaggccgaggccatcgccccccaggtgggcaacgacgccgtgttcctgatcctgtacaaggagctgtactacagacacatctacgccaaggtgagcggcggccccagcctggagcagagattcgagagctactacaactactgcaacctgttcaactacatcctgaacgccgacggccccgcccccctggagctgcccaaccagtggctgtgggacatcatcgacgagttcatctaccagttccagagcttcagccagtacagatgcaagaccgccaagaagagcgaggaggagatcgacttcctgagaagcaaccccaagatctggaacgtgcacagcgtgctgaacgtgctgcacagcctggtggacaagagcaacatcaacagacagctggaggtgtacaccagcggcggcgaccccgagagcgtggccggcgagtacggcagacacagcctgtacaagatgctgggctacttcagcctggtgggcctgctgagactgcacagcctgctgggcgactactaccaggccatcaaggtgctggagaacatcgagctgaacaagaagagcatgtacagcagagtgcccgagtgccaggtgaccacctactactacgtgggcttcgcctacctgatgatgagaagataccaggacgccatcagagtgttcgccaacatcctgctgtacatccagagaaccaagagcatgttccagagaaccacctacaagtacgagatgatcaacaagcagaacgagcagatgcacgccctgctggccatcgccctgaccatgtaccccatgagaatcgacgagagcatccacctgcagctgagagagaagtacggcgacaagatgctgagaatgcagaagggcgacccccaggtgtacgaggagctgttcagctacagctgccccaagttcctgagccccgtggtgcccaactacgacaacgtgcaccccaactaccacaaggagcccttcctgcagcagctgaaggtgttcagcgacgaggtgcagcagcaggcccagctgagcaccatcagaagcttcctgaagctgtacaccaccatgcccgtggccaagctggccggcttcctggacctgaccgagcaggagttcagaatccagctgctggtgttcaagcacaagatgaagaacctggtgtggaccagcggcatcagcgccctggacggcgagttccagagcgccagcgaggtggacttctacatcgacaaggacatgatccacatcgccgacaccaaggtggccagaagatacggcgacttcttcatcagacagatccacaagttcgaggagctgaacagaaccctgaagaagatgggccagagaccctag

SEQ ID NO: 11757 - DNA, 789 bp, synthetic construct; identical to SEQ ID NO: 10456
  source 1..789: mol_type = other DNA; note = Synthetic coding sequence

SEQ ID NO: 11758 - DNA, 1626 bp, synthetic construct; identical to SEQ ID NO: 10173
  source 1..1626: mol_type = other DNA; note = Synthetic coding sequence

SEQ ID NO: 11759 - DNA, 303 bp, synthetic construct
  source 1..303: mol_type = other DNA; note = Synthetic coding sequence
atgagcaccatcggcagcttcgagggcttccaggccgtgagcctgaagcaggagggcgacgaccagcccagcgagaccgaccacctgagcatggaggaggaggaccccatgcccagacagatcagcagacagagcagcgtgaccgagagcaccctgtaccccaacccctaccaccagccctacatcagcagaaagtacttcgccaccagacccggcgccatcgagaccgccatggaggacctgaagggccacgtggccgagaccagcggcgagaccatccagggcttctggctgctgacctag

SEQ ID NO: 11760 - DNA, 1425 bp, synthetic construct
  source 1..1425: mol_type = other DNA; note = Synthetic coding sequence
atggagagaagcggccagagagtgaccacctgggactgcgaccagggcaagcacagcgacagcgactacagagaggacggcatggacctgggcagcgacgccggcagcagcagcagcagcagcagagccagcagccagagcaacagcaccaaggtgaccccctgcagcgagtgcaagagcagcagcagccccggcggcagcctggacctggtgagcgccctggaggactacgaggagcccttccccgtgtaccagaagaaggtgatcgacgagtgggcccccgaggaggacggcgaggaggaggaggaggaggacgagagagaccagagaggctacagagacgacagaagccccgccagagagcccggcgacgtgagcgccagaaccagaagcggcggcggcggcggcagaagcgccaccaccgccatgcccccccccgtgcccaacggcaacctgcaccagcacgacccccaggacctgagacacaacggcaacgtggtggtggccggcagacccagctgcagcagaggccccagaagagccatccagaagccccagcccgccggcggcagaagaagcggcagaggccccgccgccggcggcctgtgcctgcagccccccgacggcggcacctgcgtgcccgaggagccccccgtgccccccatggactgggaggccctggagaagcacctggccggcctgcagttcagagagcaggaggcccagaagaacgagagagagagcatcagacagaagctggccctgggcagcttcttcgacgacggccccggcatctacaccagctgcagcaagagcggcaagcccagcctgagcagcagactgcagagcggcatgaacctgcagatctgcttcgtgaacgacagcggcagcgacaaggacagcgacgccgacgacagcaagaccgagaccagcctggacacccccctgagccccatgagcaagcagagcagcagctacagcgacagagacaccaccgaggaggagagcgagagcctggacgacatggacttcctgaccagacagaagaagctgcaggccgaggccaagatggccctggccatggccaagcccatggccaagatgcaggtggaggtggagaagcagaacagaaagaagagccccgtggccgacctgctgccccacatgccccacatcagcgagtgcctgatgaagagaagcctgaagcccaccgacctgagagacatgaccatcggccagctgcaggtgatcgtgaacgacctgcacagccagatcgagagcctgaacgaggagctggtgcagctgctgctgatcagagacgagctgcacaccgagcaggacgccatgctggtggacatcgaggacctgaccagacacgccgagagccagcagaagcacatggccgagaagatgcccgccaagtag

SEQ ID NO: 11761 - DNA, 690 bp, synthetic construct
  source 1..690: mol_type = other DNA; note = Synthetic coding sequence
atgcagcagagagtgctggagctgatcccccagatcgccaacgagcagctgaccgaggagctgctgatcgtgaacgacaacctgaacaacgtgttcctgagacacgagagattcgagagattcagaaccggccagaccaccaaggcccccagcgaggccgagcccgccgccgacctgatcgacatgggccccgaccccgccgccaccggcaacctgagcagccagctggccggcatgaacctgggcagcagcagcgtgagagccggcctgcagagcctggaggccagcggcagactggaggacgagttcgacatgttcgccctgaccagaggcagcagcctggccgaccagagaaaggaggtgaagtacgaggccccccaggccaccgacggcctggccggcgccctggacgccagacagcagagcaccggcgccatccccgtgacccaggcctgcctgatggaggacatcgagcagtggctgagcaccgacgtgggcaacgacgccgaggagcccaagggcgtgaccagcgaggagttcgacaagttcctggaggagagagccaaggccgccgacagactgcccaacctgagcagccccagcgccgagggcccccccggcccccccagcggccccgcccccagaaagaagacccaggagaaggacgacgacatgctgttcgccctgtag

SEQ ID NO: 11762 - DNA, 1650 bp, synthetic construct
  source 1..1650: mol_type = other DNA; note = Synthetic coding sequence
atgagcagagtggccaagtacagaagacaggtgagcgaggaccccgacatcgacagcctgctggagaccctgagccccgaggagatggaggagctggagaaggagctggacgtggtggaccccgacggcagcgtgcccgtgggcctgagacagagaaaccagaccgagaagcagagcaccggcgtgtacaacagagaggccatgctgaacttctgcgagaaggagaccaagaagctgatgcagagagagatgagcatggacgagagcaagcaggtggagaccaagaccgacgccaaggaggagaagatcatcagaggcatcgacaagggcagagtgagagccgccgtggacaagaaggaggccggcaaggacggcagaggcgaggagagagccgtggccaccaagaaggaggaggagaagaagggcagcgacagaaacaccggcctgagcagagacaaggacaagaagagagaggagatgaaggaggtggccaagaaggaggacgacgagaaggtgaagggcgagagaagaaacaccgacaccagaaaggagggcgagaagatgaagagagccggcggcaacaccgacatgaagaaggaggacgagaaggtgaagagaggcaccggcaacaccgacaccaagaaggacgacgagaaggtgaagaagaacgagcccctgcacgagaaggaggccaaggacgacagcaagaccaagacccccgagaagcagacccccagcggccccaccaagcccagcgagggccccgccaaggtggaggaggaggccgcccccagcatcttcgacgagcccctggagagagtgaagaacaacgaccccgagatgaccgaggtgaacgtgaacaacagcgactgcatcaccaacgagatcctggtgagattcaccgaggccctggagttcaacaccgtggtgaagctgttcgccctggccaacaccagagccgacgaccacgtggccttcgccatcgccatcatgctgaaggccaacaagaccatcaccagcctgaacctggacagcaaccacatcaccggcaagggcatcctggccatcttcagagccctgctgcagaacaacaccctgaccgagctgagattccacaaccagagacacatctgcggcggcaagaccgagatggagatcgccaagctgctgaaggagaacaccaccctgctgaagctgggctaccacttcgagctggccggccccagaatgaccgtgaccaacctgctgagcagaaacatggacaagcagagacagaagagactgcaggagcagagacaggcccaggaggccaagggcgagaagaaggacctgctggaggtgcccaaggccggcgccgtggccaagggcagccccaagcccagcccccagcccagccccaagcccagccccaagaacagccccaagaagggcggcgcccccgccgcccccccccccccccccccccccctggccccccccctgatcatggagaacctgaagaacagcctgagccccgccacccagagaaagatgggcgacaaggtgctgcccgcccaggagaagaacagcagagaccagctgctggccgccatcagaagcagcaacctgaagcagctgaagaaggtggaggtgcccaagctgctgcagtag

SEQ ID NO: 11763 - DNA, 231 bp, synthetic construct
  source 1..231: mol_type = other DNA; note = Synthetic coding sequence
atgagcgccagctgcgacggctgcgtgggcagcagaccccccgtgcacctggccagcggctacagcctggccgacctgctggtgctggagatgggcatgggcacccagtgctggaccgaggaccagagaagatggagcagcctgtggccctggagccacctgagcagcgaccccagcctgcccaacgtgcaggtgaccagactgaccctgctgagcgagcaggccccctag

SEQ ID NO: 11764 - DNA, 1416 bp, synthetic construct
  source 1..1416: mol_type = other DNA; note = Synthetic coding sequence
atggccaacagcttcgccgccagaatcttcaccaccctgagcgacctgcagaccaacatggccaacctgaaggtgatcggcatcgtgatcggcaagaccgacgtgaagggcttccccgacagaaagaacatcggcagcgagagatacaccttcagcttcaccatcagagacagccccgcccacttcgtgaacgccgccagctggggcaacgaggactacatcaagagcctgagcgacagcttcagagtgggcgactgcgtgatcatcgagaaccccctgatccagagaaaggagatcgagagagaggagaagttcagccccgccacccccagcaactgcaagctgctgctgagcgagaaccacagcaccgtgaaggtgtgcagcagctacgaggtggacaccaagctgctgagcctgatccacctgcccgtgaaggagagccacgactactacagcctgggcgacatcgtggccaacggccacagcctgaacggcagaatcatcaacgtgctggccgccgtgaagagcgtgggcgagcccaagtacttcaccaccagcgacagaagaaagggccagagatgcgaggtgagactgtacgacgagaccgagagcagcttcgccatgacctgctgggacaacgagagcatcctgctggcccagagctggatgcccagagagaccgtgatcttcgccagcgacgtgagaatcaacttcgacaagttcagaaactgcatgaccgccaccgtgatcagcaagaccatcatcaccaccaaccccgacatccccgaggccaacatcctgctgaacttcatcagagagaacaaggagaccaacgtgctggacgacgagatcgacagctacttcaaggagagcatcaacctgagcaccatcgtggacgtgtacaccgtggagcagctgaagggcaaggccctgaagaacgagggcaaggccgaccccagctacggcatcctgtacgcctacatcagcaccctgaacatcgacgacgagaccaccaaggtggtgagaaacagatgcagcagctgcggctacatcgtgaacgaggccagcaacatgtgcaccacctgcaacaagaacagcctggacttcaagagcgtgttcctgagcttccacgtgctgatcgacctgaccgaccacaccggcaccctgcacagctgcagcctgaccggcagcgtggccgaggagaccctgggctgcaccgtgcacgagttcctggccatgaccgacgagcagaagaccgccctgaagtggcagttcctgctggagagaagcaagatctacctgaagttcgtgctgagccacagagccagaagcggcctgaagatcagcgtgctgagctgcaagctggccgaccccaccgaggccagcagaaacctgagcggccagaagcacgtgtag

SEQ ID NO: 11765 - DNA, 747 bp, synthetic construct
  source 1..747: mol_type = other DNA; note = Synthetic coding sequence
atggccaccagcgcccccctgagaagcctggaggaggaggtgacctgcagcatctgcctggactacctgagagaccccgtgaccatcgactgcggccacgtgttctgcagaagctgcaccaccgacgtgagacccatcagcggcagcagacccgtgtgccccctgtgcaagaagcccttcaagaaggagaacatcagacccgtgtggcagctggccagcctggtggagaacatcgagagactgaaggtggacaagggcagacagcccggcgaggtgaccagagagcagcaggacgccaagctgtgcgagagacacagagagaagctgcactactactgcgaggacgacggcaagctgctgtgcgtgatgtgcagagagagcagagagcacagaccccacaccgccgtgctgatggagaaggccgcccagccccacagagagaagatcctgaaccacctgagcaccctgagaagagacagagacaagatccagggcttccaggccaagggcgaggccgacatcctggccgccctgaagaagctgcaggaccagagacagtacatcgtggccgagttcgagcagggccaccagttcctgagagagagagaggagcacctgctggagcagctggccaagctggagcaggagctgaccgagggcagagagaagttcaagagcagaggcgtgggcgagctggccagactggccctggtgatcagcgagctggagggcaaggcccagcagtag

SEQ ID NO: 11766 - DNA, 2646 bp, synthetic construct
  source 1..2646: mol_type = other DNA; note = Synthetic coding sequence
atgttctggaagttcgacctgcacaccagcagccacctggacaccctgctggagagagaggacctgagcctgcccgagctgctggacgaggaggacgtgctgcaggagtgcaaggtggtgaacagaaagctgctggacttcctgctgcagcccccccacctgcaggccatggtggcctgggtgacccaggagccccccgacagcggcgaggagagactgagatacaagtaccccagcgtggcctgcgagatcctgaccagcgacgtgccccagatcaacgacgccctgggcgccgacgagagcctgctgaacagactgtacggcttcctgcagagcaccggcagcctgaaccccctgctggccagcttcttcagcaaggtgatgggcatcctgatcaacagaaagaccgaccagctggtgagcttcctgagaaagaaggacgacttcgtggacctgctgctgcagcacatcggcaccagcgccatcatggacctgctgctgagactgctgacctgcgtggagagaccccagctgagacaggacgtggtgaactggctgaacgaggagaagatcgtgcagagactgatcgagcagatccaccccagcaaggacgagaaccagcacagcaacgccagccagagcctgtgcgacatcatcagactgagcagagagcagatgatccaggtgcaggacagccccgagcccgaccagctgctggccaccctggagaagcaggagaccatcgagcagctgctgagcaacatgttcgagggcgagcagagccagagcgtgatcgtgagcggcatccaggtgctgctgaccctgctggagcccagaagacccagaagcgagagcgtgaccgtgaacagcttcttcagcagcgtggacggccagctggagctgctggcccagggcgccctggagagcaccgtgagcagcgtgggcgccctgcacgccctgagacccagactgagctgcttccaccagctgctgctggagccccccaagctggagcccctgcagatgacctggggcatgctggccccccccctgggcaacaccagactgcacgtggtgaagctgctggccagcgccctgagcgccaacgacgccgccctgacccacgagctgctggccctggacgtgcccaacaccatgctggacctgttcttccactacgtgttcaacaacttcctgcacgcccaggtggagggctgcgtgagcaccatgctgagcctgggccccccccccgacagcagccccgagacccccatccagaaccccgtggtgaagcacctgctgcagcagtgcagactggtggagagaatcctgaccagctgggaggagaacgacagagtgcagtgcgccggcggccccagaaagggctacatgggccacctgaccagagtggccggcgccctggtgcagaacaccgagaagggccccaacgccgagcagctgagacagctgctgaaggagctgcccagcgagcagcaggagcagtgggaggccttcgtgagcggccccctggccgagaccaacaagaagaacatggtggacctggtgaacacccaccacctgcacagcagcagcgacgacgaggacgacagactgaaggagttcaacttccccgaggaggccgtgctgcagcaggccttcatggacttccagatgcagagaatgaccagcgccttcatcgaccacttcggcttcaacgacgaggagttcggcgagcaggaggagagcgtgaacgcccccttcgacaagaccgccaacatcaccttcagcctgaacgccgacgacgagaaccccaacgccaacctgctggagatctgctacaaggacagaatccagcagttcgacgacgacgaggaggaggaggacgaggaggaggcccagggcagcggcgagagcgacggcgaggacggcgcctggcagggcagccagctggccagaggcgccagactgggccagccccccggcgtgagaagcggcggcagcaccgacagcgaggacgaggaggaggaggacgaggaggaggaggaggacgaggagggcatcggctgcgccgccagaggcggcgccacccccctgagctaccccagccccggcccccagccccccggccccagctggaccgccaccttcgaccccgtgcccaccgacgcccccaccagccccagagtgagcggcgaggaggagctgcacaccggcccccccgccccccagggccccctgagcgtgccccagggcctgcccacccagagcctggccagcccccccgccagagacgccctgcagctgagaagccaggaccccaccccccccagcgccccccaggaggccaccgagggcagcaaggtgaccgagcccagcgccccctgccaggccctggtgagcatcggcgacctgcaggccaccttccacggcatcagaagcgcccccagcagcagcgacagcgccaccagagaccccagcaccagcgtgcccgccagcggcgcccaccagcccccccagaccaccgagggcgagaagagccccgagcccctgggcctgccccagagccagagcgcccaggccctgacccccccccccatccccaacggcagcgcccccgagggccccgccagccccggcagccagtag

SEQ ID NO: 11767 - DNA, 354 bp, synthetic construct
  source 1..354: mol_type = other DNA; note = Synthetic coding sequence
atgaagttccagtacaaggaggtgcaccccttcgagtacagaaagaaggagggcgagaagatcagaaagaagtaccccgacagagtgcccctgatcgtggagaaggcccccaaggccagagtgcccgacctggacagaagaaagtacctggtgcccagcgacctgaccgacggccagttctacctgctgatcagaaagagaatccacctgagacccgaggacgccctgttcttcttcgtgaacaacaccatcccccccaccagcgccaccatgggccagctgtacgaggacagccacgaggaggacgacttcctgtacgtggcctacagcaacgagagcgtgtacggcaagtag

SEQ ID NO: 11768 - DNA, 1089 bp, synthetic construct
  source 1..1089: mol_type = other DNA; note = Synthetic coding sequence
atgagagagatcgtgcacctgcaggccggccagtgcggcaaccagatcggcgccaagttctgggaggtgatcagcgacgagcacggcatcgaccccaccggcacctaccacggcgacagcgacctgcagctggagagaatcaacgtgtactacaacgaggccaccggcggcaactacgtgcccagagccgtgctggtggacctggagcccggcaccatggacagcgtgagaagcggccccttcggccagatcttcagacccgacaacttcgtgttcggccagagcggcgccggcaacaactgggccaagggccactacaccgagggcgccgagctggtggacgccgtgctggacgtggtgagaaaggaggccgagagctgcgactgcctgcagggcttccagctgaccacccccacctacggcgacctgaaccacctggtgagcgccaccatgagcggcgtgaccacctgcctgagattccccggccagctgaacgccgacctgagaaagctggccgtgaacatggtgcccttccccagactgcacttcttcatgcccggcttcgcccccctgaccagcagaggcagccagcagtacagagccctgaccgtgcccgagctgacccagcagatgttcgacgccaagaacatgatggccgcctgcgaccccagacacggcagatacctgaccgtggccgccgtgttcagaggcagaatgagcatgaaggaggtggacgagcagatgctgagcgtgcagagcaagaacagcagctacttcgtggagtggatccccaacaacgtgaagaccgccgtgtgcgacatcccccccagaggcctgaagatggccgccaccttcatcggcaacagcaccgccatccaggagctgttcaagagaatcagcgagcagttcaccgccatgttcagaagaaaggccttcctgcactggtacaccggcgagggcatggacgagatggagttcaccgaggccgagagcaacatgaacgacctggtgagcgagtaccagcagtaccaggacgccaccgccgaggagggcgagttcgaggaggaggccgaggaggaggtggcctag

SEQ ID NO: 11769 - DNA, 654 bp, synthetic construct
  source 1..654: mol_type = other DNA; note = Synthetic coding sequence
atggaggagaccatgaagctggccaccatggaggacaccgtggagtactgcctgttcctgatccccgacgagagcagagacagcgacaagcacaaggagatcctgcagaagtacatcgagagaatcatcaccagattcgcccccatgctggtgccctacatctggcagaaccagcccttcaacctgaagtacaagcccggcaagggcggcgtgcccgcccacatgttcggcgtgaccaagttcggcgacaacatcgaggacgagtggttcatcgtgtacgtgatcaagcagatcaccaaggagttccccgagctggtggccagcaccaacagagtgttcttctgccacggcgagctgtgcatcatccccgcccccagaaagagcggcgccgagagctggctgcccaccaccccccccaccatcccccaggccctgaacatcatcaccgcccacagcgagaagatcctggccagcgagagcatcagagccgccgtgaacagaagaatcagaggctaccccgagaagatccaggccagcctgcacagagcccactgcttcctgcccgccggcatcgtggccgtgctgaagcagagacccagactggtggccgccgccgtgcaggccttctacctgagagaccccatcgacctgtag

SEQ ID NO: 11770 - DNA, 1188 bp, synthetic construct; identical to SEQ ID NO: 11022
  source 1..1188: mol_type = other DNA; note = Synthetic coding sequence

SEQ ID NO: 11771 - DNA, 102 bp, synthetic construct
  source 1..102: mol_type = other DNA; note = Synthetic coding sequence
atgagcatcagcagcgacgaggtgaacttcctggtgtacagatacctgcaggagagcggcttcagccacagcgccttcaccttcggcatcgagagccactag

SEQ ID NO: 11772 - DNA, 1242 bp, synthetic construct
  source 1..1242: mol_type = other DNA; note = Synthetic coding sequence
atgttcgccagcgacctgctgagagccctggactgctgccccggcgccggcagcagcggcctgctgccccagctgggccccagacagctgctggccttcaccgtgaactgcctgggcaaccacagatacctgggcttcttcgaggacctggagcagagacacaaggcccaggtgctggtggaggacatcagcgacatcctggaggagcacgccgagaagcacttccacccctacatcgcctactgcagcaacgaggtgtaccagcagagaaccctgcagaagctgatcagcagcaacgccgccttcagagaggccctgagagagatcgagagaagacccgcctgcggcggcctgcccatgctgagcttcctgatcctgcccatgcagagagtgaccagactgcccctgctgatggacaccctgtgcctgaagacccagggccacagcgagagatacaaggccgccagcagagccctgaaggccatcagcaagctggtgagacagtgcaacgagggcgcccacagaatggagagaatggagcagatgtacaccctgcacacccagctggacttcagcaaggtgaagagcctgcccctgatcagcgccagcagatggctgctgaagagaggcgagctgttcctggtggaggagaccggcctgttcagaaagatcgccagcagacccacctgctacctgttcctgttcaacgacgtgctggtggtgaccaagaagaagagcgaggagagctacatggtgcaggactacgcccagatgaaccacatccaggtggagaagatcgagcccagcgagctgcccctgcccggcggcggcaacagaagcagcagcgtgccccaccccttccaggtgaccctgctgagaaacagcgagggcagacaggagcagctgctgctgagcagcgacagcgccagcgacagagccagatggatcgtggccctgacccacagcgagagacagtggcagggcctgagcagcaagggcgacctgccccaggtggagatcaccaaggccttcttcgccaagcaggccgacgaggtgaccctgcagcaggccgacgtggtgctggtgctgcagcaggaggacggctggctgtacggcgagagactgagagacggcgagaccggctggttccccgaggacttcgccagattcatcaccagcagagtggccgtggagggcaacgtgagaagaatggagagactgagagtggagaccgacgtgtag

SEQ ID NO: 11773 - DNA, 1890 bp, synthetic construct
  source 1..1890: mol_type = other DNA; note = Synthetic coding sequence
atggaggagagccccctgagcagagcccccagcagaggcggcgtgaacttcctgaacgtggccagaacctacatccccaacaccaaggtggagtgccactacaccctgccccccggcaccatgcccagcgccagcgactggatcggcatcttcaaggtggaggccgcctgcgtgagagactaccacaccttcgtgtggagcagcgtgcccgagagcaccaccgacggcagccccatccacaccagcgtgcagttccaggcctgcaaccagctggacgagagccagcaggagagaaacgacctgatgcagctgaagctgcagctggagggccaggtgaccgagctgagaagcagagtgcaggagctggagagagccctggccaccgccagacaggagcacaccgagctgatggagcagtacaagggcatcagcagaagccacggcgagatcaccgaggagagagacatcctgagcagacagcagggcgaccacgtggccagaatcctggagctggaggacgacatccagaccatcagcgagaaggtgctgaccaaggaggtggagctggacagactgagagacaccgtgaaggccctgaccagagagcaggagaagctgctgggccagctgaaggaggtgcaggccgacaaggagcagagcgaggccgagctgcaggtggcccagcaggagaaccaccacctgaacctggacctgaaggaggccaagagctggcaggaggagcagagcgcccaggcccagagactgaaggacaaggtggcccagatgaaggacaccctgggccaggcccagcagagagtggccgagctggagcccctgaaggagcagctgagaggcgcccaggagctggccgccagcagccagcagaaggccaccctgctgggcgaggagctggccagcgccgccgccgccagagacagaaccatcgccgagctgcacagaagcagactggaggtggccgaggtgaacggcagactggccgagctgggcctgcacctgaaggaggagaagtgccagtggagcaaggagagagccggcctgctgcagagcgtggaggccgagaaggacaagatcctgaagctgagcgccgagatcctgagactggagaaggccgtgcaggaggagagaacccagaaccaggtgttcaagaccgagctggccagagagaaggacagcagcctggtgcagctgagcgagagcaagagagagctgaccgagctgagaagcgccctgagagtgctgcagaaggagaaggagcagctgcaggaggagaagcaggagctgctggagtacatgagaaagctggaggccagactggagaaggtggccgacgagaagtggaacgaggacgccaccaccgaggacgaggaggccgccgtgggcctgagctgccccgccgccctgaccgacagcgaggacgagagccccgaggacatgagactgcccccctacggcctgtgcgagagaggcgaccccggcagcagccccgccggccccagagaggccagccccctggtggtgatcagccagcccgcccccatcagcccccacctgagcggccccgccgaggacagcagcagcgacagcgaggccgaggacgagaagagcgtgctgatggccgccgtgcagagcggcggcgaggaggccaacctgctgctgcccgagctgggcagcgccttctacgacatggccagcggcttcaccgtgggcaccctgagcgagaccagcaccggcggccccgccacccccacctggaaggagtgccccatctgcaaggagagattccccgccgagagcgacaaggacgccctggaggaccacatggacggccacttcttcttcagcacccaggaccccttcaccttcgagtag

SEQ ID NO: 11774 - DNA, 2451 bp, synthetic construct
  source 1..2451: mol_type = other DNA; note = Synthetic coding sequence
atgcccctgagcagccccaacgccgccgccaccgccagcgacatggacaagaacagcggcagcaacagcagcagcgccagcagcggcagcagcaagggccagcagccccccagaagcgccagcgccggccccgccggcgagagcaagcccaagagcgacggcaagaacagcagcggcagcaagagatacaacagaaagagagagctgagctaccccaagaacgagagcttcaacaaccagagcagaagaagcagcagccagaagagcaagaccttcaacaagatgcccccccagagaggcggcggcagcagcaagctgttcagcagcagcttcaacggcggcagaagagacgaggtggccgaggcccagagagccgagttcagccccgcccagttcagcggccccaagaagatcaacctgaaccacctgctgaacttcaccttcgagcccagaggccagaccggccacttcgagggcagcggccacggcagctggggcaagagaaacaagtggggccacaagcccttcaacaaggagctgttcctgcaggccaactgccagttcgtggtgagcgaggaccaggactacaccgcccacttcgccgaccccgacaccctggtgaactgggacttcgtggagcaggtgagaatctgcagccacgaggtgcccagctgccccatctgcctgtacccccccaccgccgccaagatcaccagatgcggccacatcttctgctgggcctgcatcctgcactacctgagcctgagcgagaagacctggagcaagtgccccatctgctacagcagcgtgcacaagaaggacctgaagagcgtggtggccaccgagagccaccagtacgtggtgggcgacaccatcaccatgcagctgatgaagagagagaagggcgtgctggtggccctgcccaagagcaagtggatgaacgtggaccaccccatccacctgggcgacgagcagcacagccagtacagcaagctgctgctggccagcaaggagcaggtgctgcacagagtggtgctggaggagaaggtggccctggagcagcagctggccgaggagaagcacacccccgagagctgcttcatcgaggccgccatccaggagctgaagaccagagaggaggccctgagcggcctggccggcagcagaagagaggtgaccggcgtggtggccgccctggagcagctggtgctgatggcccccctggccaaggagagcgtgttccagcccagaaagagcctgctgcagcagggcgtgctggagtacctgagcgccttcgacgaggagaccaccgaggtgtgcagcctggacacccccagcagacccctggccctgcccctggtggaggaggaggaggccgtgagcgagcccgagcccgagggcctgcccgaggcctgcgacgacctggagctggccgacgacaacctgaaggagggcaccatctgcaccgagagcagccagcaggagcccatcaccaagagcggcttcaccagactgagcagcagcccctgctactacttctaccaggccgaggacggccagcacatgttcctgcaccccgtgaacgtgagatgcctggtgagagagtacggcagcctggagagaagccccgagaagatcagcgccaccgtggtggagatcgccggctacagcatgagcgaggacgtgagacagagacacagatacctgagccacctgcccctgacctgcgagttcagcatctgcgagctggccctgcagccccccgtggtgagcaaggagaccctggagatgttcagcgacgacatcgagaagagaaagagacagagacagaagaaggccagagaggagagaagaagagagagaagaatcgagatcgaggagaacaagaagcagggcaagtaccccgaggtgcacatccccctggagaacctgcagcagttccccgccttcaacagctacacctgcagcagcgacagcgccctgggccccaccagcaccgagggccacggcgccctgagcatcagccccctgagcagaagccccggcagccacgccgacttcctgctgacccccctgagccccaccgccagccagggcagccccagcttctgcgtgggcagcctggaggaggacagccccttccccagcttcgcccagatgctgagagtgggcaaggccaaggccgacgtgtggcccaagaccgcccccaagaaggacgagaacagcctggtgccccccgcccccgtggacagcgacggcgagagcgacaacagcgacagagtgcccgtgcccagcttccagaacagcttcagccaggccatcgaggccgccttcatgaagctggacacccccgccaccagcgaccccctgagcgaggagaagggcggcaagaagagaaagaagcagaagcagaagctgctgttcagcaccagcgtggtgcacaccaagtag

SEQ ID NO: 11775 - DNA, 429 bp, synthetic construct
  source 1..429: mol_type = other DNA; note = Synthetic coding sequence
atggccagccccggcaaggacaactacagaatgaagagctacaagaacaaggccctgaacccccaggagatgagaagaagaagagaggaggagggcatccagctgagaaagcagaagagagaggagcagctgttcaagagaagaaacgtgtacctgcccagaaacgacgagagcatgctggagagccccatccaggaccccgacatcagcagcaccgtgcccatccccgaggaggaggtggtgaccaccgacatggtgcagatgatcttcagcaacaacgccgaccagcagctgaccgccacccagaagttcagaaagctgctgagcaaggagcccaacccccccatcgaccaggtgatccagaagcccggcgtggtgcagagattcgtgaagttcctggagagaaacgagaactgcaccctgcagtag

SEQ ID NO: 11776 - DNA, 297 bp, synthetic construct
  source 1..297: mol_type = other DNA; note = Synthetic coding sequence
atgagcgagcagggcgacctgaaccaggccatcgccgaggagggcggcaccgagcaggagaccgccacccccgagaacggcatcgtgaagagcgagagcctggacgaggaggagaagctggagctgcagagaagactggaggcccagaaccaggagagaagaaagagcaagagcggcgccggcaagggcaagctgaccagaagcctggccgtgtgcgaggagagcagcgccagacccggcggcgagagcctgcaggaccaggagagcatccacctgcagctgagcagcttcagctag

SEQ ID NO: 11777 - DNA, 1917 bp, synthetic construct
  source 1..1917: mol_type = other DNA; note = Synthetic coding sequence
atggagaacctgcagaccaacttcagcctggtgcagggcagcaccaagaagctgaacggcatgggcgacgacggcagcccccccgccaagaagatgatcaccgacatccacgccaacggcaagaccatcaacaaggtgcccaccgtgaagaaggagcacctggacgactacggcgaggcccccgtggagaccgacggcgagcacgtgaagagaacctgcaccagcgtgcccgagaccctgcacctgaaccccagcctgaagcacaccctggcccagttccacctgagcagccagagcagcctgggcggccccgccgccttcagcgccagacacagccaggagagcatgagccccaccgtgttcctgcccctgcccagcccccaggtgctgcccggccccctgctgatccccagcgacagcagcaccgagctgacccagaccgtgctggagggcgagagcatcagctgcttccaggtgggcggcgagaagagactgtgcctgccccaggtgctgaacagcgtgctgagagagttcaccctgcagcagatcaacaccgtgtgcgacgagctgtacatctactgcagcagatgcaccagcgaccagctgcacatcctgaaggtgctgggcatcctgcccttcaacgcccccagctgcggcctgatcaccctgaccgacgcccagagactgtgcaacgccctgctgagacccagaaccttcccccagaacggcagcgtgctgcccgccaagagcagcctggcccagctgaaggagaccggcagcgccttcgaggtggagcacgagtgcctgggcaagtgccagggcctgttcgccccccagttctacgtgcagcccgacgccccctgcatccagtgcctggagtgctgcggcatgttcgccccccagaccttcgtgatgcacagccacagaagccccgacaagagaacctgccactggggcttcgagagcgccaagtggcactgctacctgcacgtgaaccagaagtacctgggcacccccgaggagaagaagctgaagatcatcctggaggagatgaaggagaagttcagcatgagaagcggcaagagaaaccagagcaagaccgacgcccccagcggcatggagctgcagagctggtaccccgtgatcaagcaggagggcgaccacgtgagccagacccacagcttcctgcaccccagctactacctgtacatgtgcgacaaggtggtggcccccaacgtgagcctgaccagcgccgtgagccagagcaaggagctgaccaagaccgaggccaacgccagcatcagcaacaacagcaccagcaagagaaagagcgagagcgccacctgcaacctggtgagagacatcaacaaggtgggcatcggcctggtggccgccgccagcagccccctgctggtgaaggacgtgatctgcgaggacgacaagggcaagatcatggaggaggtgatgagaacctacctgaagcagcaggagaagctgaacctgatcctgcagaagaagcagcagctgcagatggaggtgaagatgctgagcagcagcaagagcatgaaggagctgaccgaggagcagcagaacctgcagaaggagctggagagcctgcagaacgagcacgcccagagaatggaggagttctacgtggagcagaaggacctggagaagaagctggagcagatcatgaagcagaagtgcacctgcgacagcaacctggagaaggacaaggaggccgagtacgccggccagctggccgagctgagacagagactggaccacgccgaggccgacagacaggagctgcaggacgagctgagacaggagagagaggccagacagaagctggagatgatgatcaaggagctgaagctgcagatcctgaagagcagcaagaccgccaaggagtag

SEQ ID NO: 11778 - DNA, 1530 bp, synthetic construct
  source 1..1530: mol_type = other DNA; note = Synthetic coding sequence
atgaagagaggcagactgcccagcagcagcgaggacagcgacgacaacggcagcctgagcaccacctggagccagaacagcagaagccagcacagaagaagcagctgcagcagacacgaggacagaaagcccagcgaggtgttcagaaccgacctgatcaccgccatgaagctgcacgacagctaccagctgaaccccgacgagtactacgtgctggccgacccctggagacaggagtgggagaagggcgtgcaggtgcccgtgagccccggcaccatcccccagcccgtggccagagtggtgagcgaggagaagagcctgatgttcatcagacccaagaagtacatcgtgagcagcggcagcgagccccccgagctgggctacgtggacatcagaaccctggccgacagcgtgtgcagatacgacctgaacgacatggacgccgcctggctggagctgaccaacgaggagttcaaggagatgggcatgcccgagctggacgagtacaccatggagagagtgctggaggagttcgagcagagatgctacgacaacatgaaccacgccatcgagaccgaggagggcctgggcatcgagtacgacgaggacgtggtgtgcgacgtgtgccagagccccgacggcgaggacggcaacgagatggtgttctgcgacaagtgcaacatctgcgtgcaccaggcctgctacggcatcctgaaggtgcccgagggcagctggctgtgcagaacctgcgccctgggcgtgcagcccaagtgcctgctgtgccccaagaagggcggcgccatgaagcccaccagaagcggcaccaagtgggtgcacgtgagctgcgccctgtggatccccgaggtgagcatcggcagccccgagaagatggagcccatcaccaaggtgagccacatccccagcagcagatgggccctggtgtgcagcctgtgcaacgagaagttcggcgccagcatccagtgcagcgtgaagaactgcagaaccgccttccacgtgacctgcgccttcgacagaggcctggagatgaagaccatcctggccgagaacgacgaggtgaagttcaagagctactgccccaagcacagcagccacagaaagcccgaggagagcctgggcaagggcgccgcccaggagaacggcgcccccgagtgcagccccagaaaccccctggagcccttcgccagcctggagcagaacagagaggaggcccacagagtgagcgtgagaaagcagaagctgcagcagctggaggacgagttctacaccttcgtgaacctgctggacgtggccagagccctgagactgcccgaggaggtggtggacttcctgtaccagtactggaagctgaagagaaaggtgaacttcaacaagcccctgatcacccccaagaaggacgaggaggacaacctggccaagagagagcaggacgtgctgttcagaagactgcagctgttcacccacctgagacaggacctggagagagtgatgatcgacaccgacaccctgtag

SEQ ID NO: 11779 - DNA, 354 bp, synthetic construct
  source 1..354: mol_type = other DNA; note = Synthetic coding sequence
atggccttcagcggcagagccagaccctgcatcatccccgagaacgaggagatccccagagccgccctgaacaccgtgcacgaggccaacggcaccgaggacgagagagccgtgagcaagctgcagagaagacacagcgacgtgaaggtgtacaaggagttctgcgacttctacgccaagttcaacatggccaacgccctggccagcgccacctgcgagagatgcaagggcggcttcgcccccgccgagaccatcgtgaacagcaacggcgagctgtaccacgagcagtgcttcgtgtgcgcccagtgcttccagcagttccccgagggcctgttctacgaggagagaacctag

SEQ ID NO: 11780 - DNA, 1110 bp, synthetic construct
  source 1..1110: mol_type = other DNA; note = Synthetic coding sequence
atgaaggacacccaggacatccaggaggccagcaaggccatgcagaacaaggtgcacgagcaggaggacaagaacgagaagcagaagcagagagaggacaagctgggcgtgtacagcctggtgcacttcagccccaagatgctgggcagcgtggccaccaccctgcccctgagcagcagcaacagcagcggcatgcccctgggctactacctgagcagcccccagatcagcagagtgaccatcagcaccaccggccagctgaccagcaaggccaccgtgggcagctgcagcagagtggagaacagcctggacgccagccccttcagcgtgcccaagaagcaggacgagagccccatgatcggcgacggcgaggactacttcctgagcctgttcggcgacagcaagaagctgaccgcccacagcaactacacccagaagaccctgaagtacttcagcatgatcctggaggaggtgggccagttcaccagcagcagcctgggcgacgtggagatcgccgaggtgaacgtgaagggcctgttcgtgaagctgatcaacagcagcctggacaaggagatggccatcggcgaccacatcctgcagcagaacgtgaacggccagaccatcagcctgtacagattcctgcccaacatcgtgatgcaggccaacagcaccgtgaccgccatcgcctggtacacccccatccactggaagcaggcctgggagaagctggacgccgacgtggagttcaacagatgcagcgtggtgagccccaccttcagaaagagagtgttccagtggaccgccagcaccgccaccatcaccaaggagaagcaggaccagcccaagaaggacatcagcaactaccaggtggagcaggcccaggtgctgctgaagagagagaaggagatcccccccaccgtgttccccaacagaagcccctggtgccagaacccctacgtgagcgcccacccctactgccccctgatcgagccccacaacaccagcaccgccggcggcagactggacagacagcccagaaccagaagcaccagacccaacagagccagcggcagcaagaagaagaagaccagcgagagccagaagcagtag

SEQ ID NO: 11781 - DNA, 681 bp, synthetic construct
  source 1..681: mol_type = other DNA; note = Synthetic coding sequence
atggaccagagcagagtgctgctgtgggtgaaggccgagcccttcatcgtgggcgccctgcaggtgcccccccccagcaagttcagcctgcactacctgagaaagatcagcacctacgtgcagatcagagccaccgagggcgcctaccccagactgtactggagcacctggagacacatcgcctgcggcaagctgcagctggccaaggacctggcctggctgtacttcgagatcttcgacagcctgagcatgaagacccccgaggagagactggagtggagcgaggtgctgagcaactgcatgagcgaggaggaggtggagaagcagagaaaccagctgagcgtggacaccctgcagttcctgctgttcctgtacatccagcagctgaacaaggtgagcctgagaaccagcctgatcggcgaggagtggcccagccccagaaacaagagccagagccccgacctgaccgagaagagcaactgccacaacaagaactggaacgactacagccaccaggccttcgtgtacgaccacctgagcgacctgctggagctgctgctggaccccaagcagctgaccgccagcttccacagcacccacagcagcctggtgagcagagaggccgtggtggccctgagcttcctgatcgagggcaccatcagcagagccagaaagatctag

SEQ ID NO: 11782 - DNA, 747 bp, synthetic construct
  source 1..747: mol_type = other DNA; note = Synthetic coding sequence
atgaacgacagactgggcgaggacgagagcctgctgatgaagctgtacagcttcctgctgaacgacagccccctgaaccccctgctggccagcttcttcagcaaggtgctgagcatcctgatcagcagaaagcccgagcagatcgtggacttcctgaagaagaagcacgacttcgtggacctgatcatcaagcacatcggcaccagcgccatcatggacctgctgctgagactgctgacctgcatcgagcccccccagcccagacaggacgtgctgaactggctgaacgaggagaagatcatccagagactggtggagatcgtgcaccccagccaggaggaggacagacacagcaacgccagccagagcctgtgcgagatcgtgagactgagcagagaccagatgctgcagatccagaacagcaccgagcccgacctgctgctggccagcggcctgcccgacctgaacggcgtgggccccagaggcctgctggtggacaacatgctgtggagcagactggtggtgagcttcgccagccacggccagggcctggcccccctggtggcccacgtggccagcgtggtgtggacctggtggctgctgcaccccaccgtggccagcgtggtgtggacctggtggctgctgcaccccacccagggcaacagcgtgctgctgcaccccaccgactgctgggagagagccagcggcaccttcctgtggggcatcatcctgttctgcctgagctag

SEQ ID NO: 11783 - DNA, 1869 bp, synthetic construct; identical to SEQ ID NO: 9991
  source 1..1869: mol_type = other DNA; note = Synthetic coding sequence

SEQ ID NO: 11784 - DNA, 4008 bp, synthetic construct
  source 1..4008: mol_type = other DNA; note = Synthetic coding sequence
atggaggagatccccgtgaaggtggccgtgagaatcagacccctgctgtgcaaggaggccctgcacaaccaccaggtgtgcgtgagagtgatccccaacagccagcaggtgatcatcggcagagacagagtgttcaccttcgacttcgtgttcggcaagaacagcacccaggacgaggtgtacaacacctgcatcaagcccctggtgctgagcctgatcgagggctacaacgccaccgtgttcgcctacggccagaccggcagcggcaagacctacaccatcggcggcggccacatcgccagcgtggtggagggccagaagggcatcatccccagagccatccaggagatcttccagagcatcagcgagcaccccagcatcgacttcaacgtgaaggtgagctacatcgaggtgtacaaggaggacctgagagacctgctggagctggagaccagcatgaaggacctgcacatcagagaggacgagaagggcaacaccgtgatcgtgggcgccaaggagtgccacgtggagagcgccggcgaggtgatgagcctgctggagatgggcaacgccgccagacacaccggcaccacccagatgaacgagcacagcagcagaagccacgccatcttcaccatcagcatctgccaggtgcacaagaacatggaggccgccgaggacggcagctggtacagccccagacacatcgtgagcaagttccacttcgtggacctggccggcagcgagagagtgaccaagaccggcaacaccggcgagagattcaaggagagcatccagatcaacagcggcctgctggccctgggcaacgtgatcagcgccctgggcgaccccagaagaaagagcagccacatcccctacagagacgccaagatcaccagactgctgaaggacagcctgggcggcagcgccaagaccgtgatgatcacctgcgtgagccccagcagcagcaacttcgacgagagcctgaacagcctgaagtacgccaacagagccagaaacatcagaaacaagcccaccgtgaacttcagccccgagagcgacagaatcgacgagatggagttcgagatcaagctgctgagagaggccctgcagagccagcaggccggcgtgagccagaccacccagatcaacagagagggcagccccgacaccaacagaatccacagcctggaggagcaggtggcccagctgcagggcgagtgcctgggctaccagtgctgcgtggaggaggccttcaccttcctggtggacctgaaggacaccgtgagactgaacgagaagcagcagcacaagctgcaggagtggttcaacatgatccaggaggtgagaaaggccgtgctgaccagcttcagaggcatcggcggcaccgccagcctggaggagggcccccagcacgtgaccgtgctgcagctgaagagagagctgaagaagtgccagtgcgtgctggccgccgacgaggtggtgttcaaccagaaggagctggaggtgaaggagctgaagaaccaggtgcagatgatggtgcaggagaacaagggccacgccgtgagcctgaaggaggcccagaaggtgaacagactgcagaacgagaagatcatcgagcagcagctgctggtggaccagctgagcgaggagctgaccaagctgaacctgagcgtgaccagcagcgccaaggagaactgcggcgacggccccgacgccagaatccccgagagaagaccctacaccgtgcccttcgacacccacctgggccactacatctacatccccagcagacaggacagcagaaaggtgcacaccagcccccccatgtacagcctggacagaatcttcgccggcttcagaaccagaagccagatgctgctgggccacatcgaggagcaggacaaggtgctgcactgccagttcagcgacaacagcgacgacgaggagagcgagggccaggagaagagcggcaccagatgcagaagcagaagctggatccagaagcccgacagcgtgtgcagcctggtggagctgagcgacacccaggacgagacccagaagagcgacctggagaacgaggacctgaagatcgactgcctgcaggagagccaggagctgaacctgcagaagctgaagaacagcgagagaatcctgaccgaggccaagcagaagatgagagagctgaccatcaacatcaagatgaaggaggacctgatcaaggagctgatcaagaccggcaacgacgccaagagcgtgagcaagcagtacagcctgaaggtgaccaagctggagcacgacgccgagcaggccaaggtggagctgatcgagacccagaagcagctgcaggagctggagaacaaggacctgagcgacgtggccatgaaggtgaagctgcagaaggagttcagaaagaagatggacgccgccaagctgagagtgcaggagatccagctgaagaccggccaggaggagggcctgaagcccaaggccgaggacctggacgcctgcaacctgaagagaagaaagggcagcttcggcagcatcgaccacctgcagaagctggacgagcagaagaagtggctggacgaggaggtggagaaggtgctgaaccagagacaggagctggaggagctggaggccgacctgaagaagagagaggccatcgtgagcaagaaggaggccctgctgcaggagaagagccacctggagaacaagaagctgagaagcagccaggccctgaacaccgacagcctgaagatcagcaccagactgaacctgctggagcaggagctgagcgagaagaacgtgcagctgcagaccagcaccgccgaggagaagaccaagatcagcgagcaggtggaggtgctgcagaaggagaaggaccagctgcagaagagaagacacaacgtggacgagaagctgaagaacggcagagtgctgagccccgaggaggagcacgtgctgttccagctggaggagggcatcgaggccctggaggccgccatcgagtacagaaacgagagcatccagaacagacagaagagcctgagagccagcttccacaacctgagcagaggcgaggccaacgtgctggagaagctggcctgcctgagccccgtggagatcagaaccatcctgttcagatacttcaacaaggtggtgaacctgagagaggccgagagaaagcagcagctgtacaacgaggagatgaagatgaaggtgctggagagagacaacatggtgagagagctggagagcgccctggaccacctgaagctgcagtgcgacagaagactgaccctgcagcagaaggagcacgagcagaagatgcagctgctgctgcaccacttcaaggagcaggacggcgagggcatcatggagaccttcaagacctacgaggacaagatccagcagctggagaaggacctgtacttctacaagaagaccagcagagaccacaagaagaagctgaaggagctggtgggcgaggccatcagaagacagctggcccccagcgagtaccaggaggccggcgacggcgtgctgaagcccgagggcggcggcatgctgagcgaggagctgaagtgggccagcagacccgagagcatgaagctgagcggcagagagagagagatggacagcagcgccagcagcctgagaacccagcccaacccccagaagctgtgggaggacatccccgagctgccccccatccacagcagcctggccccccccagcggccacatgctgggcaacgagaacaagaccgagaccgacgacaaccagttcaccaagagccacagcagactgagcagccagatccaggtggtgggcaacgtgggcagactgcacggcgtgacccccgtgaagctgtgcagaaaggagctgagacagatcagcgccctggagctgagcctgagaagaagcagcctgggcgtgggcatcggcagcatggccgccgacagcatcgaggtgagcagaaagcccagagacctgaagacctag

SEQ ID NO: 11785 - DNA, 2745 bp, synthetic construct
  source 1..2745: mol_type = other DNA; note = Synthetic coding sequence
atggaggagagaatcaccaccctggagaagagatacctggccgcccagagagaggccaccagcatccacgacctgaacgacaagctggagaacgagctggccaacaaggagagcctgcacagacagtgcgaggagaaggccagacacctgcaggagctgctggaggtggccgagcagaagctgcagcagaccatgagaaaggccgagaccctgcccgaggtggaggccgagctggcccagagaatcgccgccctgaccaaggccgaggagagacacggcaacatcgaggagcacctgagacagctggagggccagctggaggagaagaaccaggagctggccagagtgagacagagagagaagatgaacgaggaccacaacaagagactgagcgacaccgtggacagactgctgagcgagagcaacgagagactgcagctgcacctgaaggagagaatggccgccctggaggagaagaacaccctgatccaggagctggagagcagccagagacagatcgaggagcagcaccaccacaagggcagactgagcgaggagatcgagaagctgagacaggaggtggaccagctgaagggcagaggcggccccttcgtggacggcgtgcacagcagaagccacatgggcagcgccgccgacgtgagattcagcctgggcaccaccacccacgccccccccggcgtgcacagaagatacagcgccctgagagaggagagcgccaaggactgggagaccagccccctgcccggcatgctggcccccgccgccggccccgccttcgacagcgaccccgagatcagcgacgtggacgaggacgagcccggcggcctggtgggcagcgccgacgtggtgagccccagcggccacagcgacgcccagaccctggccatgatgctgcaggagcagctggacgccatcaacgaggagatcagaatgatccaggaggagaaggagagcaccgagctgagagccgaggagatcgagaccagagtgaccagcggcagcatggaggccctgaacctgaagcagctgagaaagagaggcagcatccccaccagcctgaccgccctgagcctggccagcgccagcccccccctgagcggcagaagcacccccaagctgaccagcagaagcgccgcccaggacctggacagaatgggcgtgatgaccctgcccagcgacctgagaaagcacagaagaaagctgctgagccccgtgagcagagaggagaacagagaggacaaggccaccatcaagtgcgagaccagcccccccagcagccccagaaccctgagactggagaagctgggccaccccgccctgagccaggaggagggcaagagcgccctggaggaccagggcagcaaccccagcagcagcaacagcagccaggacagcctgcacaagggcgccaagagaaagggcatcaagagcagcatcggcagactgttcggcaagaaggagaagggcagactgatccagctgagcagagacggcgccaccggccacgtgctgctgaccgacagcgagttcagcatgcaggagcccatggtgcccgccaagctgggcacccaggccgagaaggacagaagactgaagaagaagcaccagctgctggaggacgccagaagaaagggcatgcccttcgcccagtgggacggccccaccgtggtgagctggctggagctgtgggtgggcatgcccgcctggtacgtggccgcctgcagagccaacgtgaagagcggcgccatcatgagcgccctgagcgacaccgagatccagagagagatcggcatcagcaacgccctgcacagactgaagctgagactggccatccaggagatggtgagcctgaccagccccagcgccccccccaccagcagaaccagcagcggcaacgtgtgggtgacccacgaggagatggagaccctggagaccagcaccaagaccgacagcgaggagggcagctgggcccagaccctggcctacggcgacatgaaccacgagtggatcggcaacgagtggctgcccagcctgggcctgccccagtacagaagctacttcatggagtgcctggtggacgccagaatgctggaccacctgaccaagaaggacctgagagtgcacctgaagatggtggacagcttccacagaaccagcctgcagtacggcatcatgtgcctgaagagactgaactacgacagaaaggagctggagaagagaagagaggagagccagcacgagatcaaggacgtgctggtgtggaccaacgaccaggtggtgcactgggtgcagagcatcggcctgagagactacgccggcaacctgcacgagagcggcgtgcacggcgccctgctggccctggacgagaacttcgaccacaacaccctggccctgatcctgcagatccccacccagaacacccaggccagacaggtgatggagagagagttcaacaacctgctggccctgggcaccgacagaaagctggacgacggcgacgacaaggtgttcagaagagcccccagctggagaaagagattcagacccagagagcaccacggcagaggcggcatgctgagcgccagcgccgagaccctgcccgccggcttcagagtgagcaccctgggcaccctgcagcccccccccgccccccccaagaagatcatgcccgaggcccacagccactacctgtacggccacatgctgagcgccttcagagactag

SEQ ID NO: 11786 - DNA, 1494 bp, synthetic construct
  source 1..1494: mol_type = other DNA; note = Synthetic coding sequence
gacgtgggcggcgacagaccctgggacagcggcaacacccagctgccccccagaaaccccgtgaaggccaacgccatgttcggcgccggcgacgaggacgacaccgacttcctgagccccagcggcggcgccagactggccagcctgttcggcctggaccaggccgccgccggccacggcaacgagttcttccagtacaccgcccccaagcagcccaagaagggccagggcaccgccgccaccggcaaccaggccacccccaagaccgcccccgccaccatgagcacccccaccatcctggtggccaccgccgtgcacgcctacagatacaccaacggccagtacgtgaagcagggcaagttcggcgccgccgtgctgggcaaccacaccgccagagagtacagaatcctgctgtacatcagccagcagcagcccgtgaccgtggccagaatccacgtgaacttcgagctgatggtgagacccaacaactacagcaccttctacgacgaccagagacagaactggagcatcatgttcgagagcgagaaggccgccgtggagttcaacaagcaggtgtgcatcgccaagtgcaacagcaccagcagcctggacgccgtgctgagccaggacctgatcgtggccgacggccccgccgtggaggtgggcgacagcctggaggtggcctacaccggctggctgttccagaaccacgtgctgggccaggtgttcgacagcaccgccaacaaggacaagctgctgagactgaagctgggcagcggcaaggtgatcaagggctgggaggacggcatgctgggcatgaagaagggcggcaagagactgctgatcgtgccccccgcctgcgccgtgggcagcgagggcgtgatcggctggacccaggccaccgacagcatcctggtgttcgaggtggaggtgagaagagtgaagttcgccagagacagcggcagcgacggccacagcgtgagcagcagagacagcgccgcccccagccccatccccggcgccgacaacctgagcgccgaccccgtggtgagcccccccaccagcatccccttcaagagcggcgagcccgccctgagaaccaagagcaacagcctgagcgagcagctggccatcaacaccagccccgacgccgtgaaggccaagctgatcagcagaatggccaagatgggccagcccatgctgcccatcctgcccccccagctggacagcaacgacagcgagatcgaggacgtgaacaccctgcagggcggcggccagcccgtggtgacccccagcgtgcagcccagcctgcaccccgcccaccccgccctgccccagatgaccagccaggccccccagcccagcgtgaccggcctgcaggcccccagcgccgccctgatgcaggtgagcagcctggacagccacagcgccgtgagcggcaacgcccagagcttccaggtgaccttctacaacagaatcaactacatcctgtag

SEQ ID NO: 11787 - DNA, 462 bp, synthetic construct
  source 1..462: mol_type = other DNA; note = Synthetic coding sequence
atgaacctggccgagatctgcgacaacgccaagaagggcagagagtacgccctgctgggcaactacgacagcagcatggtgtactaccagggcgtgatgcagcagatccagagacactgccagagcgtgagagaccccgccatcaagggcaagtggcagcaggtgagacaggagctgctggaggagtacgagcaggtgaagagcatcgtgagcaccctggagagcttcaagatcgacaagccccccgacttccccgtgagctgccaggacgagcccttcagagaccccgccgtgtggcccccccccgtgcccgccgagcacagagcccccccccagatcagaagacccaacagagaggtgagacccctgagaaaggagatggccggcgtgggcgccagaggccccgtgggcagagcccaccccatcagcaagagcgagaagcccagcaccagcagagactag

SEQ ID NO: 11788 - DNA, 627 bp, synthetic construct
  source 1..627: mol_type = other DNA; note = Synthetic coding sequence
atgttccaggtgcccgacagcgagggcggcagagccggcagcagagccatgaagccccccggcggcgagagcagcaacctgttcggcagccccgaggaggccacccccagcagcagacccaacagaatggccagcaacatcttcggccccaccgaggagccccagaacatccccaagagaaccaacccccccggcggcaagggcagcggcatcttcgacgagagcacccccgtgcagaccagacagcacctgaacccccccggcggcaagaccagcgacatcttcggcagccccgtgaccgccaccagcagactggcccaccccaacaagcccaccagaaacagcagagacagagtggccatgttcagcttccccttcgcccagatgagcggcgtgggcagaggcctggtgctgtgcgagcccggctgcagcgccagccccggcagacacgacagctgcctggagaccagagccttccagatggccggcagatgcctgtgcggcgacgagatgggccacccctggcccagcctgatgtgcagccccggcctgagaggcaccggcagaggcgtgagagtgggcagatggggcagagcctggagcctggaccagcagcccgccagctag

SEQ ID NO: 11789 - DNA, 591 bp, synthetic construct
  source 1..591: mol_type = other DNA; note = Synthetic coding sequence
atgcccttcagcaaggagaagtacatcctggacagcagccccgagaagctgcacaaggagctggaggaggagctgaagctgagcagcaccgacctgagaagccacgcctggtaccacggcagaatccccagagaggtgagcgagaccctggtgcagagaaacggcgacttcctgatcagagacagcctgaccagcctgggcgactacgtgctgacctgcagatggagaaaccaggccctgcacttcaagatcaacaaggtggtggtgaaggccggcgagagctacacccacatccagtacctgttcgagcaggagagcttcgaccacgtgcccgccctggtgagataccacgtgggcagcagaaaggccgtgagcgagcagagcggcgccatcatctactgccccgtgaacagaaccttccccctgagatacctggaggccagctacggcctgggccagggcagcagcaagcccgccagccccgtgagccccagcggccccaagggcagccacatgaagagaagaagcgtgaccatgaccgacggcctgaccgccgacaaggtgaccagaagcgacggctgccccacctag

SEQ ID NO: 11790 - DNA, 1986 bp, synthetic construct
  source 1..1986: mol_type = other DNA; note = Synthetic coding sequence
atgcaggccaacggcgccggcggcggcggcggcggcggcggcggcggcggcggcggcggcggcggcggcggcggccagggccagacccccgagctggcctgcctgagcgcccagaacggcgagagcagccccagcagcagcagcagcgccggcgacctggcccacgccaacggcctgctgcccagcgcccccagcgccgccagcaacaacagcaacagcctgaacgtgaacaacggcgtgcccggcggcgccgccgccgccagcagcgccaccgtggccgccgccagcgccaccaccgccgccagcagcagcctggccacccccgagctgggcagcagcctgaagaagaagaagagactgagccagagcgacgaggacgtgatcagactgatcggccagcacctgaacggcctgggcctgaaccagaccgtggacctgctgatgcaggagagcggctgcagactggagcaccccagcgccaccaagttcagaaaccacgtgatggagggcgactgggacaaggccgagaacgacctgaacgagctgaagcccctggtgcacagcccccacgccatcgtggtgagaggcgccctggagatcagccagaccctgctgggcatcatcgtgagaatgaagttcctgctgctgcagcagaagtacctggagtacctggaggacggcaaggtgctggaggccctgcaggtgctgagatgcgagctgacccccctgaagtacaacaccgagagaatccacgtgctgagcggctacctgatgtgcagccacgccgaggacctgagagccaaggccgagtgggagggcaagggcaccgccagcagaagcaagctgctggacaagctgcagacctacctgccccccagcgtgatgctgccccccagaagactgcagaccctgctgagacaggccgtggagctgcagagagacagatgcctgtaccacaacaccaagctggacaacaacctggacagcgtgagcctgctgatcgaccacgtgtgcagcagaagacagttcccctgctacacccagcagatcctgaccgagcactgcaacgaggtgtggttctgcaagttcagcaacgacggcaccaagctggccaccggcagcaaggacaccaccgtgatcatctggcaggtggaccccgacacccacctgctgaagctgctgaagaccctggagggccacgcctacggcgtgagctacatcgcctggagccccgacgacaactacctggtggcctgcggccccgacgactgcagcgagctgtggctgtggaacgtgcagaccggcgagctgagaaccaagatgagccagagccacgaggacagcctgaccagcgtggcctggaaccccgacggcaagagattcgtgaccggcggccagagaggccagttctaccagtgcgacctggacggcaacctgctggacagctgggagggcgtgagagtgcagtgcctgtggtgcctgagcgacggcaagaccgtgctggccagcgacacccaccagagaatcagaggctacaacttcgaggacctgaccgacagaaacatcgtgcaggaggaccaccccatcatgagcttcaccatcagcaagaacggcagactggccctgctgaacgtggccacccagggcgtgcacctgtgggacctgcaggacagagtgctggtgagaaagtaccagggcgtgacccagggcttctacaccatccacagctgcttcggcggccacaacgaggacttcatcgccagcggcagcgaggaccacaaggtgtacatctggcacaagagaagcgagctgcccatcgccgagctgaccggccacaccagaaccgtgaactgcgtgagctggaacccccagatccccagcatgatggccagcgccagcgacgacggcaccgtgagaatctggggccccgcccccttcatcgaccaccagaacatcgaggaggagtgcagcagcatggacagctag

SEQ ID NO: 11791 - DNA, 1113 bp, synthetic construct
  source 1..1113: mol_type = other DNA; note = Synthetic coding sequence
atggagaagaagaagatggtgacccagggcaaccaggagcccaccaccacccccgacgccatggtgcagcccttcaccaccatccccttccccccccccccccagaacggcatccccaccgagtacggcgtgccccacacccaggactacgccggccagaccggcgagcacaacctgaccctgtacggcagcacccaggcccacggcgagcagagcagcaacagccccagcacccagaacggcagcctgaccaccgagggcggcgcccagaccgacggccagcagagccagacccagagcagcgagaacagcgagagcaagagcacccccaagagactgcacgtgagcaacatccccttcagattcagagaccccgacctgagacagatgttcggccagttcggcaagatcctggacgtggagatcatcttcaacgagagaggcagcaagggcttcggcttcgtgaccttcgagaacagcgccgacgccgacagagccagagagaagctgcacggcaccgtggtggagggcagaaagatcgaggtgaacaacgccaccgccagagtgatgaccaacaagaagatggtgaccccctacgccaacggctggaagctgagccccgtggtgggcgccgtgtacggccccgagctgtacgccgccagcagcttccaggccgacgtgagcctgggcaacgacgccgccgtgcccctgagcggcagaggcggcatcaacacctacatccccctgatcagcctgcccctggtgcccggcttcccctaccccaccgccgccaccaccgccgccgccttcagaggcgcccacctgagaggcagaggcagaaccgtgtacggcgccgtgagagccgtgccccccaccgccatccccgcctaccccggcgtggacatgcagcccaccgacatgcacagcctgctgctgcagccccagccccccctgctgcagcccctgcagcccctgaccgtgaccgtgatggccggctgcacccagcccacccccaccatgcccctgcccctgcccctggccatggagctggccctgtggagagtgtacaccgaggtggccaccgccgacctgccccccaccgaggtgacctag

SEQ ID NO: 11792 - DNA, 348 bp, synthetic construct
  source 1..348: mol_type = other DNA; note = Synthetic coding sequence
atgccccacctgcccctggccagcttcagaccccccttctggggcctgagacacagcagaggcctgcccagattccacagcgtgagcacccagagcgagccccacggcagccccatcagcagaagaaacagagaggccaagcagaagagactgagagagaagcaggccaccctggaggccgagatcgccggcgagagcaagagccccgccgagagcatcaaggcctggagacccaaggagctggtgctgtacgagatccccaccaagcccggcgagaagaaggacgtgagcggccccctgccccccgcctacagccccagatacgtggaggccgcctggtacccctag

SEQ ID NO: 11793 - DNA, 3039 bp, synthetic construct
  source 1..3039: mol_type = other DNA; note = Synthetic coding sequence
atgctgctgaagagcatcttcatcgtgtacatcttcttctacagcatcagcgagctgagcctggacagcaccctgcacgccgtgaacctgcactgcaacaacatcagcaagatcgaggccatcgaccacatctggaacctgcagcacctggacctgagcagcaaccagatcagcagaatcgagggcctgaacaccctgaccaagctgtgcaccctgaacctgagctgcaacctgatcaccaaggtggagggcctggaggagctgatcaacctgaccagactgaacgtgagctacaaccacatcgacgacctgagcggcctgatccccctgcacggcatcaagcacaagctgagatacatcgacctgcacagcaacagaatcgacagcatccaccacctgctgcagtgcatggtgggcctgcacttcctgaccaacctgatcctggagaaggacggcgacgacaaccccgtgtgcagactgcccggctacagagccgtgatcctgcagaccctgccccagctgagaatcctggactgcaagaacatcttcggcgagcccgtgaacctgaccgagatcaacagcagccagctgcagtgcctggagggcctgctggacaacctggtgagcagcgacagccccctgaacatcagcgaggacgagatcatcgacagaatgcccgtgatcaccgcccccatcgacgagctggtgcccctggagcagttcgccagcacccccagcgacgccgtgctgaccagcttcatgagcgtgtgccagagcagcgagcccgagaagaacaaccacgagaacgacctgcagaacgagatcaagctgcagaagctggacgaccagatcctgcagctgctgaacgagaccagcaacagcatcgacaacgtgctggagaaggaccccagacccaagagagacaccgacatcaccagcgagagcgactacggcaacagaaaggagtgcaacagaaaggtgcccagaagaagcaagatcccctacgacgccaagaccatccagaccatcaagcaccacaacaagaactacaacagcttcgtgagctgcaacagaaagatgaagcccccctacctgaaggagctgtacgtgagcagcagcctggccaactgccccatgctgcaggagagcgagaagcccaagaccgagatcatcaaggtggaccagagccacagcgaggacaacacctaccagagcctggtggagcagctggaccaggagagagagaagagatggagagccgagcaggccgagaacaagctgatggactacatcgacgagctgcacaagcacgccaacgagaaggaggacatccacagcctggccctgctgaccaccgacagactgaaggagatcatcttcagagagagaaacagcaagggccagctggaggtgatggtgcacaagctgcagaacgagatcaagaagctgaccgtggagctgatgaaggccaaggaccagcaggaggaccacctgaagcacctgagaaccctggagaagaccctggagaagatggagagacagaagagacagcagcaggccgcccagatcagactgatccaggaggtggagctgaaggccagcgccgccgacagagagatctacctgctgagaaccagcctgcacagagagagagagcaggcccagcagctgcaccagctgctggccctgaaggagcaggagcacagaaaggagctggagaccagagagttcttcaccgacgccgacttccaggacgccctggccaaggagatcgccaaggaggagaagaagcacgagcagatgatcaaggagtaccaggagaagatcgacgtgctgagccagcagtacatggacctggagaacgagttcagaatcgccctgaccgtggaggccagaagattccaggacgtgaaggacggcttcgagaacgtggccaccgagctggccaagagcaagcacgccctgatctgggcccagagaaaggagaacgagagcagcagcctgatcaaggacctgacctgcatggtgaaggagcagaagaccaagctggccgaggtgagcaagctgaagcaggagaccgccgccaacctgcagaaccagatcaacaccctggagatcctgatcgaggacgacaagcagaagagcatccagatcgagctgctgaagcacgagaaggtgcagctgatcagcgagctggccgccaaggagagcctgatcttcggcctgagaaccgagagaaaggtgtggggccacgagctggcccagcagggcagcagcctggcccagaacagaggcaagctggaggcccagatcgagagcctgagcagagagaacgagtgcctgagaaagaccaacgagagcgacagcgacgccctgagaatcaagtgcaagatcatcgacgaccagaccgagaccatcagaaagctgaaggactgcctgcaggagaaggacgagcacatcaagagactgcaggagaagatcaccgagatcgagaagtgcacccaggagcagctggacgagaagagcagccagctggacgaggtgctggagaagctggagagacacaacgagagaaaggagaagctgaagcagcagctgaagggcaaggaggtggagctggaggagatcagaaaggcctacagcaccctgaacagaaagtggcacgacaagggcgagctgctgtgccacctggagacccaggtgaaggaggtgaaggagaagttcgagaacaaggagaagaagctgaaggccgagagagacaagagcatcgagctgcagaagaacgccatggagaagctgcacagcatggacgacgccttcaagagacaggtggacgccatcgtggaggcccaccaggccgagatcgcccagctggccaacgagaagcagaagtgcatcgacagcgccaacctgaaggtgcaccagatcgagaaggagatgagagagctgctggaggagacctgcaagaacaagaagaccatggaggccaagatcaagcagctggccttcgccctgaacgagatccagcaggacatgtag

SEQ ID NO: 11794 - DNA, 4665 bp, synthetic construct
  source 1..4665: mol_type = other DNA; note = Synthetic coding sequence
atgagcgccaccagctggttcctggtgagcagcagcggcgccagacacagactgcccagagagctgatcttcgtgggcagagaggagtgcgagctgatgctgcagagcagaagcgtggacaagcagcacgccgtgatcaactacgaccaggacagagacgagcactgggtgaaggacctgggcagcctgaacggcaccttcgtgaacgacatgagaatccccgaccagaagtacgtgaccctgaagctgaacgacgtgatcagattcggctacgacagcaacatgtacgtgctggagagagtgcagcacagagtgcccgaggaggccctgaagcacgagaagtacaccagccagctgcaggtgagcgtgaagggcctggcccccaagagaagcgaggccctgcccgagcacaccccctactgcgaggccagcaaccccagacccgagaagggcgacagaagacccggcaccgaggccgccagctacagaacccccctgtacggccagcccagctggtggggcgaggacgacggcagcaccctgcccgacgcccagagacagggcgagccctaccccgagagacccaagggccccgtgcagcaggacggcgagctgcacggcttcagagcccccgccgagccccagggctgcagcttcagaagagagcccagctacttcgagatccccaccaaggagaccccccagcccagccagccccccgaggtgcccgcccacgagatgcccaccaaggacgccgaggccggcggcggcggcgccgcccccgtggtgcagagccacgccagcttcaccatcgagttcgacgactgcagccccggcaagatgaagatcaaggaccacatcaccaagttcagcctgagacagagaagaccccccggcaaggaggccacccccggcgagatggtgagcgccgagaccaaggtggccgactggctggtgcagaacgaccccagcctgctgcacagagtgggccccggcgacgacagacacagcaccaagagcgacctgcccgtgcacaccagaaccctgaagggccacaagcacgaggacggcacccagagcgacagcgaggaccccctggccaaggccgccagcgccgccggcgtgcccctggaggccagcggcgagcaggtgagactgcagagacagatcaagagagacccccaggagctgctgcacaaccagcaggccttcgtgatcgagttcttcgacgaggacacccccagaaagaagagaagccagagcttcacccacagccccagcggcgaccccaaggccgacaagagaagaggccccacccccgccgacagagacagacccagcgtgcccgcccccgtgcaggccggcggcagaagcagcggcccccagagagccggcagcctgaagagagagaagaccgaggagagactgggcagccccagccccgccagcagaacccccgccagacccttcggcagcgtgggcagaagaagcagactggcccaggacttcatggcccagtgcctgagagagagcagccccgccgccagacccagccccgagaaggtgccccccgtgctgcccgcccccctgaccccccacggcaccagccccgtgggcccccccacccccccccccgcccccaccgacccccagctgaccaaggccagaaagcaggaggaggacgacagcctgagcgacgccggcacctacaccatcgagaccgaggcccaggacaccgaggtggaggaggccagaaagatgatcgaccaggtgttcggcgtgctggagagccccgagctgagcagagccagcagcgccaccttcagacccgtgatcagaggcgacagagacgagagcgacgacggcggcgtggcccagagaatggccctgctgcaggagttcgccagcagacccctgggcgccgccccccaggccgagcaccagggcctgcccgtgcccggcagccccggcggccagaagtgggtgagcagatgggccagcctggccgacagctacagcgaccccggcctgaccgaggacggcctgggcagaagaggcggcgagcccgagggcagcctgcccgtgagaatgagaagaagactgccccagctgcccagcgagagagccgacagccccgccggccccgagagcagcagaagaagcggccccggcccccccgagctggacagcgagcagcccagcagactgttcggccaggaggagctggaccccgacagcctgagcgacgccagcggcagcgacggcggcagaggccccgagcccggcgtggagccccaggacagcagaagaagaagcccccaggagggccccacctggagcagaggcagaagaagccccagagcccccggcgagcccacccccgccagcttcttcatcggcgaccagaacggcgacgccgtgctgagcagaaagcccctggccgcccccggcgacggcgagggcctgggccagaccgcccagcccagcccccccgccagagacggcgtgtacgtgagcgccaacggcagaatggtgatccagctgagacccggcagaagccccgagcccgacggccccgcccccgccttcctgagacaggagagcttcaccaaggagcccgccagcggcccccccgcccccggcaagcccccccacatcagcagccaccccctgctgcaggacctggccgccaccagagccgccagaatggacttccacagccaggacacccacctgatcctgaaggagaccgagaccgccctggccgccctggaggccagactgctgagcaacagcgtggacgccgagtgcgagggcggcagcacccccagaccccccgaggacgccctgagcggcgacagcgacgtggacaccgccagcaccgtgagcctgagaagcggcaagagcggccccagccccaccaccccccagcccctgagagcccagaaggagatgagccccagcccccccgccgcccaggaccccggcggcaccgccctggtgagcgccagagagcagagcagcgagagacagcaccaccccctgggccccaccgacatgggcagaggcgagcccgtgagaagaagcgccatcagaagaggccacagacccagaggcagcctggactggcccagcgaggagagaggccccgtgctggcccacctgcccagcagcgacgtgatggccagcaaccacgagacccccgaggccaccggcgccggcagactgggcagcagaagaaagcccgccgcccccccccccagccccgccgccagagaggagcagagcagaagcagcgccagcagccagaagggcccccaggccctgaccagaagcaacagcctgagcacccccagacccaccagagccagcagactgagaagagccagactgggcgacgccagcgacaccgaggccgccgacggcgagagaggcagcctgggcaaccccgagcccgtgggcagacccgccgccgagcaggccaagaagctgagcagactggacatcctggccatgcccagaaagagagccggcagcttcaccggcaccagcgaccccgaggccgcccccgccagaaccagcttcagcggcagaagcgtggagctgtgctgcgccagcagaaagcccaccatggccgaggccagagccgtgagcagaaaggccgccaacaccgccaccaccaccggccccagacagcccttcagcagagccagaagcggcagcgccagatacaccagcaccacccagacccccagagccggcagcagcagcagagccagaagcagagcccccggccccagagacaccgacgacgacgaggaggagcccgacccctacggcttcatcgtgcagaccgccgagatcgccgagatcgccagactgagccagaccctggtgaaggacgtggccatcctggcccaggagatccacgacgtggccggcgacggcgacaccctgggcagcagcgagcccgcccacagcgccagcctgagcaacatgcccagcacccccgccagcaccatcagcgccagagaggagctggtgcagagaatccccgaggccagcctgaacttccagaaggtgccccccggcagcctgaacagcagagacttcgaccagaacatgaacgacagctgcgaggacgccctggccaacaagaccagacccagaaacagagaggaggtgatcttcgacaacctgatgctgaaccccgtgagccagctgagccaggccatcagagagaacaccgagcacctggccgagaagatgaagatcctgttccagaacaccggcagagcctgggaggacctggaggccagaatcaacgccgagaacgaggtgcccatcctgaagaccagcaacaaggagatcagcagcatcctgaaggagctgagaagagtgcagaagcagctggaggtgatcaacgccatcgtggaccccagcggcagcctggacctgctgaccggcaacagaagcctggccagcagcgcccagcccggcctgggcaagggcagagtggccgcccagagcccccccagccccgccagcgccgaggccctgctgcccgccctgcccctgagaaacttcccccagagagccagctgcggcccccccagcctgcccgaccccaccttcctgcccgacgccgagagattcctgatctag

SEQ ID NO: 11795 - DNA, 696 bp, synthetic construct
  source 1..696: mol_type = other DNA; note = Synthetic coding sequence
atcatcctgctgctggtgcccagcgaggagaccgacgagaacgacctgatcctggaggtgaccgccggcgtgggcggcggcctgagacacgccagcgccagcatcggcggcagcgaggcctacagacacatgaagttcgagggcggcgtgcacagagtgcagagagtgcccaagaccgagaagcagggcagagtgcacaccagcaccatgaccgtggccatcctgccccagcccaccgagatcaacctggtgatcaaccccaaggacctgagaatcgacaccaagagagccagcggcgccggcggccagcacgtgaacaccaccgacagcgccgtgagaatcgtgcacctgcccaccggcgtggtgagcgagtgccagcaggagagaagccagctgaagaacaaggagctggccatgaccaagctgagagccaagctgtacagcatgcacctggaggaggagatcaacaagagacagaacgccagaaagatccagatcggcagcaagggcagaagcgagaagatcagaacctacaacttcccccagaacagagtgaccgaccacagaatcaacaagaccctgcacgacctggagaccttcatgcagggcgactacctgctggacgagctggtgcagagcctgaaggagtacgccgactacgagagcctggtggagatcatcagccagaaggtgtag

SEQ ID NO: 11796 - DNA, 483 bp, synthetic construct; identical to SEQ ID NO: 10977
  source 1..483: mol_type = other DNA; note = Synthetic coding sequence

SEQ ID NO: 11797 - DNA, 423 bp, synthetic construct
  source 1..423: mol_type = other DNA; note = Synthetic coding sequence
atgcagttcggcgagctgctggccgccgtgagaaaggcccaggccaacgtgatgctgttcctggaggagaaggagcaggccgccctgagccaggccaacggcatcaaggcccacctggagtacagaagcgccgagatggagaagagcaagcaggagctggagaccatggccgccatcagcaacaccgtgcagttcctggagatgtgcatgaccagcagaagcaccagaacccagcacaccagcatcagcggctgcagaagaagaaccgccagaagccccacccccagacccggcagcatccccaccagaaccagccccgccggcagctgcaccggcggcagatgctgccccagcagagtgtgcacctgcaccggcaccatcctgagatggagaagcagcggccaggcccccatgctggcctag

SEQ ID NO: 11798 - DNA, 819 bp, synthetic construct
  source 1..819: mol_type = other DNA; note = Synthetic coding sequence
atggccagcagcaacaccgtgctgatgagactggtggccagcgcctacagcatcgcccagaaggccggcatgatcgtgagaagagtgatcgccgagggcgacctgggcatcgtggagaagacctgcgccaccgacctgcagaccaaggccgacagactggcccagatgagcatctgcagcagcctggccagaaagttccccaagctgaccatcatcggcgaggagctggtggtgtgggtggaccccctggacggcaccaaggagtacaccgagggcctgctggacaacgtgaccgtgctgatcggcatcgcctacgagggcaaggccatcgccggcgtgatcaaccagccctactacaactacgaggccggccccgacgccgtgctgggcagaaccatctggggcgtgctgggcctgggcgccttcggcttccagctgaaggaggtgcccgccggcaagcacatcatcaccaccaccagaagccacagcaacaagctggtgaccgactgcgtggccgccatgaaccccgacgccgtgctgagagtgggcggcgccggcaacaagatcatccagctgatcgagggcaaggccagcgcctacgtgttcgccagccccggctgcaagaagtgggacacctgcgcccccgaggtgatcctgcacgccgtgggcggcaagctgaccgacatccacggcaacgtgctgcagtaccacaaggacgtgaagcacatgaacagcgccggcgtgctggccaccctgagaaactacgactactacgccagcagagtgcccgagagcatcaagaacgccctggtgccctag

SEQ ID NO: 11799 - DNA, 606 bp, synthetic construct
  source 1..606: mol_type = other DNA; note = Synthetic coding sequence
atggagagcaaccacaagagcggcgacggcctgagcggcacccagaaggaggccgccctgagagccctggtgcagagaaccggctacagcctggtgcaggagaacggccagagaaagtacggcggccccccccccggctgggacgccgccccccccgagagaggctgcgagatcttcatcggcaagctgcccagagacctgttcgaggacgagctgatccccctgtgcgagaagatcggcaagatctacgagatgagaatgatgatggacttcaacggcaacaacagaggctacgccttcgtgaccttcagcaacaaggtggaggccaagaacgccatcaagcagctgaacaactacgagatcagaaacggcagactgctgggcgtgtgcgccagcgtggacaactgcagactgttcgtgggcggcatccccaagaccaagaagagagaggagatcctgagcgagatgaagaaggtgaccgagggcgtggtggacgtgatcgtgtaccccagcgccgccgacaagaccaagaacagaggcttcgccttcgtggagtacgagagccacagagccgccgccatggccagaagaaagctgctgccctag

SEQ ID NO: 11800 - DNA, 1905 bp, synthetic construct
  source 1..1905: mol_type = other DNA; note = Synthetic coding sequence
atggccctgagcaagagagagctggacgagctgaagccctggatcgagaagaccgtgaagagagtgctgggcttcagcgagcccaccgtggtgaccgccgccctgaactgcgtgggcaagggcatggacaagaagaaggccgccgaccacctgaagcccttcctggacgacagcaccctgagattcgtggacaagctgttcgaggccgtggaggagggcagaagcagcagacacagcaagagcagcagcgacagaagcagaaagagagagctgaagatcaagcagatgatggaggccgccaccagacagatcgaggagagaaagaagcagctgagcttcatcagcccccccaccccccagcccaagacccccagcagcagccagcccgagagactgcccatcggcaacaccatccagcccagccaggccgccaccttcatgaacgacgccatcgagaaggccagaaaggccgccgagctgcaggccagaatccaggcccagctggccctgaagcccggcctgatcggcaacgccaacatggtgggcctggccaacctgcacgccatgggcatcgccccccccaaggtggagctgaaggaccagaccaagcccacccccctgatcctggacgagcagggcagaaccgtggacgccaccggcaaggagatcgagctgacccacagaatgcccaccctgaaggccaacatcagagccgtgaagagagagcagttcaagcagcagctgaaggagaagcccagcgaggacatggagagcaacaccttcttcgaccccagagtgagcatcgcccccagccagagacagagaagaaccttcaagttccacgacaagggcaagttcgagaagatcgcccagagactgagaaccaaggcccagctggagaagctgcaggccgagatcagccaggccgccagaaagaccggcatccacaccagcaccagactggccctgatcgcccccaagaaggagctgaaggagggcgacatccccgagatcgagtggtgggacagctacatcatccccaacggcttcgacctgaccgaggagaaccccaagagagaggactacttcggcatcaccaacctggtggagcaccccgcccagctgaacccccccgtggacaacgacacccccgtgaccctgggcgtgtacctgaccaagaaggagcagaagaagctgagaagacagaccagaagagaggcccagaaggagctgcaggagaaggtgagactgggcctgatgcccccccccgagcccaaggtgagaatcagcaacctgatgagagtgctgggcaccgaggccgtgcaggaccccaccaaggtggaggcccacgtgagagcccagatggccaagagacagaaggcccacgaggaggccaacgccgccagaaagctgaccgccgagcagagaaaggtgaagaagatcaagaagctgaaggaggacatcagccagggcgtgcacatcagcgtgtacagagtgagaaacctgagcaaccccgccaagaagttcaagatcgaggccaacgccggccagctgtacctgaccggcgtggtggtgctgcacaaggacgtgaacgtggtggtggtggagggcggccccaaggcccagaagaagttcaagagactgatgctgcacagaatcaagtgggacgagcagaccagcaacaccaagggcgacgacgacgaggagagcgacgaggaggccgtgaagaagaccaacaagtgcgtgctggtgtgggagggcaccgccaaggacagaagcttcggcgagatgaagttcaagcagtgccccaccgagaacatggccagagagcacttcaagaagcacggcgccgagcactactgggacctggccctgagcgagagcgtgctggagagcaccgactag

SEQ ID NO: 11801 - DNA, 3192 bp, synthetic construct
  source 1..3192: mol_type = other DNA; note = Synthetic coding sequence
atgccccacctgcccctggccagcttcagaccccccttctggggcctgagacacagcagaggcctgcccagattccacagcgtgagcacccagagcgagccccacggcagccccatcagcagaagaaacagagaggccaagcagaagagactgagagagaagcaggccaccctggaggccgagatcgccggcgagagcaagagccccgccgagagcatcaaggcctggagacccaaggagctggtgctgtacgagatccccaccaagcccggcgagaagaaggacgtgagcggccccctgccccccgcctacagccccagatacgtggaggccgcctggtacccctggtgggtgagagagggcttcttcaagcccgagtaccaggccagactgccccaggccaccggcgagaccttcagcatgtgcatccccccccccaacgtgaccggcagcctgcacatcggccacgccctgaccgtggccatccaggacgccctggtgagatggcacagaatgagaggcgaccaggtgctgtgggtgcccggcagcgaccacgccggcatcgccacccaggccgtggtggagaagcagctgtggaaggagagaggcgtgagaagacacgagctgagcagagaggccttcctgagagaggtgtggcagtggaaggaggccaagggcggcgagatctgcgagcagctgagagccctgggcgccagcctggactgggacagagagtgcttcaccatggacgtgggcagcagcgtggccgtgaccgaggccttcgtgagactgtacaaggccggcctgctgtacagaaaccaccagctggtgaactggagctgcgccctgagaagcgccatcagcgacatcgaggtggagaacagacccctgcccggccacacccagctgagactgcccggctgccccacccccgtgagcttcggcctgctgttcagcgtggccttccccgtggacggcgagcccgacgccgaggtggtggtgggcaccaccagacccgagaccctgcccggcgacgtggccgtggccgtgcaccccgacgacagcagatacacccacctgcacggcagacagctgagacaccccctgatgggccagcccctgcccctgatcaccgactacgccgtgcagccccacgtgggcaccggcgccgtgaaggtgacccccgcccacagccccgccgacgccgagatgggcgccagacacggcctgagccccctgaacgtgatcgccgaggacggcaccatgaccagcctgtgcggcgactggctgcagggcctgcacagattcgtggccagagagaagatcatgagcgtgctgagcgagtggggcctgttcagaggcctgcagaaccaccccatggtgctgcccatctgcagcagaagcggcgacgtgatcgagtacctgctgaagaaccagtggttcgtgagatgccaggagatgggcgccagagccgccaaggccgtggagagcggcgccctggagctgagccccagcttccaccagaagaactggcagcactggttcagccacatcggcgactggtgcgtgagcagacagctgtggtggggccaccagatccccgcctacctggtggtggaggaccacgcccagggcgaggaggactgctgggtggtgggcagaagcgaggccgaggccagagaggtggccgccgagctgaccggcagacccggcgccgagctgaccctggagagagaccccgacgtgctggacacctggttcagcagcgccctgttccccttcagcgccctgggctggccccaggagacccccgacctggccagattctaccccctgagcctgctggagaccggcagcgacctgctgctgttctgggtgggcagaatggtgatgctgggcacccagctgaccggccagctgcccttcagcaaggtgctgctgcaccccatggtgagagacagacagggcagaaagatgagcaagagcctgggcaacgtgctggaccccagagacatcatcagcggcgtggagatgcaggtgctgcaggagaagctgagaagcggcaacctggaccccgccgagctggccatcgtggccgccgcccagaagaaggacttcccccacggcatccccgagtgcggcaccgacgccctgagattcaccctgtgcagccacggcgtgcaggccggcgacctgcacctgagcgtgagcgaggtgcagagctgcagacacttctgcaacaagatctggaacgccctgagattcatcctgaacgccctgggcgagaagttcgtgccccagcccgccgaggagctgagccccagcagccccatggacgcctggatcctgagcagactggccctggccgcccaggagtgcgagagaggcttcctgaccagagagctgagcctggtgacccacgccctgcaccacttctggctgcacaacctgtgcgacgtgtacctggaggccgtgaagcccgtgctgtggcacagccccagacccctgggccccccccaggtgctgttcagctgcgccgacctgggcctgagactgctggcccccctgatgcccttcctggccgaggagctgtggcagagactgccccccagacccggctgcccccccgcccccagcatcagcgtggccccctaccccagcgcctgcagcctggagcactggagacagcccgagctggagagaagattcagcagagtgcaggaggtggtgcaggtgctgagagccctgagagccacctaccagctgaccaaggccagacccagagtgctgctgcagagcagcgagcccggcgaccagggcctgttcgaggccttcctggagcccctgggcaccctgggctactgcggcgccgtgggcctgctgccccccggcgccgccgcccccagcggctgggcccaggcccccctgagcgacaccgcccaggtgtacatggagctgcagggcctggtggacccccagatccagctgcccctgctggccgccagaagatacaagctgcagaagcagctggacagcctgaccgccagaacccccagcgagggcgaggccggcacccagagacagcagaagctgagcagcctgcagctggagctgagcaagctggacaaggccgccagccacctgagacagctgatggacgagccccccgcccccggcagccccgagctgtag

SEQ ID NO: 11802 - DNA, 2118 bp, synthetic construct
  source 1..2118: mol_type = other DNA; note = Synthetic coding sequence
atgatcgacagcgtgaagctgagaagagacagcgccgccgacttcttcagccactacgagtacctgtgcgccctgcagaacagcgtgcccctgcccgccgtgagagcctgcctgagagagggcgtgctggacttcaacgccgacagactgagaggcgtggactgggcccccctgctgagcaccctgaagatcaacaaggacctgcccctggtgagcatcaagagcttcttccagccctggctgggcgacaccggcagcgacatgaacaagttctgcagaagcagagtgcccgccatcagatacaaggacgtgaccttccagctgtgcaaggccctgaagggctgcctgagcatcagcagcgtgctgaagaacctggagctgaacggcctgatcctgagagagagagacctgaccatcctggccaagggcctgaacaagagcgccagcctggtgcacctgagcctggccaactgccccatcggcgacggcggcctggagatcatctgccagggcatcaagagcagcatcaccctgaagaccgtgaacttcaccggctgcaacctgacctggcagggcgccgaccacatggccaagatcctgaagtaccagaccatgagaagacacgaggagacctgggccgagagcctgagatacagaagacccgacctggactgcatggccggcctgagaagaatcaccctgaactgcaacaccctgatcggcgacctgggcgcctgcgccttcgccgacagcctgagcgaggacctgtggctgagagccctggacctgcagcagtgcggcctgaccaacgagggcgccaaggccctgctggaggccctggagaccaacaccaccctggtggtgctggacatcagaaagaaccccctgatcgaccacagcatgatgaaggccgtgatcaagaaggtgctgcagaacggcagaagcgccaagagcgagtaccagtggatcaccagccccagcgtgaaggagcccagcaagaccgccaagcagaagagaagaaccatcatcctgggcagcggccacaagggcaaggccaccatcagaatcggcctggccaccaagaagcccgtgagcagcggcagaaagcacagcctgggcaaggagtactacgcccccgcccccctgccccccggcgtgagcggcttcctgccctggagaaccgccgagagagccaagagacacagaggcttccccctgatcaagaccagagacatctgcaaccagctgcagcagcccggcttccccgtgaccgtgaccgtggagagccccagcagcagcgaggtggaggaggtggacgacagcagcgagagcgtgcacgaggtgcccgagaagaccagcatcgagcaggaggccctgcaggagaagctggaggagtgcctgaagcagctgaaggaggagagagtgatcagactgaaggtggacaagagagtgagcgagctggagcacgagaacgcccagctgagaaacatcaacttcagcctgagcgaggccctgcacgcccagagcctgaccaacatgatcctggacgacgagggcgtgctgggcagcatcgagaacagcttccagaagttccacgccttcctggacctgctgaaggacgccggcctgggccagctggccaccatggccggcatcgaccagagcgacttccagctgctgggccacccccagatgaccagcaccgtgagcaacccccccaaggaggagaagaaggccctggaggacgagaagcccgagcccaagcagaacgccctgggccagatgcagaacatccaggtgagcatctgcatgcagagcgcctacaacgagggcaccctgatgaagttccagaagatcaccggcgacgccagaatccccctgcccctggacagcttccccgtgcccgtgagcacccccgagggcctgggcaccagcagcaacaacctgggcgtgcccgccaccgagcagagacaggagagcttcgagggcttcatcgccagaatgtgcagccccagccccgacgccaccagcggcaccggcagccagagaaaggaggaggagctgagcagaaacagcagaagcagcagcgagaagaagaccaagaccggcagccactag

SEQ ID NO: 11803 - DNA, 1287 bp, synthetic construct
  source 1..1287: mol_type = other DNA; note = Synthetic coding sequence
atggcctggcagagcagaaagggcggccacttcagagaggtggccatgcagtggaaggtgaccctgaccagcagatggggcctgctgagacactgccaggtgctggccggcctgctgcacctgggcaacatccagttcgccgccagcgaggacgaggcccagccctgccagcccatggacgacgccaagtacagcgtgagaaccgccgccagcctgctgggcctgcccgaggacgtgctgctggagatggtgcagatcagaaccatcagagccggcagacagcagcaggtgttcagaaagccctgcgccagagccgagtgcgacaccagaagagactgcctggccaagctgatctacgccagactgttcgactggctggtgagcgtgatcaacagcagcatctgcgccgacaccgacagctggaccaccttcatcggcctgctggacgtgtacggcttcgagagcttccccgacaacagcctggagcagctgtgcatcaactacgccaacgagaagctgcagcagcacttcgtggcccactacctgagagcccagcaggaggagtacgccgtggagggcctggagtggagcttcatcaactaccaggacaaccagccctgcctggacctgatcgagggcagccccatcagcatctgcagcctgatcaacgaggagtgcagactgaacagacccagcagcgccgcccagctgcagaccagaatcgagaccgccctggccggcagcccctgcctgggccacaacaagctgagcagagagcccagcttcatcgtggtgcactacgccggccccgtgagataccacaccgccggcctggtggagaagaacaaggaccccatcccccccgagctggacggcgtggaggagaagcacttcagccaggccccctgcagcctgagcaccagccccctgcagaccagactgctggaggccatcatcagactgtggcccctgggcctggtgctggccaacaccgccatgggcgtgggcagcttccagagaaagctggtggtgtgggcctgcctgcagctgcccagaggcagccccagcagctacaccgtgcagaccgcccaggaccaggccggcgtgaccagcatcagagccctgccccagggcagcatcaagttccactgcagaaagagccccctgagatacgccgacatctgccccgagcccagcccctacagcatcaccggcttcaaccagatcctgctggagagacacagactgatccacgtgaccagcagcgccttcaccggcctgggctag

SEQ ID NO: 11804 - DNA, 927 bp, synthetic construct; identical to SEQ ID NO: 9731
  source 1..927: mol_type = other DNA; note = Synthetic coding sequence

SEQ ID NO: 11805 - DNA, 429 bp, synthetic construct
  source 1..429: mol_type = other DNA; note = Synthetic coding sequence
atgagcctgcacggcaagagaaaggagatctacaagtacgaggccccctggaccgtgtacgccatgaactggagcgtgagacccgacaagagattcagactggccctgggcagcttcgtggaggagtacaacaacaaggtggtgatcctggacgtgagagtgccctgcacccccgtggccagactgaacaaccacagagcctgcgtgaacggcatcgcctgggccccccacagcagctgccacatctgcaccgccgccgacgaccaccaggccctgatctgggacatccagcagatgcccagagccatcgaggaccccatcctggcctacaccgccgagggcgagatcaacaacgtgcagtgggccagcacccagcccgactggatcgccatctgctacaacaactgcctggagatcctgagagtgtag

SEQ ID NO: 11806 - DNA, 1233 bp, synthetic construct
  source 1..1233: mol_type = other DNA; note = Synthetic coding sequence
atggccgcccccagccccagcggcggcggcggcagcggcggcggcagcggcagcggcacccccggccccgtgggcagccccgcccccggccaccccgccgtgagcagcatgcagggcttccagatcaacttctgcgagaaggcccagagcaagagaaaggccctgaagctgaacttcgccaacccccccttcaagagcaccgccagattcaccctgaaccccaaccccaccggcgtgcagaacccccacatcgagagactgagaacccacagcatcgagagcagcggcaagctgaagatcagccccgagcagcactgggacttcaccgccgaggacctgaaggacctgggcgagatcggcagaggcgcctacggcagcgtgaacaagatggtgcacaagcccagcggccagatcatggccgtgaagagaatcagaagcaccgtggacgagaaggagcagaagcagctgctgatggacctggacgtggtgatgagaagcagcgactgcccctacatcgtgcagttctacggcgccctgttcagagagggcgactgctggatctgcatggagctgatgagcaccagcttcgacaagttctacaagtacgtgtacagcgtgctggacgacgtgatccccgaggagatcctgggcaagatcaccctggccaccgtgaaggccctgaaccacctgaaggagaacctgaagatcatccacagagacatcaagcccagcaacatcctgctggacagaagcggcaacatcaagctgtgcgacttcggcatcagcggccagctggtggacagcatcgccaagaccagagacgccggctgcagaccctacatggcccccgagagaatcgaccccagcgccagcagacagggctacgacgtgagaagcgacgtgtggagcctgggcatcaccctgtacgagctggccaccggcagattcccctaccccaagtggaacagcgtgttcgaccagctgacccaggtggtgaagggcgaccccccccagctgagcaacagcgaggagagagagttcagccccagcttcatcaacttcgtgaacctgtgcctgaccaaggacgagagcaagagacccaagtacaaggagctgctgaagcaccccttcatcctgatgtacgaggagagagccgtggaggtggcctgctacgtgtgcaagatcctggaccagatgcccgccacccccagcagccccatgtacgtggactag

SEQ ID NO: 11807 - DNA, 687 bp, synthetic construct
  source 1..687: mol_type = other DNA; note = Synthetic coding sequence
atgcagctggccgtggtgagcgaggagcaggaccagaacctgaacagactgatctgctggatcctgatgcagttcatctacatcagcagcgactacgtgttcgacggcaccaaccccccctacagagaggaggacatccccgcccccctgaacctgtacggcaagaccaagctggacggcgagaaggccgtgctggagaacaacctgggcgccgccgtgctgagaatccccatcctgtacggcgaggtggagaagctggaggagagcgccgtgaccgtgatgttcgacaaggtgcagttcagcaacaagagcgccaacatggaccactggcagcagagattccccacccacgtgaaggacgtggccaccgtgtgcagacagctggccgagaagagaatgctggaccccagcatcaagggcaccttccactggagcggcaacgagcagatgaccaagtacgagatggcctgcgccatcgccgacgccttcaacctgcccagcagccacctgagacccatcaccgacagccccgtgctgggcgcccagagacccagaaacgcccagctggactgcagcaagctggagaccctgggcatcggccagagaacccccttcagaatcggcatcaaggagagcctgtggcccttcctgatcgacaagagatggagacagaccgtgttccactag

SEQ ID NO: 11808 - DNA, 1101 bp, synthetic construct
  source 1..1101: mol_type = other DNA; note = Synthetic coding sequence
atgagcgccgccaaccccgagacccccaacagcaccatcagcagagaggccagcacccagagcagcagcgccgccgccagccagggctgggtgctgcccgagggcaagatcgtgcccaacaccgtgttcgtgggcggcatcgacgccagaatggacgagaccgagatcggcagctgcttcggcagatacggcagcgtgaaggaggtgaagatcatcaccaacagaaccggcgtgagcaagggctacggcttcgtgagcttcgtgaacgacgtggacgtgcagaagatcgtgggcagccagatccacttccacggcaagaagctgaagctgggccccgccatcagaaagcagaagctgtgcgccagacacgtgcagcccagacccctggtggtgaacccccccccccccccccagttccagaacgtgtggagaaaccccaacaccgagacctacctgcagccccagatcacccccaaccccgtgacccagcacgtgcaggcctacagcgcctacccccacagccccggccaggtgatcaccggctgccagctgctggtgtacaactaccaggagtaccccacctaccccgacagcgccttccaggtgaccaccggctaccagctgcccgtgtacaactaccagcccttccccgcctaccccagcagccccttccaggtgaccgccggctaccagctgcccgtgtacaactaccaggccttccccgcctaccccagcagccccttccaggtgaccaccggctaccagctgcccgtgtacaactaccaggccttccccgcctaccccagcagccccttccaggtgaccaccggctaccagctgcccgtgtacaactaccaggccttccccgcctaccccagcagccccttccaggtgaccaccggctaccagctgcccgtgtacaactaccaggccttccccgcctaccccaacagcgccgtgcaggtgaccaccggctaccagttccacgtgtacaactaccagatgcccccccagtgccccgtgggcgagcagagaagaaacctgtggaccgaggcctacaagtggtggtacctggtgtgcctgatccagagaagagactag

SEQ ID NO: 11809 - DNA, 306 bp, synthetic construct
  source 1..306: mol_type = other DNA; note = Synthetic coding sequence
atggccagcgccggcacccagcactacagcatcggcctgagacagaagaacagcttcaagcagagcggccccagcggcaccgtgcccgccaccccccccgagaagcccagcgagggcagagtgtggccccaggcccaccagcaggtgaagcccatctggaagctggagaagaagcaggtggagaccctgagcgccggcctgggccccggcctgctgggcgtgcccccccagcccgcctacttcttctgccccagcaccctgtgcagcagcggcaccaccgccgtgatcgccggccacagcagctag

SEQ ID NO: 11810 - DNA, 2121 bp, synthetic construct
  source 1..2121: mol_type = other DNA; note = Synthetic coding sequence
atgatcgacagcgtgaagctgagaagagacagcgccgccgacttcttcagccactacgagtacctgtgcgccctgcagaacagcgtgcccctgcccgccgtgagagcctgcctgagagagggcgtgctggacttcaacgccgacagactgagaggcgtggactgggcccccctgctgagcaccctgaagatcaacaaggacctgcccctggtgagcatcaagagcttcttccagccctggctgggcgacaccggcagcgacatgaacaagttctgcagaagcagagtgcccgccatcagatacaaggacgtgaccttccagctgtgcaaggccctgaagggctgcctgagcatcagcagcgtgctgaagaacctggagctgaacggcctgatcctgagagagagagacctgaccatcctggccaagggcctgaacaagagcgccagcctggtgcacctgagcctggccaactgccccatcggcgacggcggcctggagatcatctgccagggcatcaagagcagcatcaccctgaagaccgtgaacttcaccggctgcaacctgacctggcagggcgccgaccacatggccaagatcctgaagtaccagaccatgagaagacacgaggagacctgggccgagagcctgagatacagaagacccgacctggactgcatggccggcctgagaagaatcaccctgaactgcaacaccctgatcggcgacctgggcgcctgcgccttcgccgacagcctgagcgaggacctgtggctgagagccctggacctgcagcagtgcggcctgaccaacgagggcgccaaggccctgctggaggccctggagaccaacaccaccctggtggtgctggacatcagaaagaaccccctgatcgaccacagcatgatgaaggccgtgatcaagaaggtgctgcagaacggcagaagcgccaagagcgagtaccagtggatcaccagccccagcgtgaaggagcccagcaagaccgccaagcagaagagaagaaccatcatcctgggcagcggccacaagggcaaggccaccatcagaatcgtgggcctggccaccaagaagcccgtgagcagcggcagaaagcacagcctgggcaaggagtactacgcccccgcccccctgccccccggcgtgagcggcttcctgccctggagaaccgccgagagagccaagagacacagaggcttccccctgatcaagaccagagacatctgcaaccagctgcagcagcccggcttccccgtgaccgtgaccgtggagagccccagcagcagcgaggtggaggaggtggacgacagcagcgagagcgtgcacgaggtgcccgagaagaccagcatcgagcaggaggccctgcaggagaagctggaggagtgcctgaagcagctgaaggaggagagagtgatcagactgaaggtggacaagagagtgagcgagctggagcacgagaacgcccagctgagaaacatcaacttcagcctgagcgaggccctgcacgcccagagcctgaccaacatgatcctggacgacgagggcgtgctgggcagcatcgagaacagcttccagaagttccacgccttcctggacctgctgaaggacgccggcctgggccagctggccaccatggccggcatcgaccagagcgacttccagctgctgggccacccccagatgaccagcaccgtgagcaacccccccaaggaggagaagaaggccctggaggacgagaagcccgagcccaagcagaacgccctgggccagatgcagaacatccagttccagaagatcaccggcgacgccagaatccccctgcccctggacagcttccccgtgcccgtgagcacccccgagggcctgggcaccagcagcaacaacctgggcgtgcccgccaccgagcagagacaggagagcttcgagggcttcatcgccagaatgtgcagccccagccccgacgccaccagcggcaccggcagccagagaaaggaggaggagctgagcagaaacagcagaagcagcagcgagaagaagaccaagaccggcgagtacaccaagaagcacagcgacaagcagcaccccggcaaggacctgcacagctag

SEQ ID NO: 11811 - DNA, 1932 bp, synthetic construct
  source 1..1932: mol_type = other DNA; note = Synthetic coding sequence
atggcctgccagcagagcagataccacagcttcagcagcgccagcagactgcagcccagacccagcggcgtgaccatcgacgagagcttcctgaccgaggacaagagcacccagaacagaaagctgctgcagaagagaagaaccctggagctgcccgccgcccccctgagccactgccaggcccccgtgctgggcggcaccggcaagctgcccacccagggcgccccccccgccggccccggccacagattccaccccggcaccaaggccgccgcccaccagagagagaagatcagagccctggagcccctgaaggccaagctggtgaccgtgaacgaggactgcaacgagagaatcctggccatgagagccgaggagaagtacgagatcagcctgctgaagaaggagaagatgaacctgctgaagctgatcgacaagaagaacgaggagaagatcagcctgcagagcgaggtgaccaagctgagaaagaacctggccgaggagtacctgcactacctgagcgagagagacgcctgcaagatcctgatcgccgacctgaacgagctgagataccagagagaggacatgagcctggcccagagccccggcatctggggcgaggaccccgtgaagctgaccctggccctgaagatgaccagacaggacctgaccagaacccagatggagctgaacaacatgaaggccaacttcggcgacgtggtgcccagaagagacttcgagatgcaggagaagaccaacaaggacctgcaggagcagctggacaccctgagagccagctacgaggaggtgagaaaggagcacgagatcctgatgcagctgcacatgagcaccctgaaggagagagaccagttcttcagcgagctgcaggagatccagagaaccagcacccccagacccgactggaccaagtgcaaggacgtggtggccggcggccccgagagatggcagatgctggccgagggcaagaacagcgaccagctggtggacgtgctgctggaggagatcggcagcggcctgctgagagagaaggacttcttccccggcctgggctacggcgaggccatccccgccttcctgagattcgacggcctggtggagaacaagaagcccagcaagaaggacgtggtgaacctgctgaaggacgcctggaaggagagactggccgaggagcagaaggagaccttccccgacttcttcttcaacttcctggagcacagattcggccccagcgacgccatggcctgggcctacaccatcttcgagaacatcaagatcttccacagcaacgaggtgatgagccagttctacgccgtgctgatgggcaagagaagcgagaacgtgtacgtgacccagaaggagaccgtggcccagctgctgaaggagatgaccaacgccgacagccagaacgagggcctgctgaccatggagcagttcaacaccgtgctgaagagcaccttccccctgaagaccgaggagcagatccaggagctgatggaggccggcggctggcaccccagcagcagcaacgccgacctgctgaactacagaagcctgttcatggaggacgaggagggccagagcgagcccttcgtgcagaagctgtgggagcagtacatggacgagaaggacgagtacctgcagcagctgaagcaggagctgggcatcgagctgcacgaggaggtgaccctgcccaagctgagaggcggcctgatgaccatcgaccccagcctggacaagcagaccgtgaacacctacatgagccaggccttccagctgcccgagagcgagatgcccgaggagggcgacgagaaggaggaggccgtggtggagatcctgcagaccgccctggagagactgcaggtgatcgacatcagaagagtgggccccagagagcccgagcccgccagctag

SEQ ID NO: 11812 - DNA, 474 bp, synthetic construct
  source 1..474: mol_type = other DNA; note = Synthetic coding sequence
atggccaccagcgcccccctgagaagcctggaggaggaggtgacctgcagcatctgcctggactacctgagagaccccgtgaccatcgactgcggccacgtgttctgcagaagctgcaccaccgacgtgagacccatcagcggcagcagacccgtgtgccccctgtgcaagaagcccttcaagaaggagaacatcagacccgtgtggcagctggccagcctggtggagaacatcgagagactgaaggtggacaagggcagacagcccggcgaggtgaccagagagcagcaggacgccaagctgtgcgagagacacagagagaagctgcactactactgcgaggacgacggcaagctgctgtgcgtgatgtgcagagagagcagagagcacagaccccacaccgccgtgctgatggagaaggccgcccagccccacagagagaagatcctgaaccacctgagcaccctgagatag

SEQ ID NO: 11813 - DNA, 939 bp, synthetic construct
  source 1..939: mol_type = other DNA; note = Synthetic coding sequence
atggcccagccctacccccccgcccagtaccccccccccccccagaacggcatccccgccgagtacgcccccccccccccccaccccacccaggactacagcggccagacccccgtgcccaccgagcacggcatgaccctgtacacccccgcccagacccaccccgagcagcccggcagcgaggccagcacccagcccatcgccggcacccagaccgtgccccagaccgacgaggccgcccagaccgacagccagcccctgcaccccagcgaccccaccgagaagcagcagcccaagagactgcacgtgagcaacatccccttcagattcagagaccccgacctgagacagatgttcggccagttcggcaagatcctggacgtggagatcatcttcaacgagagaggcagcaagggcttcggcttcgtgaccttcgagaccagcagcgacgccgacagagccagagagaagctgaacggcaccatcgtggagggcagaaagatcgaggtgaacaacgccaccgccagagtgatgaccaacaagaagaccggcaacccctacaccaacggctggaagctgaaccccgtggtgggcgccgtgtacggccccgagttctacgccgtgaccggcttcccctaccccaccaccggcaccgccgtggcctacagaggcgcccacctgagaggcagaggcagagccgtgtacaacaccttcagagccgcccccccccccccccccatccccacctacggcgccgtggtgtaccaggacggcttctacggcgccgagatctacggcggctacgccgcctacagatacgcccagcccgccgccgccgccgccgcctacagcgacagctacggcagagtgtacgccgccgccgacccctaccaccacaccatcggccccgccgccacctacagcatcggcaccatgtag

SEQ ID NO: 11814 - DNA, 300 bp, synthetic construct
  source 1..300: mol_type = other DNA; note = Synthetic coding sequence
atggccagcctgctgcaggaccagctgaccaccgaccaggacctgctgctgatgcaggagggcatgcccatgagaaaggtgagaagcaagagctggaagaagctgagatacttcagactgcagaacgacggcatgaccgtgtggcacgccagacaggccagaggcagcgccaagcccagcttcagcatcagcgacgtggagaccatcagaaacggccacgacagcgagctgctgagaagcctggccgaggagctgcccctggagcagggcttcaccatcgtgttccacggcagaagatag

SEQ ID NO: 11815 - DNA, 1620 bp, synthetic construct; identical to SEQ ID NO: 10018
  source 1..1620: mol_type = other DNA; note = Synthetic coding sequence

SEQ ID NO: 11816 - DNA, 480 bp, synthetic construct
  source 1..480: mol_type = other DNA; note = Synthetic coding sequence
atggccaccagcgcccccctgagaagcctggaggaggaggtgacctgcagcatctgcctggactacctgagagaccccgtgaccatcgactgcggccacgtgttctgcagaagctgcaccaccgacgtgagacccatcagcggcagcagacccgtgtgccccctgtgcaagaagcccttcaagaaggagaacatcagacccgtgtggcagctggagaagatcctgaaccacctgagcaccctgagaagagacagagacaagatccagggcttccaggccaagggcgaggccgacatcctggccgccctgaagaagctgcaggaccagagacagtacatcgtggccgagttcgagcagggccaccagttcctgagagagagagaggagcacctgctggagcagctggccaagctggagcaggagctgaccgagggcagagagaagttcaagagcagaggcgtgggcgagctggccagatag

SEQ ID NO: 11817 - DNA, 579 bp, synthetic construct; identical to SEQ ID NO: 11225
  source 1..579: mol_type = other DNA; note = Synthetic coding sequence

SEQ ID NO: 11818 - DNA, 309 bp, synthetic construct
  source 1..309: mol_type = other DNA; note = Synthetic coding sequence
atgcacaacagaagccagggcttcttcttcagcagctgccacccccagaaccacgtgagctacggctgccagagccccagcttcatcttctgcagatgccagagcctgaacttcgtgagcagaacctgctaccccctgagctacttcagctacggcaaccagaccatcggcagcatcagcaacagcttcagaagcctgaactacgtgagccacagcttccagcccatcagcttcatgcacagcagcttccagcccgcctgcagcgacttcgtgggctggcagagccccttcctgagaagaacctgctag

SEQ ID NO: 11819 - DNA, 723 bp, synthetic construct
  source 1..723: mol_type = other DNA; note = Synthetic coding sequence
atggacctggtgagactgggcctggagagaggcgagaccgccaaggaggccctggacgtgatcgtgagcctgctggaggagcacggccagggcggcaactacttcgaggacgccaacagctgccacagcttccagagcgcctacctgatcgtggacagagacgaggcctgggtgctggagaccatcggcaagtactgggccgccgagaaggtgaccgagagcatcaccgtgcagaccatgatgaacaccctgagagacaaggccagcggcgtgtgcatcgacagcgagttcttcctgaccaccgccagcggcgtgagcgtgctgccccagaacagaagcagcccctgcatccactacttcaccggcacccccgaccccagcagaagcatcttcaagcccttcatcttcgtggacgacgtgaagctggtgcccaagacccagagcccctgcttcggcgacgacgaccccgccaagaaggagcccagattccaggagaagcccgacagaagacacgagctgtacaaggcccacgagtgggccagagccatcatcgagagcgaccaggagcagggcagaaagctgagaagcaccatgctggagctggagaagcagggcctggaggccatggaggagatcctgaccagcagcgagcccctggaccccgccgaggtgggcgacctgttctacgactgcgtggacaccgagatcaagttcttcaagtag

SEQ ID NO: 11820 - DNA, 900 bp, synthetic construct
  source 1..900: mol_type = other DNA; note = Synthetic coding sequence
tgaagagaggaggacatctaccagttcgcctactgctacccctacacctacaccagattccagcactacctggacagcctgcagaagagaaacatggactacttcttcagagagcagctgggccagagcgtgcagcagagaaagctggacctgctgaccatcaccagccccgacaacctgagagagggcgccgagcagaaggtggtgttcatcaccggcagagtgcaccccggcgagacccccagcagcttcgtgtgccagggcatcatcgacttcctggtgagccagcaccccatcgcctgcgtgctgagagagtacctggtgttcaagatcgcccccatgctgaaccccgacggcgtgtacctgggcaactacagatgcagcctgatgggcttcgacctgaacagacactggctggaccccagcccctgggtgcaccccaccctgcacggcgtgaagcagctgatcgtgcagatgtacaacgaccccaagaccagcctggagttctacatcgacatccacgcccacagcaccatgatgaacggcttcatgtacggcaacatcttcgaggacgaggagagattccagagacaggccatcttccccaagctgctgtgccagaacgccgaggacttcagctacagcagcaccagcttcaacagagacgccgtgaaggccggcaccggcagaagattcctgggcggcctgctggaccacaccagctactgctacaccctggaggtgagcttctacagctacatcatcagcggcaccaccgccgccgtgccctacaccgaggaggcctgcatcctgagcccccaccccgccctgggccagcccagcagcagcagagagtaccccagcctgaccggccaggagctgggcccccagctgagatag

SEQ ID NO: 11821 - DNA, 1041 bp, synthetic construct
  source 1..1041: mol_type = other DNA; note = Synthetic coding sequence
atggccgccgccgagcccgccagcagcggccagcaggcccccgccggccagggccagggccagagaccccccccccagcccccccaggcccaggccccccagccccccccccccccccagctgggcggcgccggcggcggcagcagcagacacgagaagagcctgggcctgctgaccaccaagttcgtgagcctgctgcaggaggccaaggacggcgtgctggacctgaaggccgccgccgacaccctggccgtgagacagaagagaagaatctacgacatcaccaacgtgctggagggcatcgacctgatcgagaagaagagcaagaacagcatccagtggaagggcgtgggcgccggctgcaacaccaaggaggtgatcgacagactgagatacctgaaggccgagatcgaggacctggagctgaaggagagagagctggaccagcagaagctgtggctgcagcagagcatcaagaacgtgatggacgacagcatcaacaacagattcagctacgtgacccacgaggacatctgcaactgcttcaacggcgacaccctgctggccatccaggcccccagcggcacccagctggaggtgcccatccccgagatgggccagaacggccagaagaagtaccagatcaacctgaagagccacagcggccccatccacgtgctgctgatcaacaaggagagcagcagcagcaagcccgtggtgttccccgtgcccccccccgacgacctgacccagcccagcagccagagcctgacccccgtgaccccccagaagagcagcatggccacccagaacctgcccgagcagcacgtgagcgagagaagccaggccctgcagcagaccagcgccaccgacatcagcagcgccggcagcatcagcggcgacatcatcgacgagctgatgagcagcgacgtgttccccctgctgagactgagccccacccccgccgacgactacaacttcaacctggacgacaacgagggcgtgtgcgacctgttcgacgtgcagatcctgaactactag

SEQ ID NO: 11822 - DNA, 396 bp, synthetic construct
  source 1..396: mol_type = other DNA; note = Synthetic coding sequence
atgagcaagagatacctgcagaaggccaccaagggcaagctgctgatcatcatcttcatcgtgaccctgtggggcaaggtggtgagcagcgccaaccaccacaaggcccaccacgtgaagaccggcacctgcgaggtggtggccctgcacagatgctgcaacaagaacaagatcgaggagagaagccagaccgtgaagtgcagctgcttccccggccaggtggccggcaccaccagagccgcccccagctgcgtggacgccagcatcgtggagcagaagtggtggtgccacatgcagccctgcctggagggcgaggagtgcaaggtgctgcccgacagaaagggctggagctgcagcagcggcaacaaggtgaagaccaccagagtgacccactag

SEQ ID NO: 11823 - DNA, 306 bp, synthetic construct
  source 1..306: mol_type = other DNA; note = Synthetic coding sequence
atgcccttcttcggcaacaccttcagccccaagaagaccccccccagaaagagcgccagcctgagcaacctgcacagcctggacagaagcaccagagaggtggagctgggcctggagtacggcagccccaccatgaacctggccggccagagcctgaagttcgagaacggccagtggatcgccgagaccggcgtgagcggcggcgtggacagaagagaggtgcagagactgagaagaagaaaccagcagctggaggaggagaacaacctgctgagactgaaggtggacatcctgctggacatgtag

SEQ ID NO: 11824 - DNA, 393 bp, synthetic construct
  source 1..393: mol_type = other DNA; note = Synthetic coding sequence
atggacatcagcaagggcctgcccggcatgcagggcggcctgcacatctggatcagcgagaacagaaagatggtgcccgtgcccgagggcgcctacggcaacttcttcgaggagcactgctacgtgatcctgcacgtgccccagagccccaaggccacccagggcgccagcagcgacctgcactactgggtgggcaagcaggccggcgccgaggcccagggcgccgccgaggccttccagcagagactgcaggacgagctgggcggccagaccgtgctgcacagagaggcccagggccacgagagcgactgcttctgcagctacttcagacccggcatcatctacagaaagggcggcctggccagcgacctgaagcacgtggagaccaactag

SEQ ID NO: 11825 - DNA, 51 bp, synthetic construct
  source 1..51: mol_type = other DNA; note = Synthetic coding sequence
atgtgcaccagcgagaccttccaggccctggacaccttcgaggccagatag

SEQ ID NO: 11826 - DNA, 5553 bp, synthetic construct
  source 1..5553: mol_type = other DNA; note = Synthetic coding sequence
atggagagcaacttcaaccaggagggcgtgcccagacccagctacgtgttcagcgccgaccccatcgccagacccagcgagatcaacttcgacggcatcaagctggacctgagccacgagttcagcctggtggcccccaacaccgaggccaacagcttcgagagcaaggactacctgcaggtgtgcctgagaatcagacccttcacccagagcgagaaggagctggagagcgagggctgcgtgcacatcctggacagccagaccgtggtgctgaaggagccccagtgcatcctgggcagactgagcgagaagagcagcggccagatggcccagaagttcagcttcagcaaggtgttcggccccgccaccacccagaaggagttcttccagggctgcatcatgcagcccgtgaaggacctgctgaagggccagagcagactgatcttcacctacggcctgaccaacagcggcaagacctacaccttccagggcaccgaggagaacatcggcatcctgcccagaaccctgaacgtgctgttcgacagcctgcaggagagactgtacaccaagatgaacctgaagccccacagaagcagagagtacctgagactgagcagcgagcaggagaaggaggagatcgccagcaagagcgccctgctgagacagatcaaggaggtgaccgtgcacaacgacagcgacgacaccctgtacggcagcctgaccaacagcctgaacatcagcgagttcgaggagagcatcaaggactacgagcaggccaacctgaacatggccaacagcatcaagttcagcgtgtgggtgagcttcttcgagatctacaacgagtacatctacgacctgttcgtgcccgtgagcagcaagttccagaagagaaagatgctgagactgagccaggacgtgaagggctacagcttcatcaaggacctgcagtggatccaggtgagcgacagcaaggaggcctacagactgctgaagctgggcatcaagcaccagagcgtggccttcaccaagctgaacaacgccagcagcagaagccacagcatcttcaccgtgaagatcctgcagatcgaggacagcgagatgagcagagtgatcagagtgagcgagctgagcctgtgcgacctggccggcagcgagagaaccatgaagacccagaacgagggcgagagactgagagagaccggcaacatcaacaccagcctgctgaccctgggcaagtgcatcaacgtgctgaagaacagcgagaagagcaagttccagcagcacgtgcccttcagagagagcaagctgacccactacttccagagcttcttcaacggcaagggcaagatctgcatgatcgtgaacatcagccagtgctacctggcctacgacgagaccctgaacgtgctgaagttcagcgccatcgcccagaaggtgtgcgtgcccgacaccctgaacagcagccaggagaagctgttcggccccgtgaagagcagccaggacgtgagcctggacagcaacagcaacagcaagatcctgaacgtgaagagagccaccatcagctgggagaacagcctggaggacctgatggaggacgaggacctggtggaggagctggagaacgccgaggagacccagaacgtggagaccaagctgctggacgaggacctggacaagaccctggaggagaacaaggccttcatcagccacgaggagaagagaaagctgctggacctgatcgaggacctgaagaagaagctgatcaacgagaagaaggagaagctgaccctggagttcaagatcagagaggaggtgacccaggagttcacccagtactgggcccagagagaggccgacttcaaggagaccctgctgcaggagagagagatcctggaggagaacgccgagagaagactggccatcttcaaggacctggtgggcaagtgcgacaccagagaggaggccgccaaggacatctgcgccaccaaggtggagaccgaggagacccacaactacgtgggcttcgaggacatcatcgacagcctgcaggacaacgtggccgacatcaagaagcaggccgagatcgcccacctgtacatcgccagcctgcccgacccccaggaggccaccgcctgcctggagctgaagttcaaccagatcaaggccgagctggccaagaccaagggcgagctgatcaagaccaaggaggagctgaagaagagagagaacgagagcgacagcctgatccaggagctggagaccagcaacaagaagatcatcacccagaaccagagaatcaaggagctgatcaacatcatcgaccagaaggaggacaccatcaacgagttccagaacctgaagagccacatggagaacaccttcaagtgcaacgacaaggccgacaccagcagcctgatcatcaacaacaagctgatctgcaacgagaccgtggaggtgcccaaggacagcaagagcaagatctgcagcgagagaaagagagtgaacgagaacgagctgcagcaggacgagccccccgccaagaagggcaccaccagcgccgccagcagcagaagactgagaaagctgatcagcaagcccgtgaacagaaccagacagaccgagggccacagcctggtgagcatccacgtgagcagcgccatcaccgaggaccagaagaagagcgaggaggtgagacccaacatcgccgagatcgaggacatcagagtgctgcaggagaacaacgagggcctgagagccttcctgctgaccatcgagaacgagctgaagaacgagaaggaggagaaggccgagctgaacaagcagatcgtgcacttccagcaggagctgagcctgagcgagaagaagaacctgaccctgagcaaggaggtgcagcagatccagagcaactacgacatcgccatcgccgagctgcacgtgcagaagagcaagaaccaggagcaggaggagaagatcatgaagctgagcaacgagatcgagaccgccaccagaagcatcaccaacaacgtgagccagatcaagctgatgcacaccaagatcgacgagctgagaaccctggacagcgtgagccagatcagcaacatcgacctgctgaacctgagagacctgagcaacggcagcgaggaggacaacctgcccaacacccagctggacctgctgggcaacgactacctggtgagcaagcaggtgaaggagtacagaatccaggagcccaacagagagaacagcttccacagcagcatcgaggccatctgggaggagtgcaaggagatcgtgaaggccagcagcaagaagagccaccagatcgaggagctggagcagcagatcgagaagctgcaggccgaggtgaagggctacaaggacgagaacaacagactgaaggagaaggagcacaagaaccaggacgacctgctgaaggagaaggagaccctgatccagcagctgaaggaggagctgcaggagaagaacgtgaccctggacgtgcagatccagcacgtggtggagggcaagagagccctgagcgagctgacccagggcgtgacctgctacaaggccaagatcaaggagctggagaccatcctggagacccagaaggtggagtgcagccacagcgccaagctggagcaggacatcctggagaaggagagcatcatcctgaagctggagagaaacctgaaggagttccaggagcacctgcaggacagcgtgaagaacaccaaggacctgaacgtgaaggagctgaagctgaaggaggagatcacccagctgaccaacaacctgcaggacatgaagcacctgctgcagctgaaggaggaggaggaggagaccaacagacaggagaccgagaagctgaaggaggagctgagcgccagcagcgccagaacccagaacctgaaggccgacctgcagagaaaggaggaggactacgccgacctgaaggagaagctgaccgacgccaagaagcagatcaagcaggtgcagaaggaggtgagcgtgatgagagacgaggacaagctgctgagaatcaagatcaacgagctggagaagaagaagaaccagtgcagccaggagctggacatgaagcagagaaccatccagcagctgaaggagcagctgaacaaccagaaggtggaggaggccatccagcagtacgagagagcctgcaaggacctgaacgtgaaggagaagatcatcgaggacatgagaatgaccctggaggagcaggagcagacccaggtggagcaggaccaggtgctggaggccaagctggaggaggtggagagactggccaccgagctggagaagtggaaggagaagtgcaacgacctggagaccaagaacaaccagagaagcaacaaggagcacgagaacaacaccgacgtgctgggcaagctgaccaacctgcaggacgagctgcaggagagcgagcagaagtacaacgccgacagaaagaagtggctggaggagaagatgatgctgatcacccaggccaaggaggccgagaacatcagaaacaaggagatgaagaagtacgccgaggacagagagagattcttcaagcagcagaacgagatggagatcctgaccgcccagctgaccgagaaggacagcgacctgcagaagtggagagaggagagagaccagctggtggccgccctggagatccagctgaaggccctgatcagcagcaacgtgcagaaggacaacgagatcgagcagctgaagagaatcatcagcgagaccagcaagatcgagacccagatcatggacatcaagcccaagagaatcagcagcgccgaccccgacaagctgcagaccgagcccctgagcaccagcttcgagatcagcagaaacaagatcgaggacggcagcgtggtgctggacagctgcgaggtgagcaccgagaacgaccagagcaccagattccccaagcccgagctggagatccagttcacccccctgcagcccaacaagatggccgtgaagcaccccggctgcaccacccccgtgaccgtgaagatccccaaggccagaaagagaaagagcaacgagatggaggaggacctggtgaagtgcgagaacaagaagaacgccacccccagaaccaacctgaagttccccatcagcgacgacagaaacagcagcgtgaagaaggagcagaaggtggccatcagacccagcagcaagaagacctacagcctgagaagccaggccagcatcatcggcgtgaacctggccaccaagaagaaggagggcaccctgcagaagttcggcgacttcctgcagcacagccccagcatcctgcagagcaaggccaagaagatcatcgagaccatgagcagcagcaagctgagcaacgtggaggccagcaaggagaacgtgagccagcccaagagagccaagagaaagctgtacaccagcgagatcagcagccccatcgacatcagcggccaggtgatcctgatggaccagaagatgaaggagagcgaccaccagatcatcaagagaagactgagaaccaagaccgccaagtag

SEQ ID NO: 11827 - DNA, 1527 bp, synthetic construct; identical to SEQ ID NO: 11102
  source 1..1527: mol_type = other DNA; note = Synthetic coding sequence

SEQ ID NO: 11828 - DNA, 975 bp, synthetic construct
  source 1..975: mol_type = other DNA; note = Synthetic coding sequence
atgttcatcggcggcctgagctggcagaccagccccgacagcctgagagactacttcagcaagttcggcgagatcagagagtgcatggtgatgagagaccccaccaccaagagaagcagaggcttcggcttcgtgaccttcgccgaccccgccagcgtggacaaggtgctgggccagccccaccacgagctggacagcaagaccatcgaccccaaggtggccttccccagaagagcccagcccaagatggtgaccagaaccaagaagatcttcgtgggcggcctgagcgccaacaccgtggtggaggacgtgaagcagtacttcgagcagttcggcaaggtggaggacgccatgctgatgttcgacaagaccaccaacagacacagaggcttcggcttcgtgaccttcgagaacgaggacgtggtggagaaggtgtgcgagatccacttccacgagatcaacaacaagatggtggagtgcaagaaggcccagcccaaggaggtgatgttcccccccggcaccagaggcagagccagaggcctgccctacaccatggacgccttcatgctgggcatgggcatgctgggctaccccaacttcgtggccacctacggcagaggctaccccggcttcgcccccagctacggctaccagttccccggcttccccgccgccgcctacggccccgtggccgccgccgccgtggccgccgccagaggcagcgtgctgaacagctacagcgcccagcccaacttcggcgcccccgccagccccgccggcagcaaccccgccagacccggcggcttccccggcgccaacagccccggccccgtggccgacctgtacggccccgccagccaggacagcggcgtgggcaactacatcagcgccgccagcccccagcccggcagcggcttcggccacggcatcgccggccccctgatcgccaccgccttcaccaacggctaccactag

SEQ ID NO: 11829 - DNA, 333 bp, synthetic construct
  source 1..333: mol_type = other DNA; note = Synthetic coding sequence
tgacacaagccctgctacggcgccctgttcggccccagaggcgtgaacatcggcggcgtgggcagctacctgtacaacccccccacccccagccccggctgcaccacccccctgagccccagcagcttcagcccccccagacccagaaccggcctgccccagggcaagaagaccgagaaggtgatgagcctgggcagaaactggcacagaccctgcctgagatgccagagatgccacaagaccctgaccgccggcagccacgccgagcacgacggcgtgccctactgccacgtgccctgctacggctacctgttcggccccaaggccctgtag

SEQ ID NO: 11830 - DNA, 411 bp, synthetic construct
  source 1..411: mol_type = other DNA; note = Synthetic coding sequence
atgaccgaggacagccagagaaacttcagaagcgtgtactacgagaaggtgggcttcagaggcgtggaggagaagaagagcctggagatcctgctgaaggacgacagactggacaccgagaagctgtgcaccttcagccagagattccccctgcccagcatgtacagagccctggtgtggaaggtgctgctgggcatcctgcccccccaccacgagagccacgccaaggtgatgatgtacagaaaggagcagtacctggacgtgctgcacgccctgaaggtggtgagattcgtgagcgacgccaccccccaggccgaggtgtacctgagaatgtaccagctggagagcggcaagctgcccagaagccccagcttccccctggagcccgacgacgaggtgttcctggcctag

SEQ ID NO: 11831 - DNA, 1686 bp, synthetic construct
  source 1..1686: mol_type = other DNA; note = Synthetic coding sequence
atggccagccagttctgcctgcccgagagcccctgcctgagccccccccccctgagccccctggccctggcccccagcagcgccatcagagaccagagaaccgccaccaagtgggtggccatgatcccccagaagaaccagaccgccagcggcgacagcctggacgtgagagtgcccagcaagccctgcctgatgaagcagaagaagagcccctgcctgtgggagatccagaagctgcaggagcagagagagaagagaagaagactgcagcaggagatcagagccagaagagccctggacgtgaacaccagaaaccccaactacgagatcatgcacatgatcgaggagtacagaagacacctggacagcagcaagatcagcgtgctggagcccccccaggagcacagaatctgcgtgtgcgtgagaaagagacccctgaaccagagagagaccaccctgaaggaccacgccttcgacgacaaggccagcaacgagctggtgtaccagttcaccgcccagcccctggtggagagcatcttcagaaagggcatggccacctgcttcgcctacggccagaccggcagcggcaagacctacaccatgggcggcgacttcagcggcaccgcccaggactgcagcaagggcatctacgccctggtggcccaggacgtgttcctgctgctgagaaacagcacctacgagaagctggacctgaaggtgtacggcaccttcttcgagatctacggcggcaaggtgtacgacctgctgaactggaagaagaagctgcaggtgctggaggacggcaaccagcagatccaggtggtgggcctgcaggagaaggaggtgtgctgcgtggaggaggtgctgaacctggtggagatcggcaacagctgcagaaccagcagacagacccccgtgaacgcccacagcagcagaagccacgccgtgttccagatcatcctgaagagcggcagaatcatgcacggcaagttcagcctggtggacctggccggcaacgagagaggcgccgacaccaccaaggccagcagaaagagacagctggagggcgccgagatcaacaagagcctgctggccctgaaggagtgcatcctggccctgggccagaacaagccccacacccccttcagagccagcaagctgaccctggtgctgagagacagcttcatcggccagaacagcagcacctgcatgatcgccaccatcagccccggcatgaccagctgcgagaacaccctgaacaccctgagatacgccaacagagtgaagaagctgaacgtggacgtgagaccctaccacagaggccactaccccatcggccacgaggcccccagaatgctgaagagccacatcggcaacagcgagatgagcctgcagagagacgagttcatcaagatcccctacgtgcagagcgaggagcagaaggagatcgaggaggtggagaccctgcccaccctgctgggcaaggacaccaccatcagcggcaagggcagcagccagtggctggagaacatccaggagagagccggcggcgtgcaccacgacatcgacttctgcatcgccagaagcctgagcatcctggagcagaagatcgacgccctgaccgagatccagaagaagctgaagctgctgctggccgacctgcacgtgaagagcaaggtggagtag

SEQ ID NO: 11832 - DNA, 375 bp, synthetic construct
  source 1..375: mol_type = other DNA; note = Synthetic coding sequence
tgaagcgcctgcatcggcaactgcagcaccgccctggaggagctgaccgacgacatgaccgaggacttcctgcccgtgctgagagagtacatcctgtacagcgacagcatgaagagcgtgctgaagaagagagaccaggtgcaggccgagtacgaggccaagctggaggccgtggccctgagaaaggaggacagacccaaggtgcccgccgacgtggagaagtgccaggacagaatggagtgcttcaacgccgacctgaaggccgacatggagagatggcagaacaacaagagacaggacttcagacagctgctgatgggcatggccgacaagaacatccagtactacgagaagagcatcgccgacctgaagtag

SEQ ID NO: 11833 - DNA, 747 bp, synthetic construct; identical to SEQ ID NO: 11765
  source 1..747: mol_type = other DNA; note = Synthetic coding sequence

SEQ ID NO: 11834 - DNA, 1125 bp, synthetic construct
  source 1..1125: mol_type = other DNA; note = Synthetic coding sequence
atggacttcaacatgaagaagctggccagcgacgccggcatcttcttcaccagagccgtgcagttcaccgaggagaagttcggccaggccgagaagaccgagctggacgcccacttcgagaacctgctggccagagccgacagcaccaagaactggaccgagaagatcctgagacagaccgaggtgctgctgcagcccaaccccagcgccagagtggaggagttcctgtacgagaagctggacagaaaggtgcccagcagagtgaccaacggcgagctgctggcccagtacatggccgacgccgccagcgagctgggccccaccaccccctacggcaagaccctgatcaaggtggccgaggccgagaagcagctgggcgccgccgagagagacttcatccacaccgccagcatcagcttcctgacccccctgagaaacttcctggagggcgactggaagaccatcagcaaggagagaagactgctgcagaacagaagactggacctggacgcctgcaaggccagactgaagaaggccaaggccgccgaggccaaggccaccctgtggaacgacgaggtggacaaggccgagcaggagctgagagtggcccagaccgagttcgacagacaggccgaggtgaccagactgctgctggagggcatcagcagcacccacgtgaaccacctgagatgcctgcacgagttcgtgaagagccagaccacctactacgcccagtgctacagacacatgctggacctgcagaagcagctgggcagattccccggcaccttcgtgggcaccaccgagcccgccagcccccccctgagcagcaccagccccaccaccgccgccgccaccatgcccgtggtgcccagcgtggccagcctggccccccccggcgaggccagcctgtgcctggaggaggtggccccccccgccagcggcaccagaaaggccagagtgctgtacgactacgaggccgccgacagcagcgagctggccctgctggccgacgagctgatcaccgtgtacagcctgcccggcatggaccccgactggctgatcggcgagagaggcaacaagaagggcaaggtgcccgtgacctacctggagctgctgagctag

SEQ ID NO: 11835 - DNA, 1188 bp, synthetic construct; identical to SEQ ID NO: 11022
  source 1..1188: mol_type = other DNA; note = Synthetic coding sequence

SEQ ID NO: 11836 - DNA, 1131 bp, synthetic construct
  source 1..1131: mol_type = other DNA; note = Synthetic coding sequence
atggagaagaagaagatggtgacccagggcaaccaggagcccaccaccacccccgacgccatggtgcagcccttcaccaccatccccttccccccccccccccagaacggcatccccaccgagtacggcgtgccccacacccaggactacgccggccagaccggcgagcacaacctgaccctgtacggcagcacccaggcccacggcgagcagagcagcaacagccccagcacccagaacggcagcctgaccaccgagggcggcgcccagaccgacggccagcagagccagacccagagcagcgagaacagcgagagcaagagcacccccaagagactgcacgtgagcaacatccccttcagattcagagaccccgacctgagacagatgttcggccagttcggcaagatcctggacgtggagatcatcttcaacgagagaggcagcaagggcttcggcttcgtgaccttcgagaacagcgccgacgccgacagagccagagagaagctgcacggcaccgtggtggagggcagaaagatcgaggtgaacaacgccaccgccagagtgatgaccaacaagaagatggtgaccccctacgccaacggctggaagctgagccccgtggtgggcgccgtgtacggccccgagctgtacgccgccagcagcttccaggccgacgtgagcctgggcaacgacgccgccgtgcccctgagcggcagaggcggcatcaacacctacatccccctgatcatccccggcttcccctaccccaccgccgccaccaccgccgccgccttcagaggcgcccacctgagaggcagaggcagaaccgtgtacggcgccgtgagagccgtgccccccaccgccatccccgcctaccccggcgtggtgtaccaggacggcttctacggcgccgacctgtacggcggctacgccgcctacagatacgcccagcccgccaccgccaccgccgccaccgccgccgccgccgccgccgccgcctacagcgacggctacggcagagtgtacaccgccgacccctaccacgccctggcccccgccgccagctacggcgtgggcgccgtggccagcctgtacagaggcggctacagcagattcgccccctactag

SEQ ID NO: 11837 - DNA, 1638 bp, synthetic construct
  source 1..1638: mol_type = other DNA; note = Synthetic coding sequence
atgggcaccccctggagaccccccagcagaagaccctggagatggcccaccggctgcaccagaaagacctgcggcccccccacctggagcctggagagaaccagaagctggctgagcggcagagagcacagcgtgttcaccggcgtggccatcgtgcactgcagcagcaaggaccaccagctggacaccagagtgagcgagttctacgaggagaccaaggtgaagttcagcgagctgagcgaggagctgctgtgggagtacgtgcacagcggcgagcccatggacaaggccggcggctacggcatccaggccctgggcggcatgctggtggagagcgtgcacggcgacttcctgaacgtggtgggcttccccctgaaccacttctgcaagcagctggtgaagctgtactacccccccagacccgaggacctgagaagaagcgtgaagcacgacagcatccccgccgccgacaccttcgaggacctgagcgacgtggagggcggcggcagcgagcccacccagagagacgccggcagcagagacgagaaggccgaggccggcgaggccggccaggccaccgccgaggccgagtgccacagaaccagagagaccctgccccccttccccaccagactgctggagctgatcgagggcttcatgctgagcaagggcctgctgaccgcctgcaagctgaaggtgttcgacctgctgaaggacgaggccccccagaaggccgccgacatcgccagcaaggtggacgccagcgcctgcggcatggagagactgctggacatctgcgccgccatgggcctgctggagaagaccgagcagggctacagcaacaccgagaccgccaacgtgtacctggccagcgacggcgagtacagcctgcacggcttcatcatgcacaacaacgacctgacctggaacctgttcacctacctggagttcgccatcagagagggcaccaaccagcaccacagagccctgggcaagaaggccgaggacctgttccaggacgcctactaccagagccccgagaccagactgagattcatgagagccatgcacggcatgaccaagctgaccgcctgccaggtggccaccgccttcaacctgagcagattcagcagcgcctgcgacgtgggcggctgcaccggcgccctggccagagagctggccagagagtaccccagaatgcaggtgaccgtgttcgacctgcccgacatcatcgagctggccgcccacttccagccccccggcccccaggccgtgcagatccacttcgccgccggcgacttcttcagagaccccctgcccagcgccgagctgtacgtgctgtgcagaatcctgcacgactggcccgacgacaaggtgcacaagctgctgagcagagtggccgagagctgcaagcccggcgccggcctgctgctggtggagaccctgctggacgaggagaagagagtggcccagagagccctgatgcagagcctgaacatgctggtgcagaccgagggcaaggagagaagcctgggcgagtaccagtgcctgctggagctgcacggcttccaccaggtgcaggtggtgcacctgggcggcgtgctggacgccatcctggccaccaaggtggccccctag

SEQ ID NO: 11838 - DNA, 621 bp, synthetic construct
  source 1..621: mol_type = other DNA; note = Synthetic coding sequence
atgagccagaccagcctgaagcagaagaagaacgagcccggcatgagaagcagcaaggagagcctggaggccgagaagagaaaggagagcgacaagaccggcgtgagactgagcaaccagatgagaagagccgtgaaccccaaccacagcctgagatgctgccccttccagggccacagcagctgcagaagatgcctgtgcgccgccgagggcaccgccctgggcccctgccacaccatcagaatctacatccacatgtgcctgctgtgggagcagggccagcagatcaccatgatgagagtgagcagagaccacaccaccgacagcggcggcgagccccagaccacctggggcagccaggagagcagcctgagaaagaccgacagcagaggctacctggtgagaagccagtggagcagaatcagcagaagccccagcaccaaggcccccagcatcgacgagcccagaagcagaaacaccagcgccaagctgcccagcagcagcaccagcagcagaacccccagcaccagccccagcctgcacgacagcagccccccccccctgagcggccagcccagcctgcagccccccgccagcccccagctgcccagaagcctgtag

SEQ ID NO: 11839 - DNA, 414 bp, synthetic construct
  source 1..414: mol_type = other DNA; note = Synthetic coding sequence
atggcccccggcacccccaagagcctgctgctgagcgccagcatcaagagagagggcgagagccccaccgccagcccccacagcagcgccaccgacgacctgcaccacagcgacagataccagaccttcctgagagtgagagccaacagacagaccagactgaacgccagaatcggcaagatgaagagaagaaagcaggacgagggccaggtgtgccccctgtgcaacagacccctggccggcagcgagcaggagatgagcagacacgtggagcactgcctgagcaagagagagggcagctgcatggccgaggacgacgccgtggacatcgagcacgagaacaacaacagattcgaggagtacgagtggtgcggccagaagagaatcagagccaccaccctgctggagggctag

SEQ ID NO: 11840 - DNA, 570 bp, synthetic construct
  source 1..570: mol_type = other DNA; note = Synthetic coding sequence
atgatccccatctgccccgtggtgagcttcacctacgtgcccagcagactgggcgaggacgccaagatggccaccggcaactacttcggcttcacccacagcggcgccgccgccgccgccgccgccgcccagtacagccagcagcccgccagcggcgtggcctacagccaccccaccaccgtggccagctacaccgtgcaccaggcccccgtggccgcccacaccgtgaccgccgcctacgcccccgccgccgccaccgtggccgtggccagacccgcccccgtggccgtggccgccgccgccaccgccgccgcctacggcggctaccccaccgcccacaccgccaccgactacggctacacccagagacagcaggaggccccccccccccccccccccgccaccacccagaactaccaggacagctacagctacgtgagaagcaccgcccccgccgtggcctacgacagcaagcagtactaccagcagcccgccgccaccgaggccggcagcagcagcagctgctgctgctgctgcaacagctgcctggacagagaccacctgtactag

SEQ ID NO: 11841 - DNA, 387 bp, synthetic construct
  source 1..387: mol_type = other DNA; note = Synthetic coding sequence
atggacgccgacagcgacgtggccctggacatcctgatcaccaacgtggtgtgcgtgttcagaaccagatgccacctgaacctgagaaagatcgccctggagggcgccaacgtgatctacaagagagacgtgggcaaggtgctgatgaagctgagaaagcccagaatcaccgccaccatctggagcagcggcaagatcatctgcaccggcgccaccagcgaggaggaggccaagttcggcgccagaagactggccagaagcctgcagaagctgggcttccaggtgatcttcaccgacttcaaggtggtgaacgtgctggccgtgtgcaacatgcccttcgagatcagactgcccgagttcaccaagaacaacagaccccacgcctag

SEQ ID NO: 11842 - DNA, 381 bp, synthetic construct
  source 1..381: mol_type = other DNA; note = Synthetic coding sequence
atgtggaccgccagaggccccttcagaagagacagatggagcagcgaggacgaggaggccgccggccccagccaggccctgagccccctgctgagcgacaccagaaagatcgtgagcgagggcgagctggaccagctggcccagatcagacccctgatcttcaacttccacgagcagaccgccatcaaggactgcctgaagatcctggaggagaagaccgccgcctacgacatcatgcaggagttcatggccctggagctgaagaacctgcccggcgagttcaacagcggcaaccagcccagcaacagagagaagaacagatacagagacatcctgcccttccagcaccacggctacagcggccccaacgagagaacctag

SEQ ID NO: 11843 - DNA, 912 bp, synthetic construct
  source 1..912: mol_type = other DNA; note = Synthetic coding sequence
gaggacgagtacatccagagccacaacttcgacagcgccatgaaggtgaccagccagggccagcccagccccgtggagcccagaggccccttctacttctgcagactgctgctggacgacctgggcatgaacagctgggacagaagaaagaacttccacctgctgaagaagaacagcaagctgctgagagagctgaagaacctggacagcagacagtgcagagagacccacaagatcgccgtgttctacatcgccgagggccaggaggacaagtgcagcatcctgagcaacgagagaggcagccaggcctacgaggacttcgtggccggcctgggctgggaggtggacctgagcacccactgcggcttcatgggcggcctgcagagaaacggcagcaccggccagaccgccccctactacgccaccagcaccgtggaggtgatcttccacgtgagcaccagaatgcccagcgacagcgacgacagcctgaccaagaagctgagacacctgggcaacgacgaggtgcacatcgtgtggagcgagcacagcagagactacagaagaggcatcatccccaccgccttcggcgacgtgagcatcatcatctaccccatgaagaaccacatgttcttcatcgccatcaccaagaagcccgaggtgcccttcttcggccccctgttcgacggcgccatcgtgagcggcaagctgctgcccagcctggtgtgcgccacctgcatcaacgccagcagagccgtgaagtgcctgatccccctgtaccagagcttctacgaggagagagccctgtacctggaggccatcatccagaaccacagagaggtgatgaccttcgaggacttcgccgcccaggtgttcagccccagccccagctacagcctgagcggcaccgactag

SEQ ID NO: 11844 - DNA, 2883 bp, synthetic construct
  source 1..2883: mol_type = other DNA; note = Synthetic coding sequence
atggaggtgcaggtgagccaggccagcctgggcttcgagctgaccagcgtggagaagagcctgagagagtggagcagactgagcagagaggtgatcgcctggctgtgccccagcagccccaacttcatcctgaacttcccccccccccccagcgccagcagcgtgagcatggtgcagctgttcagcagccccttcggctaccagagccccagcggccacagcgaggaggagagagagggcaacatgaagagcgccaagccccaggtgaaccacagccagcacggcgagagccagagagccctgagccccctgcagagcaccctgagcagcgccgccagccccagccaggcctacgagacctacatcgagaacggcctgatctgcctgaagcacaagatcagaaacatcgagaagaagaagctgaagctggaggactacaaggacagactgaagagcggcgagcacctgaaccccgaccagctggaggccgtggagaagtacgaggaggtgctgcacaacctggagttcgccaaggagctgcagaagaccttcagcggcctgagcctggacctgctgaaggcccagaagaaggcccagagaagagagcacatgctgaagctggaggccgagaagaagaagctgagaaccatcctgcaggtgcagtacgtgctgcagaacctgacccaggagcacgtgcagaaggacttcaagggcggcctgaacggcgccgtgtacctgcccagcaaggagctggactacctgatcaagttcagcaagctgacctgccccgagagaaacgagagcctgagcgtggaggaccagatggagcagagcagcctgtacttctgggacctgctggagggcagcgagaaggccgtggtgggcaccacctacaagcacctgaaggacctgctgagcaagctgctgaacagcggctacttcgagagcatccccgtgcccaagaacgccaaggagaaggaggtgcccctggaggaggagatgctgatccagagcgagaagaagacccagctgagcaagaccgagagcgtgaaggagagcgagagcctgatggagttcgcccagcccgagatccagccccaggagttcctgaacagaagatacatgaccgaggtggactacagcaacaagcagggcgaggagcagccctgggaggccgactacgccagaaagcccaacctgcccaagagatgggacatgctgaccgagcccgacggccaggagaagaagcaggagagcttcaagagctgggaggccagcggcaagcaccaggaggtgagcaagcccgccgtgagcctggagcagagaaagcaggacaccagcaagctgagaagcaccctgcccgaggagcagaagaagcaggagatcagcaagagcaagcccagccccagccagtggaagcaggacacccccaagagcaaggccggctacgtgcaggaggagcagaagaagcaggagacccccaagctgtggcccgtgcagctgcagaaggagcaggaccccaagaagcagacccccaagagctggacccccagcatgcagagcgagcagaacaccaccaagagctggaccacccccatgtgcgaggagcaggacagcaagcagcccgagacccccaagagctgggagaacaacgtggagagccagaagcacagcctgaccagccagagccagatcagccccaagagctggggcgtggccaccgccagcctgatccccaacgaccagctgctgcccagaaagctgaacaccgagcccaaggacgtgcccaagcccgtgcaccagcccgtgggcagcagcagcaccctgcccaaggaccccgtgctgagaaaggagaagctgcaggacctgatgacccagatccagggcacctgcaacttcatgcaggagagcgtgctggacttcgacaagcccagcagcgccatccccaccagccagccccccagcgccacccccggcagccccgtggccagcaaggagcagaacctgagcagccagagcgacttcctgcaggagcccctgcaggccaccagcagccccgtgacctgcagcagcaacgcctgcctggtgaccaccgaccaggccagcagcggcagcgagaccgagttcatgaccagcgagacccccgaggccgccatcccccccggcaagcagcccagcagcctggccagccccaacccccccatggccaagggcagcgagcagggcttccagagcccccccgccagcagcagcagcgtgaccatcaacaccgcccccttccaggccatgcagaccgtgttcaacgtgaacgcccccctgccccccagaaaggagcaggagatcaaggagagcccctacagccccggctacaaccagagcttcaccaccgccagcacccagacccccccccagtgccagctgcccagcatccacgtggagcagaccgtgcacagccaggagaccgccaactaccaccccgacggcaccatccaggtgagcaacggcagcctggccttctaccccgcccagaccaacgtgttccccagacccacccagcccttcgtgaacagcagaggcagcgtgagaggctgcaccagaggcggcagactgatcaccaacagctacagaagccccggcggctacaagggcttcgacacctacagaggcctgcccagcatcagcaacggcaactacagccagctgcagttccaggccagagagtacagcggcgccccctacagccagagagacaacttccagcagtgctacaagagaggcggcaccagcggcggccccagagccaacagcagagccaactgcttcatcatgagaaacagcctgctgctgatcaagcagcagggcggcgtgatcctgctgagatag

SEQ ID NO: 11845 - DNA, 1746 bp, synthetic construct
  source 1..1746: mol_type = other DNA; note = Synthetic coding sequence
aacaacaacggcacctacgacggcatcgcctacttcgagtgcaaggagaagcacggcatcttcgcccccccccagaagatcagccacatccccgagaacttcgacgactacgtggacatcaacgaggacgaggactgctacagcgacgagagataccagtgctacaaccaggagcagaacgacaccgagggccccaaggacagagagaaggacgtgagcgagtacttctacgagaagagcctgcccagcgtgaacgacatcgaggccagcgtgaacagaagcagaagcctgaagatcgagaccgacaacgtgcaggacatcagcggcgtgctggaggcccacgtgcaccagcagagcagcgtggacagccagatcagcagcaaggagaacaaggacctgatcagcgacgccaccgagaaggtgagcatcgccgccgaggacgacaccctggacaacaccttcagcgaggagctggagaagcagcagcagttcaccgaggaggaggacaacctgtacgccgaggccagcgagaagctgtgcacccccctgctggacctgctgaccagagagaagaaccagctggaggcccagctgaagagcagcctgaacgaggagaagaagagcaagcagcagctggagaagatcagcctgctgaccgacagcctgctgaaggtgttcgtgaaggacaccgtgaaccagctgcagcagatcaagaagaccagagacgagaagatccagctgagcaaccaggagctgctgggcgacgaccagaagaaggtgaccccccaggacctgagccagaacgtggaggagcagagccccagcatcagcggctgcttcctgagcagcgagctggaggacgagaaggaggagatcagcagccccgacatgtgccccagacccgagagccccgtgttcggcgccagcggccaggaggagctggccaagagactggccgagctggagctgagcagagagttcctgagcgccctgggcgacgaccaggactggttcgacgaggacttcggcctgagcagcagccacaagatccagaagaacaaggccgaggagaccatcgtgcccctgatggccgagcccaagagagtgacccagcagccctgcgagaccctgctggccgtgccccacaccgccgaggaggtggagatcctggtgcacaacgccgccgaggagctgtggaagtggaaggagctgggccacgacctgcacagcatcagcatccccaccaagctgctgggctgcgccagcaagggcctggacatcgagagcaccagcaagagagtgtacaagcaggccgtgttcgacctgaccaaggagatcttcgaggagatcttcgccgaggaccccaacctgaaccagcccgtgtggatgaagccctgcagaatcaacagcagctacttcagaagagtgaagaaccccaacaacctggacgagatcaagagcttcatcgccagcgaggtgctgaagctgttcagcctgaagaaggagcccaaccacaagaccgactggcagaagatgatgaagttcggcagaaagaagagagacagagtggaccacatcctggtgcaggagctgcacgaggaggaggcccagtgggtgaactacgacgaggacgagctgtgcgtgaagatgcagctggccgacggcatcttcgagaccctgatcaaggacaccatcgacgtgctgaaccagatcagcgagaagcagggcagaatgctgctggtgtag

SEQ ID NO: 11846 - DNA, 345 bp, synthetic construct
  source 1..345: mol_type = other DNA; note = Synthetic coding sequence
atgtggagcctgaccgccagcgagggcgagagcaccaccgcccacttcttcctgggcgccggcgacgagggcctgggcaccagaggcatcggcatgagacccgaggagagcgacagcgagctgctggaggacgaggaggacgaggtgccccccgagccccagatcatcgtgggcatctgcgccatgaccaagaagagcaagagcaagcccatgacccagatcctggagagactgtgcagattcgactacctgaccgtggtgatcctgggcgaggacgtgatcctgaacgagcccgtggagaactggcccagctgccactgcctgatcagcttccacagcaagtag

SEQ ID NO: 11847 - DNA, 918 bp, synthetic construct
  source 1..918: mol_type = other DNA; note = Synthetic coding sequence
atggaggccgagagcttcccctgcctgctgagacccttcttcaaggagagaagctgcgccctgagacccgccttccacaccgccaagtgcgagaagctgcagaaggagaaggaggagctggagagaagattcgaggccgagatggccagactgcaggaggagcacggcgaccagctgctgagcatcagatgccagcaccaggagcaggtggaggacctgaccgccagccacgacgccgccctgctggagatggagaacaaccacaccgtggccatcaccatcctgcaggacgaccacgaccacaaggtgcaggagctgatgagcacccacgagctggagaagaaggagctggaggagaacttcgagaagctgagactgagcctgcaggaccaggtggacaccctgaccttccagagccagagcctgagagacagagccagaagattcgaggaggccctgagaaagaacaccgaggagcagctggagatcgccctggccccctaccagcacctggaggaggacatgaagagcctgaagcaggtgctggagatgaagaaccagcagatccacgagcaggagaagaagatcctggagctggagaagctggccgagaagaacatcatcctggaggagaagatccaggtgctgcagcagcagaacgaggacctgaaggccagaatcgaccagaacaccgtggtgaccagacagctgagcgaggagaacgccaacctgcaggagtacgtggagaaggagacccaggagaagaagagactgagcagaaccaacgaggagctgctgtggaagctgcagaccggcgaccccaccagccccatcaagctgagccccaccagccccgtgtacagaggcagcagcagcggccccagcagccccgccagagtgagcaccacccccagatag

SEQ ID NO: 11848 - DNA, 2319 bp, synthetic construct
  source 1..2319: mol_type = other DNA; note = Synthetic coding sequence
atgcaggagctggaggagctgagaaagcagctgggcagcgtggccaccggcagcaccctgcagcagagcctggagctgaagagaaagatgctgagagacaagcagaacaagaagaacagcggccagcacctgcccatcttccccgcctgggtgtacgagagacccgccctgatcggcgacttcctgatcggcgccggcatcagcaccgacaccgccctgcccatcggcaccctgcccctggccagccaggagagcgccgtggtggaggacctgctgtacgtgctggtgggcgtggacggcagatacgtgagcgcccagcccctggccggcagacagagcagaaccttcctggtggaccccaacctggacctgagcatcagagagctggtgcacagaatcctgcccgtggccgccagctacagcgccgtgaccagattcatcgaggagaagagcagcttcgagtacggccaggtgaaccacgccctggccgccgccatgagaaccctggtgaaggagcacctgatcctggtgagccagctggagcagctgcacagacagggcctgctgagcctgcagaagctgtggttctacatccagcccgccatgagaaccatggacatcctggccagcctggccaccagcgtggacaagggcgagtgcctgggcggcagcaccctgagcctgctgcacgacagaagcttcagctacaccggcgacagccaggcccaggagctgtgcctgtacctgaccaaggccgccagcgccccctacttcgaggtgctggagaagtggatctacagaggcatcatccacgacccctacagcgagttcatggtggaggagcacgagctgagaaaggagagaatccaggaggactacaacgacaagtactgggaccagagatacaccatcgtgcagcagcagatccccagcttcctgcagaagatggccgacaagatcctgagcaccggcaagtacctgaacgtggtgagagagtgcggccacgacgtgacctgccccgtggccaaggagatcatctacaccctgaaggagagagcctacgtggagcagatcgagaaggccttcaactacgccagcaaggtgctgctggacttcctgatggaggagaaggagctggtggcccacctgagaagcatcaagagatacttcctgatggaccagggcgacttcttcgtgcacttcatggacctggccgaggaggagctgagaaagcccgtggaggacatcaccccccccagactggaggccctgctggagctggccctgagaatgagcaccgccaacaccgaccccttcaaggacgacctgaagatcgacctgatgccccacgacctgatcacccagctgctgagagtgctggccatcgagaccaagcaggagaaggccatggcccacgccgaccccaccgagctggccctgagcggcctggaggccttcagcttcgactacatcgtgaagtggcccctgagcctgatcatcaacagaaaggccctgaccagataccagatgctgttcagacacatgttctactgcaagcacgtggagagacagctgtgcagcgtgtggatcagcaacaagaccgccaagcagcacagcctgcacagcgcccagtggttcgccggcgccttcaccctgagacagagaatgctgaacttcgtgcagaacatccagtactacatgatgttcgaggtgatggagcccacctggcacatcctggagaagaacctgaagagcgccagcaacatcgacgacgtgctgggccaccacaccggcttcctggacacctgcctgaaggactgcatgctgaccaaccccgagctgctgaaggtgttcagcaagctgatgagcgtgtgcgtgatgttcaccaactgcatgcagaagttcacccagagcatgaagctggacggcgagctgggcggccagaccctggagcacagcaccgtgctgggcctgcccgccggcgccgaggagagagccagaaaggagctggccagaaagcacctggccgagcacgccgacaccgtgcagctggtgagcggcttcgaggccaccatcaacaagttcgacaagaacttcagcgcccacctgctggacctgctggccagactgagcatctacagcaccagcgactgcgagcacggcatggccagcgtgatcagcagactggacttcaacggcttctacaccgagagactggagagactgagcgccgagagaagccagaaggccaccccccaggtgcccgtgctgagaggcccccccgcccccgcccccagagtggccgtgaccgcccagtag

SEQ ID NO: 11849 - DNA, 1203 bp, synthetic construct
  source 1..1203: mol_type = other DNA; note = Synthetic coding sequence
atggacttcaacatgaagaagctggccagcgacgccggcatcttcttcaccagagccgtgcagttcaccgaggagaagttcggccaggccgagaagaccgagctggacgcccacttcgagaacctgctggccagagccgacagcaccaagaactggaccgagaagatcctgagacagaccgaggtgctgctgcagcccaaccccagcgccagagtggaggagttcctgtacgagaagctggacagaaaggtgcccagcagagtgaccaacggcgagctgctggcccagtacatggccgacgccgccagcgagctgggccccaccaccccctacggcaagaccctgatcaaggtggccgaggccgagaagcagctgggcgccgccgagagagacttcatccacaccgccagcatcagcttcctgacccccctgagaaacttcctggagggcgactggaagaccatcagcaaggagagaagactgctgcagaacagaagactggacctggacgcctgcaaggccagactgaagaaggccaaggccgccgaggccaaggccaccaccgtgcccgacttccaggagaccagacccagaaactacatcctgagcgccagcgccagcgccctgtggaacgacgaggtggacaaggccgagcaggagctgagagtggcccagaccgagttcgacagacaggccgaggtgaccagactgctgctggagggcatcagcagcacccacgtgaaccacctgagatgcctgcacgagttcgtgaagagccagaccacctactacgcccagtgctacagacacatgctggacctgcagaagcagctgggcagcagccagggcgccatcttccccggcaccttcgtgggcaccaccgagcccgccagcccccccctgagcagcaccagccccaccaccgccgccgccaccatgcccgtggtgcccagcgtggccagcctggccccccccggcgaggccagcctgtgcctggaggaggtggccccccccgccagcggcaccagaaaggccagagtgctgtacgactacgaggccgccgacagcagcgagctggccctgctggccgacgagctgatcaccgtgtacagcctgcccggcatggaccccgactggctgatcggcgagagaggcaacaagaagggcaaggtgcccgtgacctacctggagctgctgagctag

SEQ ID NO: 11850 - DNA, 1827 bp, synthetic construct
  source 1..1827: mol_type = other DNA; note = Synthetic coding sequence
atgcccttctggcccatcagatgcctgaagagaagcagaagaatgcccagaggcggcgccggcgagagagagaaggtgcccgccaaccccgaggccctgctgctgatggccagcagccagagagacatggaggactgggtgcaggccatcagaagagtgatctgggcccccctgggcggcggcatcttcggccagagactggaggagaccgtgcaccacgagagaaagtacggccccagactggcccccctgctggtggagcagtgcgtggacttcatcagagagagaggcctgaccgaggagggcctgttcagaatgcccggccaggccaacctggtgagagacctgcaggacagcttcgactgcggcgagaagcccctgttcgacagcaccaccgacgtgcacaccgtggccagcctgctgaagctgtacctgagagagctgcccgagcccgtggtgcccttcgccagatacgaggacttcctgagctgcgcccagctgctgaccaaggacgagggcgagggcaccctggagctggccaagcaggtgagcaacctgccccaggccaactacaacctgctgagatacatctgcaagttcctggacgaggtgcaggcctacagcaacgtgaacaagatgagcgtgcagaacctggccaccgtgttcggccccaacatcctgagaccccaggtggaggaccccgtgaccatcatggagggcaccagcctggtgcagcacctgatgaccgtgctgatcagaaagcacagccagctgttcaccgcccccgtgcccgagggccccaccagccccagaggcggcctgcagtgcgccgtgggctggggcagcgaggaggtgaccagagacagccagggcgagcccggcggccccggcctgcccgcccacagaaccagcagcctggacggcgccgccgtggccgtgctgagcagaaccgcccccaccggccccggcagcagatgcagccccggcaagaaggtgcagaccctgcccagctggaagagcagcttcagacagcccagaagcctgagcggcagccccaagggcggcggcagcagcctggaggtgcccatcatcagcagcggcggcaactggctgatgaacggcctgagcagcctgagaggccacagaagagccagcagcggcgacagactgaaggacagcggcagcgtgcagagactgagcacctacgacaacgtgcccgcccccggcctggtgcccggcatccccagcgtggccagcatggcctggagcggcgccagcagcagcgagagcagcgtgggcggcagcctgagcagctgcaccgcctgcagagccagcgacagcagcgccagaagcagcctgcacaccgactgggccctggagcccagccccctgcccagcagcagcgaggaccccaagagcctggacctggaccacagcatggacgaggccggcgccggcgccagcaacagcgagcccagcgagcccgacagccccaccagagagcacgccagaagaagcgaggccctgcagggcctggtgaccgagctgagagccgagctgtgcagacagagaaccgagtacgagagaagcgtgaagagaatcgaggagggcagcgccgacctgagaaagagaatgagcagactggaggaggagctggaccaggagaagaagaagtacatcatgctggagatcaagctgagaaacagcgagagagccagagaggacgccgagagaagaaaccagctgctgcagagagagatggaggagttcttcagcaccctgggcagcctgaccgtgggcgccaagggcgccagagcccccaagtag

SEQ ID NO: 11851 - DNA, 708 bp, synthetic construct
  source 1..708: mol_type = other DNA; note = Synthetic coding sequence
atgttcagcgaggagtgcatcatggacgtgatcggctgcctggagtacgaccccgccctgagccagcccagaaagcacagagagttcctgaccaagaccgccaagttcaaggaggtgatccccatcagcgaccccgagctgaagcagaagatccaccagacctacagagtgcagtacatccaggacatggtgctgcccacccccagcgtgttcgaggagaacatgctgagcaccctgcacagcttcatcttcttcaacaaggtggagatcgtgggcatgctgcaggaggacgagaagttcctgaccgacctgttcgcccagctgaccgacgaggccaccgacgaggagaagagacaggagctggtgaacttcctgaaggagttctgcgccttcagccagaccctgcagccccagaacagagacgccttcttcaagaccctgagcaacatgggcatcctgcccgccctggaggtgatcctgggcatggacgacacccaggtgagaagcgccgccaccgacatcttcagctacctggtggagtacaaccccagcatggtgagagagttcgtgatgcaggaggcccagcagaacgacgacgtgagcaagaagctgaccgagcagaagatcaccagcaaggtgaacatcatctgcaccaacagcaagtacctgtacatcggcagctacaactgcttctactacagcttctag

SEQ ID NO: 11852 - DNA, 3513 bp, synthetic construct
  source 1..3513: mol_type = other DNA; note = Synthetic coding sequence
gtgtacaagggcagacacgtgaagaccggccagctggccgccatcaaggtgatggacgtgaccgaggacgaggaggaggagatcaagctggagatcaacatgctgaagaagtacagccaccacagaaacatcgccacctactacggcgccttcatcaagaagagcccccccggccacgacgaccagctgtggctggtgatggagttctgcggcgccggcagcatcaccgacctggtgaagaacaccaagggcaacaccctgaaggaggactggatcgcctacatcagcagagagatcctgagaggcctggcccacctgcacatccaccacgtgatccacagagacatcaagggccagaacgtgctgctgaccgagaacgccgaggtgaagctggtggacttcggcgtgagcgcccagctggacagaaccgtgggcagaagaaacaccttcatcggcaccccctactggatggcccccgaggtgatcgcctgcgacgagaaccccgacgccacctacgactacagaagcgacctgtggagctgcggcatcaccgccatcgagatggccgagggcgccccccccctgtgcgacatgcaccccatgagagccctgttcctgatccccagaaaccccccccccagactgaagagcaagaagtggagcaagaagttcttcagcttcatcgagggctgcctggtgaagaactacatgcagagacccagcaccgagcagctgctgaagcaccccttcatcagagaccagcccaacgagagacaggtgagaatccagctgaaggaccacatcgacagaaccagaaagaagagaggcgagaaggacgagaccgagtacgagtacagcggcagcgaggaggaggaggaggaggtgcccgagcaggagggcgagcccagcagcatcgtgaacgtgcccggcgagagcaccctgagaagagacttcctgagactgcagcaggagaacaaggagagaagcgaggccctgagaagacagcagctgctgcaggagcagcagctgagagagcaggaggagtacaagagacagctgctggccgagagacagaagagaatcgagcagcagaaggagcagagaagaagactggaggagcagcagagaagagagagagaggccagaagacagcaggagagagagcagagaagaagagagcaggaggagaagagaagactggaggagctggagagaagaagaaaggaggaggaggagagaagaagagccgaggaggagaagagaagagtggagagagagcaggagtacatcagaagacagctggaggaggagcagagacacctggaggtgctgcagcagcagctgctgcaggagcaggccatgctgctgcacgaccacagaagaccccacccccagcacagccagcagcccccccccccccagcaggagagaagcaagcccagcttccacgcccccgagcccaaggcccactacgagcccgccgacagagccagagaggtggaggacagattcagaaagaccaaccacagcagccccgaggcccagagcaagcagaccggcagagtgctggagccccccgtgcccagcagaagcgagagcttcagcaacggcaacagcgagagcgtgcaccccgccctgcagagacccgccgagccccaggtgcccgtgagaaccaccagcagaagccccgtgctgagcagaagagacagccccctgcagggcagcggccagcagaacagccaggccggccagagaaacagcaccagcatcgagcccagactgctgtgggagagagtggagaagctggtgcccagacccggcagcggcagcagcagcggcagcagcaacagcggcagccagcccggcagccaccccggcagccagagcggcagcggcgagagattcagagtgagaagcagcagcaagagcgagggcagccccagccagagactggagaacgccgtgaagaagcccgaggacaagaaggaggtgttcagacccctgaagcccgccgacctgaccgccctggccaaggagctgagagccgtggaggacgtgagacccccccacaaggtgaccgactacagcagcagcagcgaggagagcggcaccaccgacgaggaggacgacgacgtggagcaggagggcgccgacgagagcaccagcggccccgaggacaccagagccgccagcagcctgaacctgagcaacggcgagaccgagagcgtgaagaccatgatcgtgcacgacgacgtggagagcgagcccgccatgacccccagcaaggagggcaccctgatcgtgagacagacccagagcgccagcagcaccctgcagaagcacaagagcagcagcagcttcacccccttcatcgaccccagactgctgcagatcagccccagcagcggcaccaccgtgaccagcgtggtgggcttcagctgcgacggcatgagacccgaggccatcagacaggaccccaccagaaagggcagcgtggtgaacgtgaaccccaccaacaccagaccccagagcgacacccccgagatcagaaagtacaagaagagattcaacagcgagatcctgtgcgccgccctgtggggcgtgaacctgctggtgggcaccgagagcggcctgatgctgctggacagaagcggccagggcaaggtgtaccccctgatcaacagaagaagattccagcagatggacgtgctggagggcctgaacgtgctggtgaccatcagcggcaagaaggacaagctgagagtgtactacctgagctggctgagaaacaagatcctgcacaacgaccccgaggtggagaagaagcagggctggaccaccgtgggcgacctggagggctgcgtgcactacaaggtggtgaagtacgagagaatcaagttcctggtgatcgccctgaagagcagcgtggaggtgtacgcctgggcccccaagccctaccacaagttcatggccttcaagagcttcggcgagctggtgcacaagcccctgctggtggacctgaccgtggaggagggccagagactgaaggtgatctacggcagctgcgccggcttccacgccgtggacgtggacagcggcagcgtgtacgacatctacctgcccacccacatccagtgcagcatcaagccccacgccatcatcatcctgcccaacaccgacggcatggagctgctggtgtgctacgaggacgagggcgtgtacgtgaacacctacggcagaatcaccaaggacgtggtgctgcagtggggcgagatgcccaccagcgtggcctacatcagaagcaaccagaccatgggctggggcgagaaggccatcgagatcagaagcgtggagaccggccacctggacggcgtgttcatgcacaagagagcccagagactgaagttcctgtgcgagagaaacgacaaggtgttcttcgccagcgtgagaagcggcggcagcagccaggtgtacttcatgaccctgggcagaaccagcctgctgagctggtag

SEQ ID NO: 11853 - DNA, 1476 bp, synthetic construct
  source 1..1476: mol_type = other DNA; note = Synthetic coding sequence
gtgatcatccacagagtgctggagaagcaggaggtggaggtgttctaccccgacttcggcaacatcggcatcgtgcagaagagcagcctgagattcctgaagtgctgctacaccaagctgcccgcccaggccatcccctgcagcctggcctgggtgagacccgtggaggagcactggaccagcaaggccatcctgcagttccagaagctgtgcggcctgaagcccctggtgggcgtggtggacgagtacgtggacggcatcctgaacatcttcctgtgcgacaccagcagcaacgaggacgtgtacttccaccacgtgctgagaaccgagggccacgccatcgtgtgcagagagaacatcagcagcaagggcttcagcgagctgaaccccctggccctgtacaccaccagcagcggcggccccgaggacatcgtgctgaccgagctgggctaccccagccagcagcactacttcaacgaggacagaaagatcagcccccagagcaaggagagcgagctgagaatcctgcaggacatcaacgacgagaagagcctgagccacctgaagagcgagagcaaggagcccctgaaggacagcgagttcgagagcctgaagacctgcaacaagagcttcgaggaggaccccaagtggagcaaccccgagcccaacgacctgaaggaggagaacgaggacgagatccccaccggcatgccctgcctggagagcgtgaccatcggcgacgacatctgggacgagaactggctgcccctgcaggccaagatgggcaagggcggcgacgccgccagccacctgttcaccgccagcctgggcggcaagaaccagtacagcagctgcaaggagatgccccagaaggactggtgcttcagcacccccaaggacacctgggacgacagctggcagcccagcggcctggtgaacggcaccaaggtggaggtgcacaagcccgaggtgctgggcgcccaggagaagaacaccggcaccaacagaacccagaagcagctggacatcaacggcagcagcgacagcagcaccctgcccaagctggaggagttctgcaccagcctgacccagagcgagcagagcgccgacggcagccagagcgagcccaacaacagccagacccagcccaagcagatccagctgagcaccgccgccccctgcagcaccaccgccgtggacgacagcgccgagaagcccagcggcagcgtggagagcagccccgagatcctgaagaacgaggacttcagcagcagcagagccatcaccctgtacaaggacaagagacaggagagcgtggaccagctgagcctgatcctgagctacgagtgccagatcagccagaagctgtacatccccagaagcaccgccaccgccgccctgggcgccgccgccagactggccaccagcagaagcctgctgcactggtaccccagcgtgaagagaatggaggcctag

SEQ ID NO: 11854 - DNA, 426 bp, synthetic construct
  source 1..426: mol_type = other DNA; note = Synthetic coding sequence
atgcccaccaccagcagacccgccctggacgtgaagggcggcaccagccccgccaaggaggacgccaaccaggagatgagcagcgtggcctacagcaacctggccgtgaaggacagaaaggccgtggccatcctgcactaccccggcgtggccagcaacggcaccaaggccagcggcgcccccaccagcagcagcggcagccccatcggcagccccaccaccaccccccccaccaagccccccagcttcaacctgcaccccgccccccacctgctggccagcatgcacctgcagaagctgaacagccagtaccagggcatggccgccgccacccccggccagcccggcgaggccggccccctgcagaactgggacttcggcgcccaggccggcggcgccgagagcctgagccccagcgccggctag

SEQ ID NO: 11855 - DNA, 1188 bp, synthetic construct; identical to SEQ ID NO: 11022
  source 1..1188: mol_type = other DNA; note = Synthetic coding sequence

SEQ ID NO: 11856 - DNA, 1344 bp, synthetic construct
  source 1..1344: mol_type = other DNA; note = Synthetic coding sequence
atggccaccgacagctgggccctggccgtggacgagcaggaggccgccgtgaagagcatgaccaacctgcagatcaaggaggagaaggtgaaggccgacaccaacggcatcatcaagaccagcaccaccgccgagaagaccgacgaggaggagaaggaggacagagccgcccagagcctgctgaacaagctgatcagaagcaacctggtggacaacaccaaccaggtggaggtgctgcagagagaccccaacagccccctgtacagcgtgaagagcttcgaggagctgagactgccccagaacctgatcgcccagagccagagcggcaccggcaagaccgccgccttcgtgctggccatgctgagcagagtggagcccagcgacagatacccccagtgcctgtgcctgagccccacctacgagctggccctgcagaccggcaaggtgatcgagcagatgggcaagttctaccccgagctgaagctggcctacgccgtgagaggcaacaagctggagagaggccagaagatcagcgagcagatcgtgatcggcacccccggcaccgtgctggactggtgcagcaagctgaagttcatcgaccccaagaagatcaaggtgttcgtgctggacgaggccgacgtgatgatcgccacccagggccaccaggaccagagcatcagaatccagagaatgctgcccagaaactgccagatgctgctgttcagcgccaccttcgaggacagcgtgtggaagttcgcccagaaggtggtgcccgaccccaacgtgatcaagctgaagagagaggaggagaccctggacaccatcaagcagtactacgtgctgtgcagcagcagagacgagaagttccaggccctgtgcaacctgtacggcgccatcaccatcgcccaggccatgatcttctgccacaccagaaagaccgccagctggctggccgccgagctgagcaaggagggccaccaggtggccctgctgagcggcgagatgatggtggagcagagagccgccgtgatcgagagattcagagagggcaaggagaaggtgctggtgaccaccaacgtgtgcgccagaggcatcgacgtggagcaggtgagcgtggtgatcaacttcgacctgcccgtggacaaggacggcaaccccgacaacgagacctacctgcacagaatcggcagaaccggcagattcggcaagagaggcctggccgtgaacatggtggacagcaagcacagcatgaacatcctgaacagaatccaggagcacttcaacaagaagatcgagagactggacaccgacgacctggacgagatcgagaagatcgccaactag

SEQ ID NO: 11857 - DNA, 630 bp, synthetic construct
  source 1..630: mol_type = other DNA; note = Synthetic coding sequence
atggccagcagcgacctggagcagctgtgcagccacgtgaacgagaagatcggcaacatcaagaagaccctgagcctgagaaactgcggccaggagcccaccctgaagaccgtgctgaacaagatcggcgacgagatcatcgtgatcaacgagctgctgaacaagctggagctggagatccagtaccaggagcagaccaacaacagcctgaaggagctgtgcgagagcctggaggaggactacaaggacatcgagcacctgaaggagaacgtgcccagccacctgccccaggtgaccgtgacccagagctggtacatgaagagcagactgacctacaaccagatcaacgacgtgatcaaggagatcaacaaggccgtgatcagcaagtacaagatcctgcaccagcccaagaagagcatgaacagcgtgaccagaaacctgtaccacagattcatcgacgaggagaccaaggacaccaagggcagatacttcatcgtggaggccgacatcaaggagttcaccaccctgaaggccgacaagaagttccacgtgctgctgaacatcctgagacactgcagaagactgagcgaggtgagaggcggcggcctgaccagatacgtgatcacctag

SEQ ID NO: 11858 - DNA, 1125 bp, synthetic construct
  source 1..1125: mol_type = other DNA; note = Synthetic coding sequence
atggacagcgtgagaagcggccccttcggccagctgttcagacccgacaacttcatcttcggccagaccggcgccggcaacaactgggccaagggccactacaccgagggcgccgagctggtggacgccgtgctggacgtggtgagaaaggagtgcgagcactgcgactgcctgcagggcttccagctgacccacagcctgggcggcggcaccggcagcggcatgggcaccctgctgatcagcaagatcagagaggagttccccgacagaatcatgaacaccttcagcgtgatgcccagccccaaggtgagcgacaccgtggtggagccctacaacgccaccctgagcgtgcaccagctggtggagaacaccgacgagacctactgcatcgacaacgaggccctgtacgacatctgcttcagaaccctgaagctgaccacccccacctacggcgacctgaaccacctggtgagcgccaccatgagcggcgtgaccaccagcctgagattccccggccagctgaacgccgacctgagaaagctggccgtgaacatggtgcccttccccagactgcacttcttcatgcccggcttcgcccccctgaccagcagaggcagccagcagtacagagccctgaccgtgcccgagctgacccagcagatgttcgacgccagaaacatgatggccgcctgcgaccccagacacggcagatacctgaccgtggccaccgtgttcagaggccccatgagcatgaaggaggtggacgagcagatgctggccatccagagcaagaacagcagctacttcgtggagtggatccccaacaacgtgaaggtggccgtgtgcgacatcccccccagaggcctgaagatggccagcaccttcatcggcaacagcaccgccatccaggagctgttcaagagaatcagcgagcagttcagcgccatgttcagaagaaaggccttcctgcactggttcaccggcgagggcatggacgagatggagttcaccgaggccgagagcaacatgaacgacctggtgagcgagtaccagcagtaccaggacgccaccgccaacgacggcgaggaggccttcgaggacgaggaggaggagatcgacggctag

SEQ ID NO: 11859 - DNA, 2289 bp, synthetic construct
  source 1..2289: mol_type = other DNA; note = Synthetic coding sequence
atggccagcctgctgcaggaccagctgaccaccgaccaggacctgctgctgatgcaggagggcatgcccatgagaaaggtgagaagcaagagctggaagaagctgagatacttcagactgcagaacgacggcatgaccgtgtggcacgccagacaggccagaggcagcgccaagcccagcttcagcatcagcgacgtggagaccatcagaaacggccacgacagcgagctgctgagaagcctggccgaggagctgcccctggagcagggcttcaccatcgtgttccacggcagaagaagcaacctggacctgatggccaacagcgtggaggaggcccagatctggatgagaggcctgcagctgctggtggacctggtgaccagcatggaccaccaggagagactggaccagtggctgagcgactggttccagagaggcgacaagaaccaggacggcaagatgagcttccaggaggtgcagagactgctgcacctgatgaacgtggagatggaccaggagtacgccttcagcctgttccaggccgccgacaccagccagagcggcaccctggagggcgaggagttcgtgcagttctacaaggccctgaccaagagagccgaggtgcaggagctgttcgagagcttcagcgccgacggccagaagctgaccctgctggagttcctggacttcctgcaggaggagcagaaggagagagactgcaccagcgagctggccctggagctgatcgacagatacgagcccagcgacagcggcaagctgagacacgtgctgagcatggacggcttcctgagctacctgtgcagcaaggacggcgacatcttcaaccccgcctgcctgcccatctaccaggacatgacccagcccctgaaccactacttcatctgcagcagccacaacacctacctggtgggcgaccagctgtgcggccagagcagcgtggagggctacatcagagccctgaagagaggctgcagatgcgtggaggtggacgtgtgggacggccccagcggcgagcccgtggtgtaccacggccacaccctgaccagcagaatcctgttcaaggacgtggtggccaccgtggcccagtacgccttccagaccagcgactaccccgtgatcctgagcctggagacccactgcagctgggagcagcagcagaccatggccagacacctgaccgagatcctgggcgagcagctgctgagcaccaccctggacggcgtgctgcccacccagctgcccagccccgaggagctgagaagaaagatcctggtgaagggcaagaagctgaccctggaggaggacctggagtacgaggaggaggaggccgagcccgagctggaggagagcgagctggccctggagagccagttcgagaccgagcccgagccccaggagcagaacctgcagaacaaggacaagaagaagaagagcaagcccatcctgtgccccgccctgagcagcctggtgatctacctgaagagcgtgagcttcagaagcttcacccacagcaaggagcactaccacttctacgagatcagcagcttcagcgagaccaaggccaagagactgatcaaggaggccggcaacgagttcgtgcagcacaacacctggcagctgagcagagtgtaccccagcggcctgagaaccgacagcagcaactacaacccccaggagctgtggaacgccggctgccagatggtggccatgaacatgcagaccgccggcctggagatggacatctgcgacggccacttcagacagaacggcggctgcggctacgtgctgaagcccgacttcctgagagacatccagagcagcttccaccccgagaagcccatcagccccttcaaggcccagaccctgctgatccaggtgatcagcggccagcagctgcccaaggtggacaagaccaaggagggcagcatcgtggaccccctggtgaaggtgcagatcttcggcgtgagactggacaccgccagacaggagaccaactacgtggagaacaacggcttcaacccctactggggccagaccctgtgcttcagagtgctggtgcccgagctggccatgctgagattcgtggtgatggactacgactggaagagcagaaacgacttcatcggccagtacaccctgccctggacctgcatgcagcagggctacagacacatccacctgctgagcaaggacggcatcagcctgagacccgccagcatcttcgtgtacatctgcatccaggagggcctggagggcgacgagagctag

SEQ ID NO: 11860 - DNA, 1461 bp, synthetic construct
  source 1..1461: mol_type = other DNA; note = Synthetic coding sequence
atggccgagctgcagatgctgctggaggaggagatccccggcggcagaagagccctgttcgacagctacaccaacctggagagagtggccgactactgcgagaacaactacatccagagcgccgacaagcagagagccctggaggagaccaaggcctacaccacccagagcctggccagcgtggcctacctgatcaacaccctggccaacaacgtgctgcagatgctggacatccaggccagccagctgagaagaatggagagcagcatcaaccacatcagccagaccgtggacatccacaaggagaaggtggccagaagagagatcggcatcctgaccaccaacaagaacaccagcagaacccacaagatcatcgcccccgccaacctggagagacccgtgagatacatcagaaagcccatcgactacaccatcctggacgacatcggccacggcgtgaagtggctgctgagattcaaggtgagcacccagaacatgaagatgggcggcctgcccagaaccaccccccccacccagaagccccccagcccccccatgagcggcaagggcaccctgggcagacacagcccctacagaaccctggagcccgtgagaccccccgtggtgcccaacgactacgtgcccagccccaccagaaacatggcccccagccagcagagccccgtgagaaccgccagcgtgaaccagagaaacagaacctacagcagcagcggcagcagcggcggcagccaccccagcagcagaagcagcagcagagagaacagcggcagcggcagcgtgggcgtgcccatcgccgtgcccacccccagcccccccagcgtgttccccgcccccgccggcagcgccggcaccccccccctgcccgccaccagcgccagcgcccccgcccccctggtgcccgccaccgtgcccagcagcaccgcccccgacgccgccgccggcggcgcccagaccctggccgacggcttcaccagccccaccccccccgtggtgagcagcaccccccccaccggccaccccgtgcagttctacagcatgaacagacccgccagcagacacaccccccccaccatcggcggcagcctgccctacagaagaccccccagcatcaccagccagaccagcctgcagaaccagatgaacggcggccccttctacagccagaaccccgtgagcgacaccccccccccccccccccccgtggaggagcccgtgttcgacgagagccccccccccccccccccccccgaggactacgaggaggaggaggccgccgtggtggagtacagcgacccctacgccgaggaggaccccccctgggcccccagaagctacctggagaaggtggtggccatctacgactacaccaaggacaaggaggacgagctgagcttccaggagggcgccatcatctacgtgatcaagaagaacgacgactag

SEQ ID NO: 11861 - DNA, 2145 bp, synthetic construct
  source 1..2145: mol_type = other DNA; note = Synthetic coding sequence
atgctgagccccaagatcagacaggccagaagagccagaagcaagagcctggtgatgggcgagcagagcagaagccccggcagaatgccctgcccccacagactgggccccgtgctgaaggccggctggctgaagaagcagagaagcatcatgaagaactggcagcagagatggttcgtgctgagaggcgaccagctgttctactacaaggacaaggacgagatcaagccccagggcttcatcagcctgcagggcacccaggtgaccgagctgccccccggccccgaggaccccggcaagcacctgttcgagatcagccccggcggcgccggcgagagagagaaggtgcccgccaaccccgaggccctgctgctgatggccagcagccagagagacatggaggactgggtgcaggccatcagaagagtgatctgggcccccctgggcggcggcaccgccagaagaagccacgcccaccccctggagcccctgccccccggcatcttcggccagagactggaggagaccgtgcaccacgagagaaagtacggccccagactggcccccctgctggtggagcagtgcgtggacttcatcagagagagaggcctgaccgaggagggcctgttcagaatgcccggccaggccaacctggtgagagacctgcaggacagcttcgactgcggcgagaagcccctgttcgacagcaccaccgacgtgcacaccgtggccagcctgctgaagctgtacctgagagagctgcccgagcccgtggtgcccttcgccagatacgaggacttcctgagctgcgcccagctgctgaccaaggacgagggcgagggcaccctggagctggccaagcaggtgagcaacctgccccaggccaactacaacctgctgagatacatctgcaagttcctggacgaggtgcaggcctacagcaacgtgaacaagatgagcgtgcagaacctggccaccgtgttcggccccaacatcctgagaccccaggtggaggaccccgtgaccatcatggagggcaccagcctggtgcagcacctgatgaccgtgctgatcagaaagcacagccagctgttcaccgcccccgtgcccgagggccccaccagccccagaggcggcctgcagtgcgccgtgggctggggcagcgaggaggtgaccagagacagccagggcgagcccggcggccccggcctgcccgcccacagaaccagcagcctggacggcgccgccgtggccgtgctgagcagaaccgcccccaccggccccggcagcagatgcagccccggcaagaaggtgcagaccctgcccagctggaagagcagcttcagacagcccagaagcctgagcggcagccccaagggcggcggcagcagcctggaggtgcccatcatcagcagcggcggcaactggctgatgaacggcctgagcagcctgagaggccacagaagagccagcagcggcgacagactgaaggacagcggcagcgtgcagagactgagcacctacgacaacgtgcccgcccccggcctggtgcccggcatccccagcgtggccagcatggcctggagcggcgccagcagcagcgagagcagcgtgggcggcagcctgagcagctgcaccgcctgcagagccagcgacagcagcgccagaagcagcctgcacaccgactgggccctggagcccagccccctgcccagcagcagcgaggaccccaagagcctggacctggaccacagcatggacgaggccggcgccggcgccagcaacagcgagcccagcgagcccgacagccccaccagagagcacgccagaagaagcgaggccctgcagggcctggtgaccgagctgagagccgagctgtgcagacagagaaccgagtacgagagaagcgtgaagagaatcgaggagggcagcgccgacctgagaaagagaatgagcagactggaggaggagctggaccaggagaagaagaagtacatcatgctggagatcaagctgagaaacagcgagagagccagagaggacgccgagagaagaaaccagctgctgcagagagagatggaggagttcttcagcaccctgggcagcctgaccgtgggcgccaagggcgccagagcccccaagtag

SEQ ID NO: 11862 - DNA, 381 bp, synthetic construct; identical to SEQ ID NO: 11842
  source 1..381: mol_type = other DNA; note = Synthetic coding sequence

SEQ ID NO: 11863 - DNA, 2442 bp, synthetic construct
  source 1..2442: mol_type = other DNA; note = Synthetic coding sequence
atgagcgagcagggcgacctgaaccaggccatcgccgaggagggcggcaccgagcaggagaccgccacccccgagaacggcatcgtgaagagcgagagcctggacgaggaggagaagctggagctgcagagaagactggaggcccagaaccaggagagaagaaagagcaagagcggcgccggcaagggcaagctgaccagaagcctggccgtgtgcgaggagagcagcgccagacccggcggcgagagcctgcaggaccaggagagcatccacctgcagctgagcagcttcagcagcctgcaggaggaggacaagagcagaaaggacgacagcgagagagagaaggagaaggacaagaacaaggacaagaccagcgagaagcccaagatcagaatgctgagcaaggactgcagccaggagtacaccgacagcaccggcatcgacctgcacgagttcctgatcaacaccctgaagaacaacagcagagacagaatgatcctgctgaagatggagcaggagatcatcgacttcatcgccgacaacaacaaccactacaagaagttcccccagatgagcagctaccagagaatgctggtgcacagagtggccgcctacttcggcctggaccacaacgtggaccagaccggcaagagcgtgatcatcaacaagaccagcagcaccagaatccccgagcagagattctgcgagcacctgaaggacgagaagggcgaggagagccagaagagattcatcctgaagagagacaacagcagcatcgacaaggaggacaaccagagcgtgtgcagccaggagagcctgttcgtggagaacagcagactgctggaggacagcaacatctgcaacgagacctacaagaagagacagctgttcagaggcaacagagacggcagcggcagaaccagcggcagcagacagagcagcagcgagaacgagctgaagtggagcgaccaccagagagcctggagcagcaccgacagcgacagcagcaacagaaacctgaagcccgccatgaccaagaccgccagcttcggcggcatcaccgtgctgaccagaggcgacagcaccagcagcaccagaagcaccggcaagctgagcaaggccggcagcgagagcagcagcagcgccggcagcagcggcagcctgagcagaacccacccccccctgcagagcacccccctggtgagcggcgtggccgccggcagccccggctgcgtgccctaccccgagaacggcatcggcggccaggtggcccccagcagcaccagctacatcctgctgcccctggaggccgccaccggcatcccccccggcagcatcctgctgaacccccacaccggccagcccttcgtgaaccccgacggcacccccgccatctacaacccccccaccagccagcagcccctgagaagcgccatggtgggccagagccagcagcagcccccccagcagcagcccagcccccagccccagcagcaggtgcagcccccccagccccagatggccggccccctggtgacccagagcgtgcagggcctgcaggccagcagccagagcgtgcagtaccccgccgtgagcttccccccccagcacctgctgcccgtgagccccacccagcacttccccatgagagacgacgtggccacccagttcggccagatgaccctgagcagacagagcagcggcgagacccccgagccccccagcggccccgtgtaccccagcagcctgatgccccagcccgcccagcagcccagctacgtgatcgccagcaccggccagcagctgcccaccggcggcttcagcggcagcggcccccccatcagccagcaggtgctgcagcccccccccagcccccagggcttcgtgcagcagcccccccccgcccagatgcccgtgtactactaccccagcggccagtaccccaccagcaccacccagcagtacagacccatggcccccgtgcagtacaacgcccagagaagccagcagatgccccaggccgcccagcaggccggctaccagcccgtgctgagcggccagcagggcttccagggcctgatcggcgtgcagcagcccccccagagccagaacgtgatcaacaaccagcagggcacccccgtgcagagcgtgatggtgagctaccccaccatgagcagctaccaggtgcccatgacccagggcagccagggcctgccccagcagagctaccagcagcccatcatgctgcccaaccaggccggccagggcagcctgcccgccaccggcatgcccgtgtactgcaacgtgaccccccccaccccccagaacaacctgagactgatcggcccccactgccccagcagcaccgtgcccgtgatgagcgccagctgcagaaccaactgcgccagcatgagcaacgccggctggcaggtgaagttctag

SEQ ID NO: 11864 - DNA, 1467 bp, synthetic construct
  source 1..1467: mol_type = other DNA; note = Synthetic coding sequence
atgaacggcgccctggaccacagcgaccagcccgaccccgacgccatcaagatgttcgtgggccagatccccagaagctggagcgagaaggagctgaaggagctgttcgagccctacggcgccgtgtaccagatcaacgtgctgagagacagaagccagaaccccccccagagcaagggctgctgcttcgtgaccttctacaccagaaaggccgccctggaggcccagaacgccctgcacaacatcaagaccctgcccggcatgcaccaccccatccagatgaagcccgccgacagcgagaagagcaacgccgtggaggacagaaagctgttcatcggcatggtgagcaagaagtgcaacgagaacgacatcagagtgatgttcagccccttcggccagatcgaggagtgcagaatcctgagaggccccgacggcctgagcagaggctgcgccttcgtgaccttcagcaccagagccatggcccagaacgccatcaaggccatgcaccagagccagaccatggagggctgcagcagccccatcgtggtgaagttcgccgacacccagaaggacaaggagcagagaagactgcagcagcagctggcccagcagatgcagcagctgaacaccgccacctggggcaacctgaccggcctgggcggcctgaccccccagtacctggccctgctgcagcaggccaccagcagcagcaacctgggcgccttcagcggcatccagcagatggccggcatgaacgccctgcagctgcagaacctggccaccctggccgccgccgccgccgccgcccagaccagcgccaccagcaccaacgccaaccccctgagcaccaccagcagcgccctgggcgccctgaccagccccgtggccgccagcacccccaacagcaccgccggcgccgccatgaacagcctgaccagcctgggcaccctgcagggcctggccggcgccaccgtgggcctgaacaacatcaacgccctggccggcaccatcaacagcatggccgccctgaacggcggcctgggcgccaccggcctgaccaacggcaccgccggcaccatggacgccctgacccaggcctacagcggcatccagcagtacgccgccgccgccctgcccaccctgtacagccagagcctgctgcagcagcagagcgccgccggcagccagaaggagggccccgagggcgccaacctgttcatctaccacctgccccaggagttcggcgaccaggacatcctgcagatgttcatgcccttcggcaacgtgatcagcgccaaggtgttcatcgacaagcagaccaacctgagcaagtgcttcggcttcgtgagctacgacaaccccgtgagcgcccaggccgccatccaggccatgaacggcttccagatcggcatgaagagactgaaggtgcagctgaagagaagcaagaacgacagcaagccctactag

SEQ ID NO: 11865 - DNA, 474 bp, synthetic construct; identical to SEQ ID NO: 11812
  source 1..474: mol_type = other DNA; note = Synthetic coding sequence

SEQ ID NO: 11866 - DNA, 303 bp, synthetic construct
  source 1..303: mol_type = other DNA; note = Synthetic coding sequence
atggccagcgaggacatcgccaagctggccgagaccctggccaagacccaggtggccggcggccagctgagcttcaagggcaagagcctgaagctgaacaccgccgaggacgccaaggacgtgatcaaggagatcgaggacttcgacagcctggaggccctgagactggagggcaacaccgtgggcgtggaggccgccagagtgatcgccaaggccctggagaagaagagcgagctgaagagatgccactggagcgacatgttcaccggcagactgagaaccgagatcccccccgccctgtag

SEQ ID NO: 11867 - DNA, 459 bp, synthetic construct
  source 1..459: mol_type = other DNA; note = Synthetic coding sequence
atgagcgtgacctacgacgacagcgtgggcgtggaggtgagcagcgacagcttctgggaggtgggcaactacaagagaaccgtgaagagaatcgacgacggccacagactgtgcagcgacctgatgaactgcctgcacgagagagccagaatcgagaaggcctacgcccagcagctgaccgagtgggccagaagatggagacagctggtggagaagggcccccagtacggcaccgtggagaaggcctggatggccttcatgagcgaggccgagagagtgagcgagctgcacctggaggtgaaggccagcctgatgaacgacgacttcgagaagatcaagaactggcagaaggaggccttccacaagcagatgatgggcggcttcaaggagaccaaggaggccgaggacggcttcagaaaggcccagaagccctgggccaagaagctgaaggaggtgtag

SEQ ID NO: 11868 - DNA, 543 bp, synthetic construct
  source 1..543: mol_type = other DNA; note = Synthetic coding sequence
atgttcgccagcgacctgctgagagccctggactgctgccccggcgccggcagcagcggcctgctgccccagctgggccccagacagctgctggccttcaccgtgaactgcctgggcaaccacagatacctgggcttcttcgaggacctggagcagagacacaaggcccaggtgctggtggaggacatcagcgacatcctggaggagcacgccgagaagcacttccacccctacatcgcctactgcagcaacgaggtgtaccagcagagaaccctgcagaagctgatcagcagcaacgccgccttcagagaggccctgagagagatcgagagaagacccgcctgcggcggcctgcccatgctgagcttcctgatcctgcccatgcagagagtgaccagactgcccctgctgatggacaccctgtgcctgaagacccagggccacagcgagagatacaaggccgccagcagagccctgaaggccatcagcaagctggtgagacagtgcaacgagggcgcccacagaatggagagaatggagtag

SEQ ID NO: 11869 - DNA, 2487 bp, synthetic construct; identical to SEQ ID NO: 10544
  source 1..2487: mol_type = other DNA; note = Synthetic coding sequence

SEQ ID NO: 11870 - DNA, 4455 bp, synthetic construct
  source 1..4455: mol_type = other DNA; note = Synthetic coding sequence
atgagaatccccgaccagaagtacgtgaccctgaagctgaacgacgtgatcagattcggctacgacagcaacatgtacgtgctggagagagtgcagcacagagtgcccgaggaggccctgaagcacgagaagtacaccagccagctgcaggtgagcgtgaagggcctggcccccaagagaagcgaggccctgcccgagcacaccccctactgcgaggccagcaaccccagacccgagaagggcgacagaagacccggcaccgaggccgccagctacagaacccccctgtacggccagcccagctggtggggcgaggacgacggcagcaccctgcccgacgcccagagacagggcgagccctaccccgagagacccaagggccccgtgcagcaggacggcgagctgcacggcttcagagcccccgccgagccccagggctgcagcttcagaagagagcccagctacttcgagatccccaccaaggagaccccccagcccagccagccccccgaggtgcccgcccacgagatgcccaccaaggacgccgaggccggcggcggcggcgccgcccccgtggtgcagagccacgccagcttcaccatcgagttcgacgactgcagccccggcaagatgaagatcaaggaccacatcaccaagttcagcctgagacagagaagaccccccggcaaggaggccacccccggcgagatggtgagcgccgagaccaaggtggccgactggctggtgcagaacgaccccagcctgctgcacagagtgggccccggcgacgacagacacagcaccaagagcgacctgcccgtgcacaccagaaccctgaagggccacaagcacgaggacggcacccagagcgacagcgaggaccccctggccaaggccgccagcgccgccggcgtgcccctggaggccagcggcgagcaggtgagactgcagagacagatcaagagagacccccaggagctgctgcacaaccagcaggccttcgtgatcgagttcttcgacgaggacacccccagaaagaagagaagccagagcttcacccacagccccagcggcgaccccaaggccgacaagagaagaggccccacccccgccgacagagacagacccagcgtgcccgcccccgtgcaggccggcggcagaagcagcggcccccagagagccggcagcctgaagagagagaagaccgaggagagactgggcagccccagccccgccagcagaacccccgccagacccttcggcagcgtgggcagaagaagcagactggcccaggacttcatggcccagtgcctgagagagagcagccccgccgccagacccagccccgagaaggtgccccccgtgctgcccgcccccctgaccccccacggcaccagccccgtgggcccccccacccccccccccgcccccaccgacccccagctgaccaaggccagaaagcaggaggaggacgacagcctgagcgacgccggcacctacaccatcgagaccgaggcccaggacaccgaggtggaggaggccagaaagatgatcgaccaggtgttcggcgtgctggagagccccgagctgagcagagccagcagcgccaccttcagacccgtgatcagaggcgacagagacgagagcgacgacggcggcgtggcccagagaatggccctgctgcaggagttcgccagcagacccctgggcgccgccccccaggccgagcaccagggcctgcccgtgcccggcagccccggcggccagaagtgggtgagcagatgggccagcctggccgacagctacagcgaccccggcctgaccgaggacggcctgggcagaagaggcggcgagcccgagggcagcctgcccgtgagaatgagaagaagactgccccagctgcccagcgagagagccgacagccccgccggccccgagagcagcagaagaagcggccccggcccccccgagctggacagcgagcagcccagcagactgttcggccaggaggagctggaccccgacagcctgagcgacgccagcggcagcgacggcggcagaggccccgagcccggcgtggagccccaggacagcagaagaagaagcccccaggagggccccacctggagcagaggcagaagaagccccagagcccccggcgagcccacccccgccagcttcttcatcggcgaccagaacggcgacgccgtgctgagcagaaagcccctggccgcccccggcgacggcgagggcctgggccagaccgcccagcccagcccccccgccagagacggcgtgtacgtgagcgccaacggcagaatggtgatccagctgagacccggcagaagccccgagcccgacggccccgcccccgccttcctgagacaggagagcttcaccaaggagcccgccagcggcccccccgcccccggcaagcccccccacatcagcagccaccccctgctgcaggacctggccgccaccagagccgccagaatggacttccacagccaggacacccacctgatcctgaaggagaccgagaccgccctggccgccctggaggccagactgctgagcaacagcgtggacgccgagtgcgagggcggcagcacccccagaccccccgaggacgccctgagcggcgacagcgacgtggacaccgccagcaccgtgagcctgagaagcggcaagagcggccccagccccaccaccccccagcccctgagagcccagaaggagatgagccccagcccccccgccgcccaggaccccggcggcaccgccctggtgagcgccagagagcagagcagcgagagacagcaccaccccctgggccccaccgacatgggcagaggcgagcccgtgagaagaagcgccatcagaagaggccacagacccagaggcagcctggactggcccagcgaggagagaggccccgtgctggcccacctgcccagcagcgacgtgatggccagcaaccacgagacccccgaggccaccggcgccggcagactgggcagcagaagaaagcccgccgcccccccccccagccccgccgccagagaggagcagagcagaagcagcgccagcagccagaagggcccccaggccctgaccagaagcaacagcctgagcacccccagacccaccagagccagcagactgagaagagccagactgggcgacgccagcgacaccgaggccgccgacggcgagagaggcagcctgggcaaccccgagcccgtgggcagacccgccgccgagcaggccaagaagctgagcagactggacatcctggccatgcccagaaagagagccggcagcttcaccggcaccagcgaccccgaggccgcccccgccagaaccagcttcagcggcagaagcgtggagctgtgctgcgccagcagaaagcccaccatggccgaggccagagccgtgagcagaaaggccgccaacaccgccaccaccaccggccccagacagcccttcagcagagccagaagcggcagcgccagatacaccagcaccacccagacccccagagccggcagcagcagcagagccagaagcagagcccccggccccagagacaccgacgacgacgaggaggagcccgacccctacggcttcatcgtgcagaccgccgagatcgccgagatcgccagactgagccagaccctggtgaaggacgtggccatcctggcccaggagatccacgacgtggccggcgacggcgacaccctgggcagcagcgagcccgcccacagcgccagcctgagcaacatgcccagcacccccgccagcaccatcagcgccagagaggagctggtgcagagaatccccgaggccagcctgaacttccagaaggtgccccccggcagcctgaacagcagagacttcgaccagaacatgaacgacagctgcgaggacgccctggccaacaagaccagacccagaaacagagaggaggtgatcttcgacaacctgatgctgaaccccgtgagccagctgagccaggccatcagagagaacaccgagcacctggccgagaagatgaagatcctgttccagaacaccggcagagcctgggaggacctggaggccagaatcaacgccgagaacgaggtgcccatcctgaagaccagcaacaaggagatcagcagcatcctgaaggagctgagaagagtgcagaagcagctggaggtgatcaacgccatcgtggaccccagcggcagcctggacctgctgaccggcaacagaagcctggccagcagcgcccagcccggcctgggcaagggcagagtggccgcccagagcccccccagccccgccagcgccgaggccctgctgcccgccctgcccctgagaaacttcccccagagagccagctgcggcccccccagcctgcccgaccccaccttcctgcccgacgccgagagattcctgatctag

SEQ ID NO: 11871 - DNA, 150 bp, synthetic construct
  source 1..150: mol_type = other DNA; note = Synthetic coding sequence
atgtaccccaaccccctgatctactgcacctgctgggacccctggaacctgggccccagaaagctgatcaagaccccccagctgcccagaaagaacagcaccggcagcagcaagctgacccccctggtgcccgcccccaagaaccactag

SEQ ID NO: 11872 - DNA, 948 bp, synthetic construct; identical to SEQ ID NO: 9297
  source 1..948: mol_type = other DNA; note = Synthetic coding sequence

SEQ ID NO: 11873 - DNA, 3015 bp, synthetic construct
  source 1..3015: mol_type = other DNA; note = Synthetic coding sequence
atgaaggccaccacccccctgcagaccgtggacagacccaaggactggtacaagaccatgttcaagcagatccacatggtgcacaagcccggcctgtacaaccccccctacagcgcccagagccaccccgccgccaagacccagacctacagacccctgagcaagagccacagcgacaacagccccaacgccttcaaggacgccagcagccccgtgccccccccccacgtgcccccccccgtgccccccctgagacccagagacagaagcagcaccgagaagcacgactgggacccccccgacagaaaggtggacaccagaaagttcagaagcgagcccagaagcatcttcgagtacgagcccggcaagagcagcatcctgcagcacgagagacccgccagcctgtaccagagcagcatcgacagaagcctggagagacccatgagcagcgccagcatggccagcgacttcagaaagagaagaaagagcgagcccgccgtgggcccccccagaggcctgggcgaccagagcgccagcagaaccagccccggcagagtggacctgcccggcagcagcaccaccctgaccaagagcttcaccagcagcagccccagcagccccagcagagccaagggcggcgacgacagcaagatctgccccagcctgtgcagctacagcggcctgaacggcaaccccagcagcgagctggactactgcagcacctacagacagcacctggacgtgcccagagacagccccagagccatcagcttcaagaacggctggcagatggccagacagaacgccgagatctggagcagcaccgaggagaccgtgagccccaagatcaagagcagaagctgcgacgacctgctgaacgacgactgcgacagcttccccgaccccaaggtgaagagcgagagcatgggcagcctgctgtgcgaggaggacagcaaggagagctgccccatggcctggggcagcccctacgtgcccgaggtgagaagcaacggcagaagcagaatcagacacagaagcgccagaaacgcccccggcttcctgaagatgtacaagaagatgcacagaatcaacagaaaggacctgatgaacagcgaggtgatctgcagcgtgaagagcagaatcctgcagtacgagagcgagcagcagcacaaggacctgctgagagcctggagccagtgcagcaccgaggaggtgcccagagacatggtgcccaccagaatcagcgagttcgagaagctgatccagaagagcaagagcatgcccaacctgggcgacgacatgctgagccccgtgaccctggagcccccccagaacggcctgtgccccaagagaagattcagcatcgagtacctgctggaggaggagaaccagagcggcccccccgccagaggcagaagaggctgccagagcaacgccctggtgcccatccacatcgaggtgaccagcgacgagcagcccagagcccacgtggagttcagcgacagcgaccaggacggcgtggtgagcgaccacagcgactacatccacctggagggcagcagcttctgcagcgagagcgacttcgaccacttcagcttcaccagcagcgagagcttctacggcagcagccaccaccaccaccaccaccaccaccaccaccacagacacctgatcagcagctgcaagggcagatgccccgccagctacaccagattcaccaccatgctgaagcacgagagagccagacacgagaacaccgaggagcccagaagacaggagatggaccccggcctgagcaagctggccttcctggtgagccccgtgcccttcagaagaaagaagaacagcgcccccaagaagcagaccgagaaggccaagtgcaaggccagcgtgttcgaggccctggacagcgccctgaaggacatctgcgaccagatcaaggccgagaagaagagaggcagcctgcccgacaacagcatcctgcacagactgatcagcgagctgctgcccgacgtgcccgagagaaacagcagcctgagagccctgagaagaagccccctgcaccagcccctgcaccccctgccccccgacggcgccatccactgccccccctaccagaacgactgcggcagaatgcccagaagcgccagcttccaggacgtggacaccgccaacagcagctgccaccaccaggacagaggcggcgccctgcaggacagagagagccccagaagctacagcagcaccctgaccgacatgggcagaagcgcccccagagagagaagaggcacccccgagaaggagaagctgcccgccaaggccgtgtacgacttcaaggcccagaccagcaaggagctgagcttcaagaagggcgacaccgtgtacatcctgagaaagatcgaccagaactggtacgagggcgagcaccacggcagagtgggcatcttccccatcagctacgtggagaagctgaccccccccgagaaggcccagcccgccagaccccccccccccgcccagcccggcgagatcggcgaggccatcgccaagtacaacttcaacgccgacaccaacgtggagctgagcctgagaaagggcgacagagtgatcctgctgaagagagtggaccagaactggtacgagggcaagatccccggcaccaacagacagggcatcttccccgtgagctacgtggaggtggtgaagaagaacaccaagggcgccgaggactaccccgacccccccatcccccacagctacagcagcgacagaatccacagcctgagcagcaacaagccccagagacccgtgttcacccacgagaacatccagggcggcggcgagcccttccaggccctgtacaactacacccccagaaacgaggacgagctggagctgagagagagcgacgtgatcgacgtgatggagaagtgcgacgacggctggttcgtgggcaccagcagaagaaccaagttcttcggcaccttccccggcaactacgtgaagagactgtag

SEQ ID NO: 11874 - DNA, 981 bp, synthetic construct
  source 1..981: mol_type = other DNA; note = Synthetic coding sequence
atggccgccgccgccgccgccgccgccgccaccaacggcaccggcggcagcagcggcatggaggtggacgccgccgtgcccagcgtgatggcctgcggcgtgaccggcagcgtgagcgtggccctgcaccccctggtgatcctgaacatcagcgaccactggatcagaatgagaagccaggagggcagacccgtgcaggtgatcggcgccctgatcggcaagcaggagggcagaaacatcgaggtgatgaacagcttcgagctgctgagccacaccgtggaggagaagatcatcatcgacaaggagtactactacaccaaggaggagcagttcaagcaggtgttcaaggagctggagttcctgggctggtacaccaccggcggcccccccgaccccagcgacatccacgtgcacaagcaggtgtgcgagatcatcgagagccccctgttcctgaagctgaaccccatgaccaagcacaccgacctgcccgtgagcgtgttcgagagcgtgatcgacatcatcaacggcgaggccaccatgctgttcgccgagctgacctacaccctggccaccgaggaggccgagagaatcggcgtggaccacgtggccagaatgaccgccaccggcagcggcgagaacagcaccgtggccgagcacctgatcgcccagcacagcgccatcaagatgctgcacagcagagtgaagctgatcctggagtacgtgaaggccagcgaggccggcgaggtgcccttcaaccacgagatcctgagagaggcctacgccctgtgccactgcctgcccgtgctgagcaccgacaagttcaagaccgacttctacgaccagtgcaacgacgtgggcctgatggcctacctgggcaccatcaccaagacctgcaacaccatgaaccagttcgtgaacaagttcaacgtgctgtacgacagacagggcatcggcagaagaatgagaggcctgttcttctag

SEQ ID NO: 11875 - DNA, 780 bp, synthetic construct
  source 1..780: mol_type = other DNA; note = Synthetic coding sequence
tgattcaccgcccaggcccccagcggcagaggcgccgccgtgggcagcggcaccagactggccagcctgagactgctgaccgagctggagagccccgcctggtggcccttcagcagcaagctgtggaagaccccccccgagaccaagcccagagaggacgtgagcatgaccagctgcgagcccttcggcaaggagggcatcctgatcaagatccccgccgtgatcagccacagaaccgagagccacgtgaagcccggcagactgaccgtgctggtgagcggcctggagatccacgacagcagcagcctgctgatgcacagattcgagagagaggacgtggacgacatcaaggtgcacagcccctacgagatcagcatcagacagagattcatcggcaagcccgacatggcctacagactgatcagcgccaagatgcccgaggtgatccccatcctggaggtgcagttcagcaagaagatggagctgctggaggacgccctggtgctgagaagcgccagaaccagcagccccgccgagaagagctgcagcgtgtggcacgccgccagcggcctgatgggcagaaccctgcacagagagccccccgccggcgaccaggagggcaccgccctgcacctgcagaccagcctgcccgccctgagcgaggccgacacccaggagctgacccagggcttcagacccatgagcctgagcacccagaccgtgctggtgatgctgtgcagcgagagcgccggcgccctgtggagacagagactgagctag

SEQ ID NO: 11876 - DNA, 1038 bp, synthetic construct
  source 1..1038: mol_type = other DNA; note = Synthetic coding sequence
atggccgccgccgagcccgccagcagcggccagcaggcccccgccggccagggccagggccagagaccccccccccagcccccccaggcccaggccccccagccccccccccccccccagctgggcggcgccggcggcggcagcagcagacacgagaagagcctgggcctgctgaccaccaagttcgtgagcctgctgcaggaggccaaggacggcgtgctggacctgaaggccgccgccgacaccctggccgtgagacagaagagaagaatctacgacatcaccaacgtgctggagggcatcgacctgatcgagaagaagagcaagaacagcatccagtggaagggcgtgggcgccggctgcaacaccaaggaggtgatcgacagactgagatacctgaaggccgagatcgaggacctggagctgaaggagagagagctggaccagcagaagctgtggctgcagcagagcatcaagaacgtgatggacgacagcatcaacaacagattcagctacgtgacccacgaggacatctgcaactgcttcaacggcgacaccctgctggccatccaggcccccagcggcacccagctggaggtgcccatccccgagatgggccagaacggccagaagaagtaccagatcaacctgaagagccacagcggccccatccacgtgctgctgatcaacaaggagagcagcagcagcaagcccgtggtgttccccgtgcccccccccgacgacctgacccagcccagcagccagagcctgacccccgtgaccccccagaagagcagcatggccacccagaacctgcccgagcagcacgtgagcgagagaagccaggccctgcagcagaccagcgccaccgacatcagcagcggcagcatcagcggcgacatcatcgacgagctgatgagcagcgacgtgttccccctgctgagactgagccccacccccgccgacgactacaacttcaacctggacgacaacgagggcgtgtgcgacctgttcgacgtgcagatcctgaactactag

SEQ ID NO: 11877 - DNA, 96 bp, synthetic construct
  source 1..96: mol_type = other DNA; note = Synthetic coding sequence
atgaccgtgccctggagacccggcaagagaagaatcacctacaaggaggaggaggacctgaccctgcagcccagaagctgcctgcagtgcagctag

SEQ ID NO: 11878 - DNA, 489 bp, synthetic construct
  source 1..489: mol_type = other DNA; note = Synthetic coding sequence
atgaacaaccagaagcagcagaagcccaccctgagcggccagagattcaagaccagaaagagagacgagaaggagagattcgaccccacccagttccaggactgcatcatccagggcctgaccgagaccggcaccgacctggaggccgtggccaagttcctggacgccagcggcgccaagctggactacagaagatacgccgagaccctgttcgacatcctggtggccggcggcatgctggcccccggcggcaccctggccgacgacatgatgagaaccgacgtgtgcgtgttcgccgcccaggaggacctggagaccatgcaggccttcgcccaggtgttcaacaagctgatcagaagatacaagtacctggagaagggcttcgaggacgaggtgaagaagctgctgctgttcctgaagggcttcagcgagagcgagagaaacaagctggccatgctgaccggcgtgctgctggccaacggcacctag

SEQ ID NO: 11879 - DNA, 270 bp, synthetic construct
  source 1..270: mol_type = other DNA; note = Synthetic coding sequence
atggccgccgccaccggcgaccccggcctgagcaagctgcagttcgcccccttcagcagcgccctggacgtgggcttctggcacgagctgacccagaagaagctgaacgagtacagactggacgaggcccccaaggacatcaagggctactactacaacggcgacagcgccggcctgcccgccagactgaccctggagttcagcgccttcgacatgagcgcccccacccccgccagatgctgccccgccatcggcaccctgtacaactag

SEQ ID NO: 11880 - DNA, 2025 bp, synthetic construct; identical to SEQ ID NO: 10426
  source 1..2025: mol_type = other DNA; note = Synthetic coding sequence

SEQ ID NO: 11881 - DNA, 1923 bp, synthetic construct
  source 1..1923: mol_type = other DNA; note = Synthetic coding sequence
atggagaaccagctggccaagagcaccgaggagagaaccttccagtaccaggacagcctgcccagcctgcccgtgcccagcctggaggagagcctgaagaagtacctggagagcgtgaccagaacctgctaccagatcagaggcctggaccccgacgccaagagaggcttcctggacctgaccagagagggcatccaggtgaagcccttcgccaaccaggaggagtacaagaagaccgaggagatcgtgcagaagttccagagcggcatcggcgagaagctgcaccagaagctgctggagagagccaagggcaagagaaactggctggaggagtggtggctgaacgtggcctacctggacgtgagaatccccagccagctgaacgtgaacttcgccggccccgccgcccacttcgagcactactggccccccaaggagggcacccagctggagagaggcagcatcaccctgtggcacaacctgaactactggcagctgctgagaaaggagaaggtgcccgtgcacaaggtgggcaacacccccctggacatgaaccagttcagaatgctgttcagcacctgcaaggtgcccggcatcaccagagacagcatcatgaactacttcagaaccgagagcgagggcagaagccccaaccacatcgtggtgctgtgcagaggcagagccttcgtgttcgacgtgatccacgagggctgcctggtgaccccccccgagctgctgagacagctgacctacatccacaagaagtgccacagcgagcccgacggccccggcatcgccgccctgaccagcgaggagagaaccagatgggccaaggccagagagtacctgatcggcctggaccccgagaacctggccctgctggagaagatccagagcagcctgctggtgtacagcatggaggacagcagcccccacgtgacccccgaggactacagcgagatcatcgccgccatcctgatcggcgaccccaccgtgagatggggcgacaagagctacaacctgatcagcttcagcaacggcgtgttcggctgcaactgcgaccacgcccccttcgacgccatgatcatggtgaacatcagctactacgtggacgagaagatcttccagaacgagggcagatggaagggcagcgagaaggtgagagacatccccctgcccgaggagctgatcttcatcgtggacgagaaggtgctgaacgacatcaaccaggccaaggcccagtacctgagagaggccagcgacctgcagatcgccgcctacgccttcaccagcttcggcaagaagctgaccaagaacaagatgctgcaccccgacaccttcatccagctggccctgcagctggcctactacagactgcacggccaccccggctgctgctacgagaccgccatgaccagacacttctaccacggcagaaccgagaccatgagaagctgcaccgtggaggccgtgagatggtgccagagcatgcaggaccccagcgtgaacctgagagagagacagcagaagatgctgcaggccttcgccaagcacaacaagatgatgaaggactgcagcgccggcaagggcttcgacagacacctgctgggcctgctgctgatcgccaaggaggagggcctgcccgtgcccgagctgttcaccgaccccctgttcagcaagagcggcggcggcggcaacttcgtgctgagcaccagcctggtgggctacctgagagtgcagggcgtggtggtgcccatggtgcacaacggctacggcttcttctaccacatcagagacgacagattcgtggtggcctgcagcgcctggaagagctgccccgagaccgacgccgagaagctggtgcagctgaccttctgcgccttccacgacatgatccagctgatgaacagcacccacctgtag

SEQ ID NO: 11882 - DNA, 474 bp, synthetic construct; identical to SEQ ID NO: 11812
  source 1..474: mol_type = other DNA; note = Synthetic coding sequence

SEQ ID NO: 11883 - DNA, 432 bp, synthetic construct
  source 1..432: mol_type = other DNA; note = Synthetic coding sequence
tgaaccagacacttcaaggagagcatcaagttcatccacgagtgcagactgagaggcgagagctgcctggtgcactgcctggccggcgtgagcagaagcgtgaccctggtgatcgcctacatcatgaccgtgaccgacttcggctgggaggacgccctgcacaccgtgagagccggcagaagctgcgccaaccccaacgtgggcttccagagacagctgcaggagttcgagaagcacgaggtgcaccagtacagacagtggctgaaggaggagtacggcgagagccccctgcaggacgccgaggaggccaagaacatcctgggcaagtacaaggagcagggcagaaccgagccccagcccggcgccagaagatggagcagcttccccgccctggcccccctgacctacgacaactacaccaccgagacctag

SEQ ID NO: 11884 - DNA, 495 bp, synthetic construct
  source 1..495: mol_type = other DNA; note = Synthetic coding sequence
atggtgaacagcgtgatcttcttcgacatcaccgtggacggcaagcccctgggcagaatcagcatcaagcagttcgccgacaagatccccaagaccgccgagaacttcagagccctgagcaccggcgagaagggcttcagatacaagggcagctgcttccacagaatcatccccggcttcatgtgccagggcggcgacttcacccaccccaacggcaccggcgacaagagcatctacggcgagaagttcgacgacgagaacctgatcagaaagcacaccggcagcggcatcctgagcatggccaacgccggccccaacaccaacggcagccagttcttcatctgcaccgccaagaccgagtggctggacggcaagcacgtggccttcggcaaggtgaaggagagagtgaacatcgtggaggccatggagcacttcggctacagaaacagcaagaccagcaagaagatcaccatcgccgactgcggccagttctag

SEQ ID NO: 11885 - DNA, 468 bp, synthetic construct
  source 1..468: mol_type = other DNA; note = Synthetic coding sequence
atgagcgagggcgagagccagaccgtgctgagcagcggcagcgaccccaaggtggagagcagcagcagcgcccccggcctgaccagcgtgagcccccccgtgaccagcaccaccagcgccgccagccccgaggaggaggaggagagcgaggacgagagcgagatcctggaggagagcccctgcggcagatggcagaagagaagagaggaggtgaaccagagaaacgtgcccggcatcgacagcgcctacctggccatggacaccgaggagggcgtggaggtggtgtggaacgaggtgcagttcagcgagagaaagaactacaagctgcaggaggagaaggtgagagccgtgttcgacaacctgatccagctggagcacctgaacatcgtgaagttccacaagtactgggccgacatcaaggagaacaaggccagagtgatcttcatcaccgagtacatgagcagctag

SEQ ID NO: 11886 - DNA, 837 bp, synthetic construct
  source 1..837: mol_type = other DNA; note = Synthetic coding sequence
atgtggcccttccccagcagaagcctgttccccccccccacccaggcctggctgcagaccgtgagcagcgaccccgaggcccagggctggggcgcctggaacgagaccaaggagatcctgggccccgagggcggcgagggcaaggaggagaaggaggaggaggaggacgccgaggaggaccaggacggcgacgccggcttcctgctgagcctgctggagcaggagaacctggccgagtgccccctgcccgaccaggagctggaggccatcaagatgaaggtgtgcgccatggagcaggccgagggcacccccagaccccccggcgtgcagcagcaggccgaggaggaggagggcaccgccgccggccagctgctgagccccgagaccgtgggctgccccctgagcggcacccccgaggagaaggtggaggccgaccacagaagcgtgtacgtgggcaacgtggactacggcggcagcgccgaggagctggaggcccacttcagcagatgcggcgaggtgcacagagtgaccatcctgtgcgacaagttcagcggccaccccaagggctacgcctacatcgagttcgccaccaagggcagcgtgcaggccgccgtggagctggaccagagcctgttcagaggcagagtgatcaaggtgctgcccaagagaaccaacttccccggcatcagcagcaccgacagaggcggcctgagaggccaccccggcagcagaggcgcccccttcccccacagcggcctgcagggcagacccagactgagaccccagggccagaacagagccagaggcaagttcagcccctggttcagcccctactag

SEQ ID NO: 11887 - DNA, 132 bp, synthetic construct
  source 1..132: mol_type = other DNA; note = Synthetic coding sequence
atgagcgagcagggcgacctgaaccaggccatcgccgaggagggcggcaccgagcaggagaccgccacccccgagaacggcatcgtgaagagcgagagcctggacgaggaggagaagctggagctgcagtag

SEQ ID NO: 11888 - DNA, 390 bp, synthetic construct
  source 1..390: mol_type = other DNA; note = Synthetic coding sequence
atggccgacgaggagctggaggccctgagaagacagagactggccgagctgcaggccaagcacggcgaccccggcgacgccgcccagcaggaggccaagcacagagaggccgagatgagaaacagcatcctggcccaggtgctggaccagagcgccagagccagactgagcaacctggccctggtgaagcccgagaagaccaaggccgtggagaactacctgatccagatggccagatacggccagctgagcgagaaggtgagcctggacagcctggaggagctgtactgctacctgctgtaccagaacatggccagcaagggccagctgcacctgcactggatcaccgagttcctgctgaccctgagaagaaactgctggagagagtag

SEQ ID NO: 11889 - DNA, 2286 bp, synthetic construct
  source 1..2286: mol_type = other DNA; note = Synthetic coding sequence
atgagaaagcaggaggtgagaaccggcagagaggccggccagggccacggcaccggcagccccgccgagcaggtgaaggccctgatggacctgctggccggcaagggcagccagggcagccaggccccccaggccctggacagaacccccgacgcccccctgggcccctgcagcaacgacagcagaatccagagacacagaaaggccctgctgagcaaggtgggcggcggccccgagctgggcggcccctggcacagactggccagcctgctgctggtggagggcctgaccgacctgcagctgagagagcacgacttcacccaggtggaggccaccagaggcggcggccaccccgccagaaccgtggccctggacagactgttcctgcccctgagcagagtgagcgtgccccccagagtgagcatcaccatcggcgtggccggcatgggcaagaccaccctggtgagacacttcgtgagactgtgggcccacggccaggtgggcaaggacttcagcctggtgctgcccctgaccttcagagacctgaacacccacgagaagctgtgcgccgacagactgatctgcagcgtgttcccccacgtgggcgagcccagcctggccgtggccgtgcccgccagagccctgctgatcctggacggcctggacgagtgcagaacccccctggacttcagcaacaccgtggcctgcaccgaccccaagaaggagatccccgtggaccacctgatcaccaacatcatcagaggcaacctgttccccgaggtgagcatctggatcaccagcagacccagcgccagcggccagatccccggcggcctggtggacagaatgaccgagatcagaggcttcaacgaggaggagatcaaggtgtgcctggagcagatgttccccgaggaccaggccctgctgggctggatgctgagccaggtgcaggccgacagagccctgtacctgatgtgcaccgtgcccgccttctgcagactgaccggcatggccctgggccacctgtggagaagcagaaccggcccccaggacgccgagctgtggccccccagaaccctgtgcgagctgtacagctggtacttcagaatggccctgagcggcgagggccaggagaagggcaaggccagccccagaatcgagcaggtggcccacggcggcagaaagatggtgggcaccctgggcagactggccttccacggcctgctgaagaagaagtacgtgttctacgagcaggacatgaaggccttcggcgtggacctggccctgctgcagggcgccccctgcagctgcttcctgcagagagaggagaccctggccagcagcgtggcctactgcttcacccacctgagcctgcaggagttcgtggccgccgcctactactacggcgccagcagaagagccatcttcgacctgttcaccgagagcggcgtgagctggcccagactgggcttcctgacccacttcagaagcgccgcccagagagccatgcaggccgaggacggcagactggacgtgttcctgagattcctgagcggcctgctgagccccagagtgaacgccctgctggccggcagcctgctggcccagggcgagcaccaggcctacagaacccaggtggccgagctgctgcagggctgcctgagacccgacgccgccgtgtgcgccagagccatcaacgtgctgcactgcctgcacgagctgcagcacaccgagctggccagaagcgtggaggaggccatggagagcggcgccctggccagactgaccggccccgcccacagagccgccctggcctacctgctgcaggtgagcgacgcctgcgcccaggaggccaacctgagcctgagcctgagccagggcgtgctgcagagcctgctgccccagctgctgtactgcagaaagctgagactggacaccaaccagttccaggaccccgtgatggagctgctgggcagcgtgctgagcggcaaggactgcagaatccagaagatcagcctggccgagaaccagatcagcaacaagggcgccaaggccctggccagaagcctgctggtgaacagaagcctgaccagcctggacctgagaggcaacagcatcggcccccagggcgccaaggccctggccgacgccctgaagatcaacagaaccctgaccagcctgagagtgaagttcatgtaccacaagatcgactgcttcagaagagtgcccgaggccgacgcctgcaaccccagcaccctgggcggccagggcagatggatcacctag

SEQ ID NO: 11890 - DNA, 474 bp, synthetic construct; identical to SEQ ID NO: 11812
  source 1..474: mol_type = other DNA; note = Synthetic coding sequence

SEQ ID NO: 11891 - DNA, 1473 bp, synthetic construct
  source 1..1473: mol_type = other DNA; note = Synthetic coding sequence
atgaccatcggcagaatggagaacgtggaggtgttcaccgccgagggcaagggcagaggcctgaaggccaccaaggagttctgggccgccgacatcatcttcgccgagagagcctacagcgccgtggtgttcgacagcctggtgaacttcgtgtgccacacctgcttcaagagacaggagaagctgcacagatgcggccagtgcaagttcgcccactactgcgacagaacctgccagaaggacgcctggctgaaccacaagaacgagtgcagcgccatcaagagatacggcaaggtgcccaacgagaacatcagactggccgccagaatcatgtggagagtggagagagagggcaccggcctgaccgagggctgcctggtgagcgtggacgacctgcagaaccacgtggagcacttcggcgaggaggagcagaaggacctgagagtggacgtggacaccttcctgcagtactggcccccccagagccagcagttcagcatgcagtacatcagccacatcttcggcgtgatcaactgcaacggcttcaccctgagcgaccagagaggcctgcaggccgtgggcgtgggcatcttccccaacctgggcctggtgaaccacgactgctggcccaactgcaccgtgatcttcaacaacggcaaccacgaggccgtgaagagcatgttccacacccagatgagaatcgagctgagagccctgggcaagatcagcgagggcgaggagctgaccgtgagctacatcgacttcctgaacgtgagcgaggagagaaagagacagctgaagaagcagtactacttcgactgcacctgcgagcactgccagaagaagctgaaggacgacctgttcctgggcgtgaaggacaaccccaagcccagccaggaggtggtgaaggagatgatccagttcagcaaggacaccctggagaagatcgacaaggccagaagcgagggcctgtaccacgaggtggtgaagctgtgcagagagtgcctggagaagcaggagcccgtgttcgccgacaccaacatctacatgctgagaatgctgagcatcgtgagcgaggtgctgagctacctgcaggccttcgaggaggccagcttctacgccagaagaatggtggacggctacatgaagctgtaccaccccaacaacgcccagctgggcatggccgtgatgagagccggcctgaccaactggcacgccggcaacatcgaggtgggccacggcatgatctgcaaggcctacgccatcctgctggtgacccacggccccagccaccccatcaccaaggacctggaggccatgagagtgcagaccgagatggagctgagaatgttcagacagaacgagttcatgtactacaagatgagagaggccgccctgaacaaccagcccatgcaggtgatggccgagcccagcaacgagcccagccccgccctgttccacaagaagcagtag

SEQ ID NO: 11892 - DNA, 1491 bp, synthetic construct
  source 1..1491: mol_type = other DNA; note = Synthetic coding sequence
atgtggggcagattcctggcccccgaggccagcggcagagacagccccggcggcgccagaagcttccccgccggccccgactacagcagcgcctggctgcccgccaacgagagcctgtggcaggccaccaccgtgcccagcaaccacagaaacaaccacatcagaagacacagcatcgccagcgacagcggcgacaccggcatcggcaccagctgcagcgacagcgtggaggaccacagcaccagcagcggcaccctgagcttcaagcccagccagagcctgatcaccctgcccaccgcccacgtgatgcccagcaacagcagcgccagcatcagcaagctgagagagagcctgacccccgacggcagcaagtggagcaccagcctgatgcagaccctgggcaaccacagcagaggcgagcaggacagcagcctggacatgaaggacttcagacccctgagaaagtggagcagcctgagcaagctgaccgcccccgacaactgcggccagggcggcaccgtgtgcagagaggagagcagaaacggcctggagaagatcggcaaggccaaggccctgaccagccagctgagaaccatcggccccagctgcctgcacgacagcatggagatgctgagactggaggacaaggagatcaacaagaagagaagcagcaccctggactgcaagtacaagttcgagagctgcagcaaggaggacttcagagccagcagcagcaccctgagaagacagcccgtggacatgacctacagcgccctgcccgagagcaagcccatcatgaccagcagcgaggccttcgagccccccaagtacctgatgctgggccagcaggccgtgggcggcgtgcccatccagcccagcgtgagaacccagatgtggctgaccgagcagctgagaaccaaccccctggagggcagaaacaccgaggacagctacagcctggccccctggcagcagcagcagatcgaggacttcagacagggcagcgagacccccatgcaggtgctgaccggcagcagcagacagagctacagccccggctaccaggacttcagcaagtgggagagcatgctgaagatcaaggagggcctgctgagacagaaggagatcgtgatcgacagacagaagcagcagatcacccacctgcacgagagaatcagagacaacgagctgagagcccagcacgccatgctgggccactacgtgaactgcgaggacagctacgtggccagcctgcagccccagtacgagaacaccagcctgcagacccccttcagcgaggagagcgtgagccacagccagcagggcgagttcgagcagaagctggccagcaccgagaaggaggtgctgcagctgaacgagttcctgaagcagagactgagcctgttcagcgaggagaagaagaagctggaggagaaggtgggcttcagcaacaaggtggagctgggccagcagcacttcctgagcatctag

SEQ ID NO: 11893 - DNA, 1083 bp, synthetic construct
  source 1..1083: mol_type = other DNA; note = Synthetic coding sequence
atggccgagctgcagcagctgcaggagttcgagatccccaccggcagagaggccctgagaggcaaccacagcgccctgctgagagtggccgactactgcgaggacaactacgtgcaggccaccgacaagagaaaggccctggaggagaccatggccttcaccacccaggccctggccagcgtggcctaccaggtgggcaacctggccggccacaccctgagaatgctggacctgcagggcgccgccctgagacaggtggaggccagaatggtgaacatgcacatggagaaggtggccagaagagagatcggcaccctggccaccgtgcagagactgccccccggccagaaggtgatcgcccccgagaacctgccccccctgaccccctactgcagaagacccctgaacttcggctgcctggacgacatcggccacggcatcaaggacctgagcacccagctgagcagaaccggcaccctgagcagaaagagcatcaaggcccccgccacccccgccagcgccaccctgggcagaccccccagaatccccgagcccgtgcacctgcccgtggtgcccgacggcagactgagcgccgccagcagcgccttcagcctggccagcgccggcagcgccgagggcgtgggcggcgcccccacccccaagggccaggccgccccccccgccccccccctgcccagcagcctggaccccccccccccccccgccgccgtggaggtgttccagagaccccccaccctggaggagctgagcccccccccccccgacgaggagctgcccctgcccctggacctgcccccccccccccccctggacggcgacgagctgggcctgcccccccccccccccggcttcggccccgacgagcccagctgggtgcccgccagctacctggagaaggtggtgaccctgtacccctacaccagccagaaggacaacgagctgagcttcagcgagggcaccgtgatctgcgtgaccagaagatacagcgacggctggtgcgagggcgtgagcagcgagggcaccggcttcttccccggcaactacgtggagcccagctgctag

SEQ ID NO: 11894 - DNA, 201 bp, synthetic construct
  source 1..201: mol_type = other DNA; note = Synthetic coding sequence
atgctgagatgcggccagatgatcttcgcccaggccctggtgtgcagacacctgggcagagactggagatggacccagagaaagagacagcccgacagctacttcagcgtgctgaacgccttcatcgacagaaaggacagctactacagcatccaccagatcgcccagatgggcgtgggcgagggcaagagcatcggctag

SEQ ID NO: 11895 - DNA, 1476 bp, synthetic construct
  source 1..1476: mol_type = other DNA; note = Synthetic coding sequence
atggagcagccccccgcccccaagagcaagctgaagaagctgagcgaggacagcctgaccaagcagcccgaggaggtgttcgacgtgctggagaagctgggcgagggcagctacggcagcgtgttcaaggccatccacaaggagagcggccaggtggtggccatcaagcaggtgcccgtggagagcgacctgcaggagatcatcaaggagatcagcatcatgcagcagtgcgacagcccctacgtggtgaagtactacggcagctacttcaagaacaccgacctgtggatcgtgatggagtactgcggcgccggcagcgtgagcgacatcatcagactgagaaacaagaccctgatcgaggacgagatcgccaccatcctgaagagcaccctgaagggcctggagtacctgcacttcatgagaaagatccacagagacatcaaggccggcaacatcctgctgaacaccgagggccacgccaagctggccgacttcggcgtggccggccagctgaccgacaccatggccaagagaaacaccgtgatcggcacccccttctggatggcccccgaggtgatccaggagatcggctacaactgcgtggccgacatctggagcctgggcatcaccagcatcgagatggccgagggcaagcccccctacgccgacatccaccccatgagagccatcttcatgatccccaccaaccccccccccaccttcagaaagcccgagctgtggagcgacgacttcaccgacttcgtgaagaagtgcctggtgaagaaccccgagcagagagccaccgccacccagctgctgcagcaccccttcatcaagaacgccaagcccgtgagcatcctgagagacctgatcaccgaggccatggagatcaaggccaagagacacgaggagcagcagagagagctggaggaggaggaggagaacagcgacgaggacgagctggacagccacaccatggtgaagaccagcgtggagagcgtgggcaccatgagagccaccagcaccatgagcgagggcgcccagaccatgatcgagcacaacagcaccatgctggagagcgacctgggcaccatggtgatcaacagcgaggacgaggaggaggaggacggcaccatgaagagaaacgccaccagcccccaggtgcagagacccagcttcatggactacttcgacaagcaggacttcaagaacaagagccacgagaactgcaaccagaacatgcacgagcccttccccatgagcaagaacgtgttccccgacaactggaaggtgccccaggacggcgacttcgacttcctgaagaacctgagcctggaggagctgcagatgagactgaaggccctggaccccatgatggagagagagatcgaggagctgagacagagatacaccgccaagagacagcccatcctggacgccatggacgccaagaagagaagacagcagaacttctag

SEQ ID NO: 11896 - DNA, 126 bp, synthetic construct
  source 1..126: mol_type = other DNA; note = Synthetic coding sequence
atgagcagcaagggcagcagcaccgacggcagaaccgacctggccaacggcagcctgagcagcagccccgaggagatgagcggcgccgaggagggcagagagaccagcagcggcatcgaggtgtag

SEQ ID NO: 11897 - DNA, 945 bp, synthetic construct
  source 1..945: mol_type = other DNA; note = Synthetic coding sequence
atgcccaacgtggccgagaccgagagaagcaacgacagcggcaacggcgagcacaagagcgagagaaagagccccgaggagaacctgcagggcgccgtgaagagcttctgcaccagcgccagcggcgcccccctgggccccaagggcgacggccactacccctggagctgccccgtgacccacaccagagagaagatctacgccatctgcagcgactacgccttcctgaaccaggccaccagcatctacaagacccccaaccccagcagaagcccctgcctgcccgacagcaccagcctgagcgccggcaacaacagcagcagatacatcggcatccccaccagcaccagcgagatcatctacaacgaggagaacagcctggagaacctgagcaacagcctgggcaagctgcccctggcctgggagatcgacaagagcgagttcgacggcgtgaccaccaacagcaagcacaagagcggcaacgccaagaagcaggtgagcaagagaaagaccagcgacaagaagggcagataccagaaggagtgcccccagcacagccccctggaggacatcaagcagagaaaggtgctggacctgagaagatggtactgcatcagcagaccccagtacaagaccagctgcggcatcagcagcctgatcagctgctggaacttcctgtacagcaccatgggcgccggcaacctgccccccatcacccaggaggaggccctgcacatcctgggcttccagccccccttcgaggacatcagattcggccccttcaccggcaacaccaccctgatgagatggttcagacagatcaacgaccacttccacgtgaagggctgcagctacgtgctgtacaagccccacggcaagaacaagaccgccggcgagaccgccggcgacctgagccaccacagaaagctgaacatcggcagctag

SEQ ID NO: 11898 - DNA, 1500 bp, synthetic construct
  source 1..1500: mol_type = other DNA; note = Synthetic coding sequence
atgcccgagatcagagtgacccccctgggcgccggccaggacgtgggcagaagctgcatcctggtgagcatcgccggcaagaacgtgatgctggactgcggcatgcacatgggcttcaacgacgacgtggacgacgagctggagatcaaggcctactacgccggccacgtgctgggcgccgccatgttccagatcaaggtgggcagcgagagcgtggtgtacaccggcgactacaacatgacccccgacagacacctgggcgccgcctggatcgacaagtgcagacccaacctgctgatcaccgagagcacctacgccaccaccatcagagacagcaagagatgcagagagagagacttcctgaagaaggtgcacgagaccgtggagagaggcggcaaggtgctgatccccgtgttcgccctgggcagagcccaggagctgtgcatcctgctggagaccttctgggagagaatgaacctgaaggtgcccatctacttcagcaccggcctgaccgagaaggccaaccactactacaagctgttcatcccctggaccaaccagaagatcagaaagaccttcgtgcagagaaacatgttcgagttcaagcacatcaaggccttcgacagagccttcgccgacaaccccggccccatggtggtgttcgccacccccggcatgctgcacgccggccagagcctgcagatcttcagaaagtgggccggcaacgagaagaacatggtgatcatgcccggctactgcgtgcagggcaccgtgggccacaagatcctgagcggccagagaaagctggagatggagggcagacaggtgctggaggtgaagatgcaggtggagtacatgagcttcagcgcccacgccgacgccaagggcatcatgcagctggtgggccaggccgagcccgagagcgtgctgctggtgcacggcgaggccaagaagatggagttcctgaagcagaagatcgagcaggagctgagagtgaactgctacatgcccgccaacggcgagaccgtgaccctgcccaccagccccagcatccccgtgggcatcagcctgggcctgctgaagagagagatggcccagggcctgctgcccgaggccaagaagcccagactgctgcacggcaccctgatcatgaaggacagcaacttcagactggtgagcagcgagcaggccctgaaggagctgggcctggccgagcaccagctgagattcacctgcagagtgcacctgcacgacaccagaaaggagcaggagaccgccctgagagtgtacagccacctgaagagcgtgctgaaggaccactgcgtgcagcacctgcccgacggcagcgtgaccgtggagagcgtgctgctgcaggccgccgcccccagcgaggaccccggcaccaaggtgctgctggtgagctggacctaccaggacgaggagctgggcagcttcctgaccagcctgctgaagaagggcctgccccaggcccccagctag

SEQ ID NO: 11899 - DNA, 396 bp, synthetic construct
  source 1..396: mol_type = other DNA; note = Synthetic coding sequence
ggcaccatcagctgcagcaccggcaccctgcagagaagaaacctgggccccgagagacagaccggcctgctgctgctgggcatgaaggagaaccaggagctgaagaccatccaggccaacctgagcagacagagagtggagcaccagtgcctgagcagcgaggagctgaagcagagattccccaacatcagactgcccagaggcgaggtgggcctgctggacaacagcggcggcgtgatctacgcctacaaggccctgagagccctgcaggacgccatcagacagctgggcggcatcgtgagagacggcgagaaggtggtggagatcaaccccggcctgctggtgaccgtgaagaccaccagcagaagctaccaggccaagagcctggtgatctag

SEQ ID NO: 11900 - DNA, 687 bp, synthetic construct
  source 1..687: mol_type = other DNA; note = Synthetic coding sequence
atgagcagagagagaggcagcagaagcgaggagcccggcgccggcaacagagagagcggcagcagagagcccggcctggccgccgccgccatgagcaccgtggacctggccagagtgggcgcctgcatcctgaagcacgccgtgaccggcgaggccgtggagctgagaagcctgtggagagagcacgcctgcgtggtggccggcctgagaagattcggctgcgtggtgtgcagatggatcgcccaggacctgagcagcctggccggcctgctggaccagcacggcgtgagactggtgggcgtgggccccgaggccctgggcctgcaggagttcctggacggcgactacttcgccggcgagctgtacctggacgagagcaagcagctgtacaaggagctgggcttcaagagatacaacagcctgagcatcctgcccgccgccctgggcaagcccgtgagagacgtggccgccaaggccaaggccgtgggcatccagggcaacctgagcggcgacctgctgcagagcggcggcctgctggtggtgagcaagggcggcgacaaggtgctgctgcacttcgtgcagaagagccccggcgactacgtgcccaaggagcacatcctgcaggtgctgggcatcagcgccgaggtgtgcgccagcgaccccccccagtgcgacagagaggtgtag

SEQ ID NO: 11901 - DNA, 654 bp, synthetic construct
  source 1..654: mol_type = other DNA; note = Synthetic coding sequence
atgaacttcagcgaggtgttcaagctgagcagcctgctgtgcaagttcagccccgacggcaagtacctggccagctgcgtgcagtacagactggtggtgagagacgtgaacaccctgcagatcctgcagctgtacacctgcctggaccagatccagcacatcgagtggagcgccgacagcctgttcatcctgtgcgccatgtacaagagaggcctggtgcaggtgtggagcctggagcagcccgagtggcactgcaagatcgacgagggcagcgccggcctggtggccagctgctggagccccgacggcagacacatcctgaacaccaccgagttccacctgagaatcaccgtgtggagcctgtgcaccaagagcgtgagctacatcaagtaccccaaggcctgcctgcagggcatcaccttcaccagagacggcagatacatggccctggccgagagaagagactgcaaggactacgtgagcatcttcgtgtgcagcgactggcagctgctgagatacaagatcctgctgtacagcctggacggcagactgctgagcacctacagcgcctacgagtggagcctgggcatcaagagcgtggcctggagccccagcagccagttcctggccgtgggcagctacgacggcaagtag

SEQ ID NO: 11902 - DNA, 483 bp, synthetic construct; identical to SEQ ID NO: 10977
  source 1..483: mol_type = other DNA; note = Synthetic coding sequence

SEQ ID NO: 11903 - DNA, 951 bp, synthetic construct
  source 1..951: mol_type = other DNA; note = Synthetic coding sequence
atggaggagaacaacctgcagtgcagcagcgtggtggacggcaacttcgaggaggtgcccagagagaccgccatccagttcaagccccccctgtacagacagagataccagttcgtgaagaacctggtggaccagcacgagcccaagaaggtggccgacctgggctgcggcgacaccagcctgctgagactgctgaaggtgaacccctgcatcgagctgctggtgggcgtggacatcaacgaggacaagctgagatggagaggcgacagcctggcccccttcctgggcgacttcctgaagcccagagacctgaacctgaccatcaccctgtaccacggcagcgtggtggagagagacagcagactgctgggcttcgacctgatcacctgcatcgagctgatcgagcacctggacagcggcgacctggccagattccccgaggtggtgttcggctacctgagccccagcatgatcgtgatcagcacccccaacagcgagttcaaccccctgttccccagcgtgaccctgagagacagcgaccacaagttcgagtggaccagaatggagttccagacctgggccctgtacgtggccaacagatacgactacagcgtggagttcaccggcgtgggcgagccccccgccggcgccgagaacgtgggctactgcacccagatcggcatcttcagaaagaacggcggcaaggccaccgagagctgcctgagcgagcagcacgaccagcacgtgtacaaggccgtgttcaccaccagctaccccagcctgcagcaggagagattcttcaagctggtgctggtgaacgaggtgagccagcaggtggagagcctgagagtgagccacctgcccagaagaaaggagcaggccggcgagagaggcgacaagcccaaggacatcggcggcagcaaggcccccgtgccctgcttcggcccctag

SEQ ID NO: 11904 - DNA, 1056 bp, synthetic construct
  source 1..1056: mol_type = other DNA; note = Synthetic coding sequence
atgtggacccccagacccgccctgcacgtgcacgtgatcctgtacagccccatccacagatgctacgccagagccgaccccaccatgggcagaatctgggtggacgccgccgtgccctgcctggaggagtgcggcttcctgctgcacttcagagacggctgctaccacctggagaccagcacccaccacttcctgagccacgtggacagactgttcagccagcccagcagccagaccgccttccacatgcaggtgagacccggcggcctggtggccctgtgcgacggcgagggcggcatgctgtacccccagggcacccacctgctgctgggcatgggctgcaaccccatgagaggcgaggagtggttcatcctgcagcactgccccacctgggtgagcctgagaagcaagaccggcagattcatcagcgtgatctacgacggcgaggtgagagccgccagcgagagactgaacagaatgagcctgttccagttcgagtgcgacagcgagagccccaccgtgcagctgagaagcgccaacggctactacctgagccagagaagacacagagccgtgatggccgacggccaccccctggagagcgacaccttcttcagaatgcactggaactgcggcagaatcatcctgcagagctgcagaggcagattcctgggcatcgcccccaacagcctgctgatggccaacgtgatcctgcccggccccaacgaggagttcggcatcctgttcgccaacagaagcttcctggtgctgagaggcagatacggctacgtgggcagcagcagcggccacgacctgatccagtgcaaccaggaccagcccgacagaatccacctgctgccctgcagacccggcatctaccacttccagggcggcatcctgctggtgaacaacatcctgtggcacctgagccccctgggccaggtgtgcccccagctgctgtacagagccagcggcgagcagctgacccactgcaccggcccccagtggctgctgcacgccagcagacccaagtggcaccccgtgggcagacagtag

SEQ ID NO: 11905 - DNA, 333 bp, synthetic construct
  source 1..333: mol_type = other DNA; note = Synthetic coding sequence
atgcagatcagcagcgagaaggaggaggacgacaacgagaagagacaggaccccggcgacaactgggaggagggcggcggcggcggcggcggcatggagaagagcagcggcccctggaacaagaccgcccccgtgcaggccccccccgcccccgtgatcgtgaccgagacccccgagcccgccatgaccagcggcgtgtacagaccccccggcgccagactgaccaccaccagaaagaccccccagggcccccccgagatctacagcgacacccagttccccagcctgcagagcaccgccaagcacgtggagagcagaaagtacctgaagtag

SEQ ID NO: 11906 - DNA, 972 bp, synthetic construct
  source 1..972: mol_type = other DNA; note = Synthetic coding sequence
atggagggccacgaccccaaggagcccgagcagctgagaaagctgttcatcggcggcctgagcttcgagaccaccgacgacagcctgagagagcacttcgagaagtggggcaccctgaccgactgcgtggtgatgagagacccccagaccaagagaagcagaggcttcggcttcgtgacctacagctgcgtggaggaggtggacgccgccatgtgcgccagaccccacaaggtggacggcagagtggtggagcccaagagagccgtgagcagagaggacagcgtgaagcccggcgcccacctgaccgtgaagaagatcttcgtgggcggcatcaaggaggacaccgaggagtacaacctgagagactacttcgagaagtacggcaagatcgagaccatcgaggtgatggaggacagacagagcggcaagaagagaggcttcgccttcgtgaccttcgacgaccacgacaccgtggacaagatcgtggtgcagaagtaccacaccatcaacggccacaactgcgaggtgaagaaggccctgagcaagcaggagatgcagagcgccggcagccagagaggcagaggcggcggcagcggcaacttcatgggcagaggcggcaacttcggcggcggcggcggcaacttcggcagaggcggcggcaactacggcggcggccccggctacagcagcagaggcggctacggcggcggcggccccggctacggcaaccagggcggcggctacggcggcggcggcggctacgacggctacaacgagggcggcaacttcggcggcggcaactacggcggcggcggcaactacaacgacttcggcaactacagcggccagcagcagagcaactacggccccatgaagggcggcagcttcggcggcagaagcagcggcagcccctacggcggcggctacggcagcggcggcggcagcggcggctacggcagcagaagattctag

SEQ ID NO: 11907 - DNA, 291 bp, synthetic construct
  source 1..291: mol_type = other DNA; note = Synthetic coding sequence
aacatccagctggtggccgacggctgctgcaacctgcagaagcagatccagatcacccagctgttcggcgtgcccgtggtggtggccctgaacgtgttcaagaccgacaccagagccgagatcgacctggtgtgcgagctggccaagagagccggcgccttcgacgccgtgccctgctaccactggagcgtgggcggcaagggcagcgtggacctggccagagccgtgagagaggccgccagcaagagaagcagattccagttcctgtacgacgtgcagcccttcagctag

SEQ ID NO: 11908 - DNA, 483 bp, synthetic construct
  source 1..483: mol_type = other DNA; note = Synthetic coding sequence
atgaccgacgtgcccgccaccttcacccaggccgagtgcaacggcgacaagccccccgagaacggccagcagaccatcaccaagatcagcgaggagctgaccgacgtggacagccccctgccccactacagagtggagcccagcctggagggcgccctgaccaagggcagccaggaggagagaagaaagctgcagggcaacatgctgctgaacagcagcatggaggacaagatgctgaaggagaaccccgaggagaagctgttcatcgtgcacaaggccatcaccgacctgagcctgcaggagaccagcgccgacgagatgaccttcagagagggccaccagtgggagaagatccccctgagcggcagcaaccaggagatcagaagacagaaggagagaatcaccgagcagcccctgaaggaggaggaggacgaggacagaaagaacaagggccaccaggccgccgagatcgagtggctgtag

SEQ ID NO: 11909 - DNA, 480 bp, synthetic construct; identical to SEQ ID NO: 11816
  source 1..480: mol_type = other DNA; note = Synthetic coding sequence

SEQ ID NO: 11910 - DNA, 432 bp, synthetic construct
  source 1..432: mol_type = other DNA; note = Synthetic coding sequence
atggacagcagccagcagaagaccttcagaggccacgacgcccccgtgctgagcctgagcttcgaccccaaggacatcttcctggccagcgccagctgcgacggcagcgtgagagtgtggcagatcagcgaccagacctgcgccatcagctggcccctgctgcagaagtgcaacgacgtgatcaacgccaagagcatctgcagactggcctggcagcccaagagcggcaagctgctggccatccccgtggagaagagcgtgaagctgtacagaagagagagctggagccaccagttcgacctgagcgacaacttcatcagccagaccctgaacatcgtgacctggagcccctgcggccagtacctggccgccggcagcatcaacggcctgatcatcgtgtggaacgtggagaccaaggactgcatggagtag

SEQ ID NO: 11911 - DNA, 2109 bp, synthetic construct
  source 1..2109: mol_type = other DNA; note = Synthetic coding sequence
atgaccgagagatgcagcctgtggagcgccctgagcgccgccgcctgctgcttctacagaggcagcttcgtgcaggtgcagttcagcaaggagaagtacatcctggacagcagccccgagaagctgcacaaggagctggaggaggagctgaagctgagcagcaccgacctgagaagccacgcctggtaccacggcagaatccccagagaggtgagcgagaccctggtgcagagaaacggcgacttcctgatcagagacagcctgaccagcctgggcgactacgtgctgacctgcagatggagaaaccaggccctgcacttcaagatcaacaaggtggtggtgaaggccggcgagagctacacccacatccagtacctgttcgagcaggagagcttcgaccacgtgcccgccctggtgagataccacgtgggcagcagaaaggccgtgagcgagcagagcggcgccatcatctactgccccgtgaacagaaccttccccctgagatacctggaggccagctacggcctgggccagggcagcagcaagcccgccagccccgtgagccccagcggccccaagggcagccacatgaagagaagaagcgtgaccatgaccgacggcctgaccgccgacaaggtgaccagaagcgacggctgccccaccagcaccagcctgcccagacccagagacagcatcagaagctgcgccctgagcatggaccagatccccgacctgcacagccccatgagccccatcagcgagagccccagcagccccgcctacagcaccgtgaccagagtgcacgccgcccccgccgcccccagcgccaccgccctgcccgccagccccgtggccagaagaagcagcgagccccagctgtgccccggcagcgcccccaagacccacggcgagagcgacaagggcccccacaccagccccagccacaccctgggcaaggccagccccagccccagcctgagcagctacagcgaccccgacagcggccactactgccagctgcagccccccgtgagaggcagcagagagtgggccgccaccgagaccagcagccagcaggccagaagctacggcgagagactgaaggagctgagcgagaacggcgcccccgagggcgactggggcaagaccttcaccgtgcccatcgtggaggtgaccagcagcttcaaccccgccaccttccagagcctgctgatccccagagacaacagacccctggaggtgggcctgctgagaaaggtgaaggagctgctggccgaggtggacgccagaaccctggccagacacgtgaccaaggtggactgcctggtggccagaatcctgggcgtgaccaaggagatgcagaccctgatgggcgtgagatggggcatggagctgctgaccctgccccacggcagacagctgagactggacctgctggagagattccacaccatgagcatcatgctggccgtggacatcctgggctgcaccggcagcgccgaggagagagccgccctgctgcacaagaccatccagctggccgccgagctgagaggcaccatgggcaacatgttcagcttcgccgccgtgatgggcgccctggacatggcccagatcagcagactggagcagacctgggtgaccctgagacagagacacaccgagggcgccatcctgtacgagaagaagctgaagcccttcctgaagagcctgaacgagggcaaggagggcccccccctgagcaacaccaccttcccccacgtgctgcccctgatcaccctgctggagtgcgacagcgccccccccgagggccccgagccctggggcagcaccgagcacggcgtggaggtggtgctggcccacctggaggccgccagaaccgtggcccaccacggcggcctgtaccacaccaacgccgaggtgaagctgcagggcttccaggccagacccgagctgctggaggtgttcagcaccgagttccagatgagactgctgtggggcagccagggcgccagcagcagccaggccagaagatacgagaagttcgacaaggtgctgaccgccctgagccacaagctggagcccgccgtgagaagcagcgagctgtag

SEQ ID NO: 11912 - DNA, 585 bp, synthetic construct
  source 1..585: mol_type = other DNA; note = Synthetic coding sequence
atgaccgaggacagccagagaaacttcagaagcgtgtactacgagaaggtgggcttcagaggcgtggaggagaagaagagcctggagatcctgctgaaggacgacagactgggcatcctgcccccccaccacgagagccacgccaaggtgatgatgtacagaaaggagcagtacctggacgtgctgcacgccctgaaggtggtgagattcgtgagcgacgccaccccccaggccgaggtgtacctgagaatgtaccagctggagagcggcaagctgcccagaagccccagcttccccctggagcccgacgacgaggtgttcctggccatcgccaaggccatggaggagatggtggaggacagcgtggactgctactggatcaccagaagattcgtgaaccagctgaacaccaagtacagagacagcctgccccagctgcccaaggccttcgagcagtacctgaacctggaggacggcagactgctgacccacctgagaatgtgcagcgccgcccccaagctgccctacgacctgtggttcaagagatgcttcgccggctgcctgcccgagagcagcctgcagtag

SEQ ID NO: 11913 - DNA, 2334 bp, synthetic construct
  source 1..2334: mol_type = other DNA; note = Synthetic coding sequence
atggagcccaaggaggccaccggcaaggagaacatggtgaccaagaagaagaacctggccttcctgagaagcagactgtacatgctggagagaagaaagaccgacaccgtggtggagagcagcgtgagcggcgaccacagcggcaccctgagaagaagccagagcgacagaaccgagtacaaccagaagctgcaggagaagatgaccccccagggcgagtgcagcgtggccgagaccctgacccccgaggaggagcaccacatgaagagaatgatggccaagagagagaagatcatcaaggagctgatccagaccgagaaggactacctgaacgacctggagctgtgcgtgagagaggtggtgcagcccctgagaaacaagaagaccgacagactggacgtggacagcctgttcagcaacatcgagagcgtgcaccagatcagcgccaagctgctgagcctgctggaggaggccaccaccgacgtggagcccgccatgcaggtgatcggcgaggtgttcctgcagatcaagggccccctggaggacatctacaagatctactgctaccaccacgacgaggcccacagcatcctggagagctacgagaaggaggaggagctgaaggagcacctgagccactgcatccagagcctgaagaagatctacatgcaggagggcaagcccaacctgctggacatgggcagcctgatgatcaagcccatccagagagtgatgaagtaccccctgctgctgtgcgagctgagaaacagcaccccccccagccaccccgactacagagccctggacgacgccttcgccgccgtgaaggacatcaacgtgaacatcaacgagctgaagagaagaaaggacctggtgctgaagtacaagaagaacgacgaggacgagagcctgaaggacaagctgagcaagctgaacatccacagcatcagcaagaagagcaagagagtgaccaaccacctgaagatcctgaccagaggcgagagccaggtgaaggacaacaccttcaacagagaggagaagctgttcagagccctggagaagaccgtgagactgtgcgtgaagaacatcagcctgtgcctgcagcacatccaggacgccatgcccctggccctgcagagcgtgatggacctgcaggagatcagctacaacaaggacgacgagatggactacagcgagaccctgagcaacgccctgaacagctgccacgacttcgccagccacctgcagagactgatcctgacccccctgagcgccctgctgagcctgttccccggcccccacaagctgatccagaagagatacgacaagctgctggactgcaacagctacctgcagagaagcaccggcgaggagagcgacctggccaagaaggagtacgaggccctgaacgcccagctggtggaggagctgcaggccttcaaccaggccgccagaaagatcctgctgaactgcctgtgcagcttcatcaccctgctgagagacctgatgctggtggcccagcaggcctacagcaccctggtgcccatgcccctgctggtgagcagcatcagcgagatccagaaccaggtgctggaggagatccagaacctgaactgcgtgaaggagaacagcgccaccttcatcgagagaaagctgagcttcgagaagaagaagcccgtgcagatcctgcccgagatgccccaccagaccgacatccacagaagcaagctgctgagcacctacagcgccgaggagctgtaccaggccaagagaaagtgcaacgccacccaggagtacgacatcaacctgctggagggcgacctggtggccgtgatcgagcagaaggaccccctgggcagcaccagcagatggctggtggacaccggcaacgtgaagggctacgtgtacagcagcttcctgaagccctacaaccccgccaagatgcagaaggtggacgccgagaacagattctgcgacgacgacttcgagaacatcagcctgttcgtgagcagcagacccgccagcgacagcgtgaccggcaccagcgagagcagcatcggcgacagcagcagcagcctgagcggcacctgcggcaagttcgagaccaacggcaccgacgtggacagcttccaggaggtggacgagcagatcttctacgccgtgcacgccttccaggccagaagcgaccacgagctgagcctgcaggagtaccagagagtgcacatcctgagattctgcgacctgagcggcaacaaggagtggtggctggccgaggcccagggccagaagggctacgtgcccgccaactacctgggcaagatgacctacgcctag

SEQ ID NO: 11914 - DNA, 543 bp, synthetic construct
  source 1..543: mol_type = other DNA; note = Synthetic coding sequence
tgaagccagcccaagagcttcgagaacagccccggcgacctgggcaacagcagcctgcccaccgccggctacaagagagcccagaccagcggcatcgaggaggagaccgtgaaggagaagaagagaaagggcaacaagcagagcaagcacggccccggcagacccaagggcaacaagaaccaggagaacgtgagccacctgagcgtgagcagcgccagccccaccagcagcgtggccagcgccgccggcagcatcaccagcagcagcctgcagaagagccccaccctgctgagaaacggcagcctgcagagcctgagcgtgggcagcagccccgtgggcagcgagatcagcatgcagtacagacacgacggcgcctgccccaccaccagcatctacaacagcaacgacgtggccgtgagcttccccaacgtggtgagcggcagcggcagcagcacccccgtgagcagcagccacctgccccagcagagcagcggccacctgcagcaggtgggcgccctgagccccagcgccgtgagcagctag

SEQ ID NO: 11915 - DNA, 384 bp, synthetic construct
  source 1..384: mol_type = other DNA; note = Synthetic coding sequence
atgaccaccaagaacctggagaccaaggtgaccgtgaccagcagccccatcagaggcgccggcgacggcatggagaccgaggagccccccaagagcgtggaggtgaccagcggcgtgcagagcagaaagcaccacagcctgcagagcccctggaagaaggccgtgcccagcgagagccccggcgtgctgcagctgggcaagatgctgaccgagaaggccatggaggtgaaggccgtgagaatcctggtgcccaaggccgccatcacccacgacatccccaacaagaacaccaaggtgaagagcctgggccaccacaagggcgagttcctgggccagagcgagggcgtgatcgagcccaacaaggagctgagcgaggtgaagtag

SEQ ID NO: 11916 - DNA, 1683 bp, synthetic construct
  source 1..1683: mol_type = other DNA; note = Synthetic coding sequence
atgagcgagcacagcagaaacagcgaccaggaggagctgctggacgaggagatcaacgaggacgagatcctggccaacctgagcgccgaggagctgaaggagctgcagagcgagatggaggtgatggcccccgaccccagcctgcccgtgggcatgatccagaaggaccagaccgacaagccccccaccggcaacttcaaccacaagagcctggtggactacatgtactgggagaaggccagcagaagaatgctggaggaggagagagtgcccgtgaccttcgtgaagagcgaggagaagacccaggaggagcacgaggagatcgagaagagaaacaagaacatggcccagtacctgaaggagaagctgaacaacgagatcgtggccaacaagagagagagcaagggcagcagcaacatccaggagaccgacgaggaggacgaggaggaggaggacgacgacgacgacgacgagggcgaggacgacggcgaggagagcgaggagaccaacagagaggaggagggcaaggccaaggagcagatcagaaactgcgagaacaactgccagcaggtgaccgacaaggccttcaaggagcagagagacagacccgaggcccaggagcagagcgagaagaagatcagcaagctggaccccaagaagctggccctggacaccagcttcctgaaggtgagcaccagacccagcggcaaccagaccgacctggacggcagcctgagaagagtgagaaagaacgaccccgacatgaaggagctgaacctgaacaacatcgagaacatccccaaggagatgctgctggacttcgtgaacgccatgaagaagaacaagcacatcaagaccttcagcctggccaacgtgggcgccgacgagaacgtggccttcgccctggccaacatgctgagagagaacagaagcatcaccaccctgaacatcgagagcaacttcatcaccggcaagggcatcgtggccatcatgagatgcctgcagttcaacgagaccctgaccgagctgagattccacaaccagagacacatgctgggccaccacgccgagatggagatcgccagactgctgaaggccaacaacaccctgctgaagatgggctaccacttcgagctgcccggccccagaatggtggtgaccaacctgctgaccagaaaccaggacaagcagagacagaagagacaggaggagcagaagcagcagcagctgaaggagcagaagaagctgatcgccatgctggagaacggcctgggcctgccccccggcatgtgggagctgctgggcggccccaagcccgacagcagaatgcaggagttcttccagccccccccccccagaccccccaacccccagaacgtgcccttcagccagagaagcgagatgatgaagaagcccagccaggcccccaagtacagaaccgaccccgacagcttcagagtggtgaagctgaagagaatccagagaaagagcagaatgcccgaggccagagagccccccgagaagaccaacctgaaggacgtgatcaagaccctgaagcccgtgcccagaaacagacccccccccctggtggagatcacccccagagaccagctgctgaacgacatcagacacagcagcgtggcctacctgaagcccgtgcagctgcccaaggagctggcctag

SEQ ID NO: 11917 - DNA, 51 bp, synthetic construct; identical to SEQ ID NO: 11825
  source 1..51: mol_type = other DNA; note = Synthetic coding sequence

SEQ ID NO: 11918 - DNA, 513 bp, synthetic construct
  source 1..513: mol_type = other DNA; note = Synthetic coding sequence
atgcccatcctgctgttcctgatcgacaccagcgccagcatgaaccagagaagccacctgggcaccacctacctggacaccgccaagggcgccgtggagaccttcatgaagctgagagccagagaccccgccagcagaggcgacagatacatgctggtgaccttcgaggagcccccctacgccatcaaggccggctggaaggagaaccacgccaccttcatgaacgagctgaagaacctgcaggccgagggcctgaccaccctgggccagagcctgagaaccgccttcgacctgctgaacctgaacagactggtgaccggcatcgacaactacggccagggcagaaaccccttcttcctggagcccgccatcatcatcaccatcaccgacggcagcaagctgaccaccaccagcggcgtgcaggacgaggccgtgcacatcctgtgcgtgctgcaggagtgcctgatcagcgtgtggagcccctggtgcagaaagtacaaggtgggctggtag

SEQ ID NO: 11919 - DNA, 204 bp, synthetic construct
  source 1..204: mol_type = other DNA; note = Synthetic coding sequence
atgagcagaagaagattcgactgcagaagcatcagcggcctgctgaccaccaccccccagatccccatcaagatggagaacttcaacaacttctacatcctgaccagcaaggagctgggcagaggcaagttcgccgtggtgagacagtgcatcagcaagagcaccggccaggagtacgccgccaagttcctgaagaagagatag

SEQ ID NO: 11920 - DNA, 1107 bp, synthetic construct
  source 1..1107: mol_type = other DNA; note = Synthetic coding sequence
atgctgagcaagagaggctgccacgccagaatctacgccgacttccccatcagaagactgatcagccagagaagcagcctggagaccctggaggacatcgaggagaacgcccccctgagaagatgcagaaccctgagcggcagccccagacccaagaacttcaagaagatccacttcatcaagaacatgagacagcacgacaccagaaacggcagaatcgtgctgatcagcggcagaagaagcttctgcagcatcttcagcgtgctgccctacagagacagcacccaggtgggcgacctgaagctggacggcggcagacagagcaccggcgccgtgagcctgaaggagatcatcggcctggagggcgtggagctgggcgccgacggcaagaccgtgagctacacccagttcctgctgcccaccaacgccttcggcgccagaagaaacaccatcgacagcaccagcagcttcagccagttcagaaacctgagccacagaagcctgagcatcggcagagccagcggcacccagggcagcctggacaccggcagcgacctgggcgacttcatggactacgaccccaacctgctggacgacccccagtggccctgcggcaagcacaagagagtgctgatcttccccagctacatgaccaccgtgatcgactacgtgaagcccagcgacctgaagaaggacatgaacgagaccttcaaggagaagttcccccacatcaagctgaccctgagcaagatcagaagcctgaagagagagatgagaaagctggcccaggaggactgcggcctggaggagcccaccgtggccatggccttcgtgtacttcgagaagctggccctgaagggcaagctgaacaagcagaacagaaagctgtgcgccggcgcctgcgtgctgctggccgccaagatcggcagcgacctgaagaagcacgaggtgaagcacctgatcgacaagctggaggagaagttcagactgaacagaagagagctgatcgccttcgagttccccgtgctggtggccctggagttcgccctgcacctgcccgagcacgaggtgatgccccactacagaagactggtgcagagcagctag

SEQ ID NO: 11921 - DNA, 795 bp, synthetic construct
  source 1..795: mol_type = other DNA; note = Synthetic coding sequence
atgaccgacgtgcccgccaccttcacccaggccgagtgcaacggcgacaagccccccgagaacggccagcagaccatcaccaagatcagcgaggagctgaccgacgtggacagccccctgccccactacagagtggagcccagcctggagggcgccctgaccaagggcagccaggaggagagaagaaagctgcagggcaacatgctgctgaacagcagcatggaggacaagatgctgaaggagaccagcgccgacgagatgaccttcagagagggccaccagtgggagaagatccccctgagcggcagcaaccaggagatcagaagacagaaggagagaatcaccgagcagcccctgaaggaggaggaggacgaggacagaaagaacaagggccaccaggccgccgagatcgagtggctgggcttcagaaagcccagccaggccgacatgctgcacagcaagcacgacgaggagcagaaggtgtgggacgaggagatcgacgacgacgacgacgacaactgcaacaacgacgaggacgaggtgagagtgatcgagttcaagaagaagcacgaggaggtgagccagttcaaggaggagggcgacgccagcgaggacagccccctgagcagcgccagcagccaggccgtgacccccgacgagcagcccaccctgggcaagaagagcgacatcagcagaaacgcctacagcagatacaacaccatcagctacagaaagatcagaaagggcaacaccaagcagagaatcgacgagttcgagagcatgatgcacctgtag

SEQ ID NO: 11922 - DNA, 4302 bp, synthetic construct; identical to SEQ ID NO: 9764
  source 1..4302: mol_type = other DNA; note = Synthetic coding sequence

SEQ ID NO: 11923 - DNA, 810 bp, synthetic construct
  source 1..810: mol_type = other DNA; note = Synthetic coding sequence
atgttccccgccctggagacccacctgaagcagaccatccccgacccctacgaggacttcatgtacagacacctgcagtactacggctacttcaaggcccagagaggcagcctgcccaacagcgccacccaccagcacgtgagaaagaacaacccccagtgcctgctgaacggcagcctgggcgagaaggacgacctgatccccgacaccctgcagaaggagaagctgctgtacagccacatgctgagcctgccccacctgagaagcagacagctgctgtacgacgagctggacgaggtgaaccccagactgagagagccccaggagctgttcagcatcctgagcaccaagagacccctgcaggcccccagatggcccatcgagtgcgaggtgatcaaggagaacatccaccacatcgagtgggcccccccccagcccgagtacttctaccagcccaagggcaacgagaaggtgcccgagatcgtgggcgagaagaagggcaccgtggtgtaccagctggacagcgtgcccatcgagggcagctacttcaccagcagcagagtgggcggcaagagaggcatcgtgaaggagctggccgtgaccctgcagggccccgaggacaacaccctgctgttcgagagcagattcgagagcggcaacctgcagaaggccgtgagagtggaccccatgagcatgaacagcccctgcgagctgaccagcaccctgaccaacaccctgagcggcttcatcttcgtgttcagaacccccgagaagatgctgcccatcgccagccccctgagcacctgctag

SEQ ID NO: 11924 - DNA, 975 bp, synthetic construct
  source 1..975: mol_type = other DNA; note = Synthetic coding sequence
atgcccctgcaggtgagcgactacagctggcagcagaccaagaccgccgtgttcctgagcctgcccctgaagggcgtgtgcgtgagagacaccgacgtgttctgcaccgagaactacctgaaggtgaacttcccccccttcctgttcgaggccttcctgtacgcccccatcgacgacgagagcagcaaggccaagatcggcaacgacaccatcgtgttcaccctgtacaagaaggaggccgccatgtgggagaccctgagcgtgaccggcgtggacaaggagatgatgcagagaatcagagagaagagcatcctgcaggcccaggagagagccaaggaggccaccgaggccaaggccgccgccaagagagaggaccagaagtacgccctgagcgtgatgatgaagatcgaggaggaggagagaaagaagatcgaggacatgaaggagaacgagagaatcaaggccaccaaggccctggaggcctggaaggagtaccagagaaaggccgaggagcagaagaagatccagagagaggagaagctgtgccagaaggagaagcagatcaaggaggagagaaagaagatcaagtacaagagcctgaccagaaacctggccagcagaaacctggcccccaagggcagaaacagcgagaacatcttcaccgagaagctgaaggaggacagcatccccgcccccagaagcgtgggcagcatcaagatcaacttcacccccagagtgttccccaccgccctgagagagagccaggtggccgaggaggaggagtggctgcacaagcaggccgaggccagaagagccatgaacaccgacatcgccgagctgtgcgacctgaaggaggaggagaagaaccccgagtggctgaaggacaagggcaagcccgagagatgcctgaagatccccgtgaccgtgatccacctggtggtgggcctgagcagcgtgatgagaggccagatctag

SEQ ID NO: 11925 - DNA, 162 bp, synthetic construct
  source 1..162: mol_type = other DNA; note = Synthetic coding sequence
atgcagaccagcagcagcagaagcgtgcacctgagcgagtggcagaagaactacttcgccatcaccagcggcatctgcaccggccccaaggccgacgcctacagagcccagatcctgagaatccagtacgcctgggccaacagcgagatcagccaggtgtag

SEQ ID NO: 11926 - DNA, 2079 bp, synthetic construct
  source 1..2079: mol_type = other DNA; note = Synthetic coding sequence
atggtgaccaccctgggccccaagatggccgccgagtggggcggcggcgtgggctacagcggcagcggccccggcagaagcagatggagatggagcggcagcgtgtgggtgagaagcgtgctgctgctgctgggcggcctgagagccagcgccaccagcacccccgtgagcctgggcagcagccccccctgcagacaccacgtgcccagcgacaccgaggtgatcaacaaggtgcacctgaaggccaaccacgtggtgaagagagacgtggacgagcacctgagaatcaagaccgtgtacgacaagagcgtggaggagctgctgcccgagaagaagaacctggtgaagaacaagctgttcccccaggccatcagctacctggagaagaccttccaggtgagaagacccgccggcaccatcctgctgagcagacagtgcgccaccaaccagtacctgagaaaggagaacgacccccacagatactgcaccggcgagtgcgccgcccacaccaagtgcggccccgtgatcgtgcccgaggagcacctgcagcagtgcagagtgtacagaggcggcaagtggccccacggcgccgtgggcgtgcccgaccaggagggcatcagcgacgccgacttcgtgctgtacgtgggcgccctggccaccgagagatgcagccacgagaacatcatcagctacgccgcctactgccagcaggaggccaacatggacagacccatcgccggctacgccaacctgtgccccaacatgatcagcacccagccccaggagttcgtgggcatgctgagcaccgtgaagcacgaggtgatccacgccctgggcttcagcgccggcctgttcgccttctaccacgacaaggacggcaaccccctgaccagcagattcgccgacggcctgccccccttcaactacagcctgggcctgtaccagtggagcgacaaggtggtgagaaaggtggagagactgtgggacgtgagagacaacaagatcgtgagacacaccgtgtacctgctggtgacccccagagtggtggaggaggccagaaagcacttcgactgccccgtgctggagggcatggagctggagaaccagggcggcgtgggcaccgagctgaaccactgggagaagagactgctggagaacgaggccatgaccggcagccacacccagaacagagtgctgagcagaatcaccctggccctgatggaggacaccggctggtacaaggccaactacagcatggccgagaagctggactggggcagaggcatgggctgcgacttcgtgagaaagagctgcaagttctggatcgaccagcagagacagaagagacagatgctgagcccctactgcgacaccctgagaagcaaccccctgcagctgacctgcagacaggaccagagagccgtggccgtgtgcaacctgcagaagttccccaagcccctgccccaggagtaccagtacttcgacgagctgagcggcatccccgccgaggacctgccctactacggcggcagcgtggagatcgccgactactgccccttcagccaggagttcagctggcacctgagcggcgagtaccagagaagcagcgactgcagaatcctggagaaccagcccgagatcttcaagaactacggcgccgagaagtacggcccccacagcgtgtgcctgatccagaagagcgccttcgtgatggagaagtgcgagagaaagctgagctaccccgactggggcagcggctgctaccaggtgagctgcagcccccagggcctgaaggtgtgggtgcaggacaccagctacctgtgcagcagagccggccaggtgctgcccgtgagcatccagatgaacggctggatccacgacggcaacctgctgtgccccagctgctgggacttctgcgagctgtgcccccccgagaccgacccccccgccaccaacctgaccagagccctgcccctggacctgtgcagctgcagcagcagcctggtggtgaccctgtggctgctgctgggcaacctgttccccctgctggccggcttcctgctgtgcatctggcactag

SEQ ID NO: 11927 - DNA, 3021 bp, synthetic construct
  source 1..3021: mol_type = other DNA; note = Synthetic coding sequence
atggacagcagccagcagaagaccttcagaggccacgacgcccccgtgctgagcctgagcttcgaccccaaggacatcttcctggccagcgccagctgcgacggcagcgtgagagtgtggcagatcagcgaccagacctgcgccatcagctggcccctgctgcagaagtgcaacgacgtgatcaacgccaagagcatctgcagactggcctggcagcccaagagcggcaagctgctggccatccccgtggagaagagcgtgaagctgtacagaagagagagctggagccaccagttcgacctgagcgacaacttcatcagccagaccctgaacatcgtgacctggagcccctgcggccagtacctggccgccggcagcatcaacggcctgatcatcgtgtggaacgtggagaccaaggactgcatggagagagtgaagcacgagaagggctacgccatctgcggcctggcctggcaccccacctgcggcagaatcagctacaccgacgccgagggcaacctgggcctgctggagaacgtgtgcgaccccagcggcaagaccagcagcagcaaggtgagcagcagagtggagaaggactacaacgacctgttcgacggcgacgacatgagcaacgccggcgacttcctgaacgacaacgccgtggagatccccagcttcagcaagggcatcatcaacgacgacgaggacgacgaggacctgatgatggccagcggcagacccagacagagaagccacatcctggaggacgacgagaacagcgtggacatcagcatgctgaagaccggcagcagcctgctgaaggaggaggaggaggacggccaggagggcagcatccacaacctgcccctggtgaccagccagagacccttctacgacggccccatgcccacccccagacagaagcccttccagagcggcagcacccccctgcacctgacccacagattcatggtgtggaacagcatcggcatcatcagatgctacaacgacgagcaggacaacgccatcgacgtggagttccacgacaccagcatccaccacgccacccacctgagcaacaccctgaactacaccatcgccgacctgagccacgaggccatcctgctggcctgcgagagcaccgacgagctggccagcaagctgcactgcctgcacttcagcagctgggacagcagcaaggagtggatcatcgacctgccccagaacgaggacatcgaggccatctgcctgggccagggctgggccgccgccgccaccagcgccctgctgctgagactgttcaccatcggcggcgtgcagaaggaggtgttcagcctggccggccccgtggtgagcatggccggccacggcgagcagctgttcatcgtgtaccacagaggcaccggcttcgacggcgaccagtgcctgggcgtgcagctgctggagctgggcaagaagaagaagcagatcctgcacggcgaccccctgcccctgaccagaaagagctacctggcctggatcggcttcagcgccgagggcaccccctgctacgtggacagcgagggcatcgtgagaatgctgaacagaggcctgggcaacacctggacccccatctgcaacaccagagagcactgcaagggcaagagcgaccactactgggtggtgggcatccacgagaacccccagcagctgagatgcatcccctgcaagggcagcagattcccccccaccctgcccagacccgccgtggccatcctgagcttcaagctgccctactgccagatcgccaccgagaagggccagatggaggagcagttctggagaagcgtgatcttccacaaccacctggactacctggccaagaacggctacgagtacgaggagagcaccaagaaccaggccaccaaggagcagcaggagctgctgatgaagatgctggccctgagctgcaagctggagagagagttcagatgcgtggagctggccgacctgatgacccagaacgccgtgaacctggccatcaagtacgccagcagaagcagaaagctgatcctggcccagaagctgagcgagctggccgtggagaaggccgccgagctgaccgccacccaggtggaggaggaggaggaggaggaggacttcagaaagaagctgaacgccggctacagcaacaccgccaccgagtggagccagcccagattcagaaaccaggtggaggaggacgccgaggacagcggcgaggccgacgacgaggagaagcccgagatccacaagcccggccagaacagcttcagcaagagcaccaacagcagcgacgtgagcgccaagagcggcgccgtgaccttcagcagccagggcagagtgaaccccttcaaggtgagcgccagcagcaaggagcccgccatgagcatgaacagcgccagaagcaccaacatcctggacaacatgggcaagagcagcaagaagagcaccgccctgagcagaaccaccaacaacgagaagagccccatcatcaagcccctgatccccaagcccaagcccaagcaggccagcgccgccagctacttccagaagagaaacagccagaccaacaagaccgaggaggtgaaggaggagaacctgaagaacgtgctgagcgagacccccgccatctgccccccccagaacaccgagaaccagagacccaagaccggcttccagatgtggctggaggagaacagaagcaacatcctgagcgacaaccccgacttcagcgacgaggccgacatcatcaaggagggcatgatcagattcagagtgctgagcaccgaggagagaaaggtgtgggccaacaaggccaagggcgagaccgccagcgagggcaccgaggccaagaagagaaagagagtggtggacgagagcgacgagaccgagaaccaggaggagaaggccaaggagaacctgaacctgagcaagaagcagaagcccctggacttcagcaccaaccagaagctgagcgccttcgccttcaagcaggagtag

SEQ ID NO: 11928 - DNA, 540 bp, synthetic construct
  source 1..540: mol_type = other DNA; note = Synthetic coding sequence
atgaccgaggacagccagagaaacttcagaagcgtgtactacgagaaggtgggcttcagaggcgtggaggagaagaagagcctggagatcctgctgaaggacgacagactggacaccgagaagctgtgcaccttcagccagagattccccctgcccagcatgtacagagccctggtgtggaaggtgctgctgggcatcctgcccccccaccacgagagccacgccaaggtgatgatgtacagaaaggagcagtacctggacgtgctgcacgccctgaaggtggtgagattcgtgagcgacgccaccccccaggccgaggtgtacctgagaatgtaccagctggagagcggcaagctgcccagaagccccagcttccccctggagcccgacgacgaggtgttcctggccatcgccaaggccatggaggagatggtggaggacagcgtggactgctactggatcaccagaagattcgtgaaccagctgaacaccaagtacagagacagcctgccccagctggagggcatcaacgtgggctag

SEQ ID NO: 11929 - DNA, 3189 bp, synthetic construct
  source 1..3189: mol_type = other DNA; note = Synthetic coding sequence
atgatcagcaagggcggcagcgaggccctgctgcagaccctggtggacaccgccagaaccgccccccccgactacgacatcctgctgcccctgttcagactgctggccaaggtgggcctgagagacaagaagatcggcagaaaggccctggagctggaggccctggacgtgaccctgatcctggccagaaagaacctgagccacggccagaacctgctgcactgcctgtgggccctgagagtgttcgccagcagcgtgagcatgggcgccatgctgggcatcaacggcgccatggagctgctgttcaaggtgatcaccccctacaccagaaagagaacccaggccatcagagccgccaccgaggtgctggccgccctgctgaagagcaagagcaacggcagaagagccgtgaacagaggctacgtgaccagcctgctgggcctgcaccaggactggcacagccacgacaccgccaacgcctacgtgcagatcagaagaggcctgctgctgtgcctgagacacatcgccgccctgagaagcggcagagaggccttcctggccgcccagggcatggagatcctgttcagcaccacccagaactgcctggacgacaagagcatggagcccgtgatcagcgtggtgctgcagatcctgagacagtgctaccccaccagccccctgcccctggtgaccgccagcagcgcctacgccttccccgtgcccggctgcatcaccaccgagcccccccacgacctgcccgaggaggacttcgaggacgacggcgacgacgaggtggacaaggacagcgacaccgaggacggcaaggtggaggacgacgacctggagaccgacgtgaacaagctgagcagcaagcccggcctggacagacccgaggaggagctgatgcagtacgaggtgatgtgcctggagctgagctacagcttcgaggagctgcagagcaagctgggcgacgacctgaacagcgagaagacccagtacgccaaccaccaccacatccccgccgccgccagcagcaagcagcactgctacagcaaggaccagagcagctgcggccaggagagagagtacgccgtgcagaccagcctgctgtgcagagtgaagaccggcagaagcaccgtgcacctgggcagcaagaagaaccccggcgtgaacctgtaccagaacgtgcagagcaacagcctgagaagagacagcagcgagagcgagatccccgacatccaggccagccccaaggccgacgcctgggacgtggacgccatcttctgccccagaatgagcgccagcttcagcaacagcaccagaaccagagaggtggtgaaggtgatcgacaagctgctgcagacccacctgaagagagtgcccttccacgacccctacctgtacatggccaaggccagaagaaccagcagcgtggtggacttcaagatgatggccttccccgacgtgtggggccactgccccccccccaccacccagcccatgctggagagaaagtgcggcgtgcagagaatcagaatcttcgaggacatcagaagactgatccagcccagcgacgtgatcaacaaggtggtgttcagcctggacgagccctggcccctgcaggacaacgccagcaactgcctgagattcttcagcaagttcgagagcggcaacctgagaaaggccatccaggtgagagagttcgagtacgacctgctggtgaacgccgacgtgaacagcacccagcaccagcagtggttctacttcaaggtgagcggcatgcaggccgccatcccctaccacttcaacatcatcaactgcgagaagcccaacagccagttcaactacggcatgcagcccaccctgtacagcgtgaaggaggccctgctgggcaagcccacctggatcagaaccggccacgagatctgctactacaagaaccactacagacagagcaccgccgtggccggcggcgccagcggcaagtgctactacaccctgaccttcgccgtgaccttcccccacagcgaggacgtgtgctacctggcctaccactacccctacacctacaccgccctgatgacccacctggacatcctggagaagagcgtgaacctgaaggaggtgtacttcagacaggacgtgctgtgccagaccctgggcggcaacccctgccccctggtgaccatcaccgccatgcccgagagcaacagcgacgagcacctggagcagttcagacacagaccctaccaggtgatcaccgccagagtgcaccccggcgagagcaacgccagctgggtgatgaagggcaccctggagttcctggtgagcagcgaccccgtggccagactgctgagagagaacttcatcttcaagatcatccccatgctgaaccccgacggcgtgatcaacggcaaccacagatgcagcctgagcggcgaggacctgaacagacagtggctgagccccagcgcccacctgcagcccaccatctaccacgccaagggcctgctgtaccacctgagcagcatcggcagaagccccgtggtgttctgcgacttccacggccacagccagaagaagaacgtgttcctgtacggctgcagcatcaaggagaccctgtggcaggccgcctgcaccgtgggcaccagcaccatcctggaggaggtgaactacagaaccctgcccaagatcctggacaagctggcccccgccttcaccatgagcagctgcagcttcctggtggagaagagcagagccagcaccgccagagtggtggtgtggagagagatgggcgtgagcagaagctacaccatggagagcagctactgcggctgcaaccagggcccctaccagtgcacccagagactgctggagagaaccaagaacgagagagcccaccccgtggacggcctgcagggcctgcagttcggcaccagagagctggaggagatgggcgccatgttctgcctgggcctgctgatcctggagctgaagagcgccagctgcagccaccagctgctggcccaggccgccaccctgctgagcgccgaggaggacgccctggaccagcacctgcagagactgaagagcagcaacttcctgcccaagcacatctggttcgcctaccacttcttcgccatcaccaacttcttcaagatgaacctgctgctgcacgtgagcccctag

SEQ ID NO: 11930 - DNA, 738 bp, synthetic construct
  source 1..738: mol_type = other DNA; note = Synthetic coding sequence
atggccgccgccccccccagctactgcttcgtggccttcccccccagagccaaggacggcctggtggtgttcggcaagaacagcgccagacccagagacgaggtgcaggaggtggtgtacttcagcgccgccgaccacgagcccgagagcaaggtggagtgcacctacatcagcatcgaccaggtgcccagaacctacgccatcatgatcagcagacccgcctggctgtggggcgccgagatgggcgccaacgagcacggcgtgtgcatcgccaacgaggccatcaacaccagagagcccgccgccgagatcgaggccctgctgggcatggacctggtgagactgggcctggagagaggcgagaccgccaaggaggccctggacgtgatcgtgagcctgctggaggagcacggccagggcggcaactacttcgaggacgccaacagctgccacagcttccagagcgcctacctgatcgtggacagagacgaggcctgggtgctggagaccatcggcaagtactgggccgccgagaaggtgaccgagggcgtgagatgcatctgcagccagctgagcctgaccaccaagatggacgccgagcaccccgagctgagaagctacgcccagagccagggctggtggaccggcgagggcgagttcaacttcagcgaggtgttcagccccgtggaggaccacctggactgcggcgccggcaaggacagcctggagaagcagtag

SEQ ID NO: 11931 - DNA, 99 bp, synthetic construct
  source 1..99: mol_type = other DNA; note = Synthetic coding sequence
atgagcgagcagggcgacctgaaccaggccatcgccgaggagggcggcaccgagcaggagaccgccacccccgagaacggcatcgtgaagagcgagtag

SEQ ID NO: 11932 - DNA, 132 bp, synthetic construct
  source 1..132: mol_type = other DNA; note = Synthetic coding sequence
tgagtgctgggcagccccaagcccgaggagatccccctgacctggatccagcccggcaccaccgtgctgaactgcagccacgacttcctgagcgagagcctgatcatcatcagaagaatggccatcttctag

SEQ ID NO: 11933 - DNA, 339 bp, synthetic construct
  source 1..339: mol_type = other DNA; note = Synthetic coding sequence
atgttcgccaagctgaagaagaagatcgccgaggagaccgccgtggcccagagacccggcggcgccaccagaatccccagaagcgtgagcaaggagagcgtggccagcatgggcgccgacagcggcgacgacttcgccagcgacggcagcagcagcagagaggacctgagcagccagctgctgagaagaaacgagcagatcagaaagctggaggccagactgagcgactacgccgagcaggtgagaaacctgcagaagatcaaggagaagctggagatcgccctggagaagcaccaggacagcagcatgagaaagttccaggagcagaacgagacctag

SEQ ID NO: 11934 - DNA, 579 bp, synthetic construct; identical to SEQ ID NO: 11225
  source 1..579: mol_type = other DNA; note = Synthetic coding sequence

SEQ ID NO: 11935 - DNA, 1458 bp, synthetic construct
  source 1..1458: mol_type = other DNA; note = Synthetic coding sequence
atggcccccagactgcagctggagaaggccgcctggagatgggccgagaccgtgagacccgaggaggtgagccaggagcacatcgagaccgcctacagaatctggctggagccctgcatcagaggcgtgtgcagaagaaactgcaagggcaaccccaactgcctggtgggcatcggcgagcacatctggctgggcgagatcgacgagaacagcttccacaacatcgacgaccccaactgcgagagaagaaagaagaacagcttcgtgggcctgaccaacctgggcgccacctgctacgtgaacaccttcctgcaggtgtggttcctgaacctggagctgagacaggccctgtacctgtgccccagcacctgcagcgactacatgctgggcgacggcatccaggaggagaaggactacgagccccagaccatctgcgagcacctgcagtacctgttcgccctgctgcagaacagcaacagaagatacatcgaccccagcggcttcgtgaaggccctgggcctggacaccggccagcagcaggacgcccaggagttcagcaagctgttcatgagcctgctggaggacaccctgagcaagcagaagaaccccgacgtgagaaacatcgtgcagcagcagttctgcggcgagtacgcctacgtgaccgtgtgcaaccagtgcggcagagagagcaagctgctgagcaagttctacgagctggagctgaacatccagggccacaagcagctgaccgactgcatcagcgagttcctgaaggaggagaagctggagggcgacaacagatacttctgcgagaactgccagagcaagcagaacgccaccagaaagatcagactgctgagcctgccctgcaccctgaacctgcagctgatgagattcgtgttcgacagacagaccggccacaagaagaagctgaacacctacatcggcttcagcgagatcctggacatggagccctacgtggagcacaagggcggcagctacgtgtacgagctgagcgccgtgctgatccacagaggcgtgagcgcctacagcggccactacatcgcccacgtgaaggacccccagagcggcgagtggtacaagttcaacgacgaggacatcgagaagatggagggcaagaagctgcagctgggcatcgaggaggacctggccgagcccagcaagagccagaccagaaagcccaagtgcggcaagggcacccactgcagcagaaacgcctacatgctggtgtacagactgcagacccaggagaagcccaacaccaccgtgcaggtgcccgccttcctgcaggagctggtggacagagacaacagcaagttcgaggagtggtgcatcgagatggccgagatgagaaagcagagcgtggacaagggcaaggccaagcacgaggaggtgaaggagctgtaccagagactgcccgccggcgccggcctgtag

SEQ ID NO: 11936 - DNA, 1119 bp, synthetic construct; identical to SEQ ID NO: 9937
  source 1..1119: mol_type = other DNA; note = Synthetic coding sequence

SEQ ID NO: 11937 - DNA, 1548 bp, synthetic construct
  source 1..1548: mol_type = other DNA; note = Synthetic coding sequence
atgagcgagggcgagagccagaccagcgtgagcccccccgtgaccagcaccaccagcgccgccagccccgaggaggaggaggagagcgaggacgagagcgagatcctggaggagagcccctgcggcagatggcagaagagaagagaggaggtgaaccagagaaacgtgcccggcatcgacagcgcctacctggccatggacaccgaggagggcgtggaggtggtgtggaacgaggtgcagttcagcgagagaaagaactacaagctgcaggaggagaaggtgagagccgtgttcgacaacctgatccagctggagcacctgaacatcgtgaagttccacaagtactgggccgacatcaaggagaacaaggccagagtgatcttcatcaccgagtacatgagcagcggcagcctgaagcagttcctgaagaagaccaagaagaaccacaagaccatgaacgagaaggcctggaagagatggtgcacccagatcctgagcgccctgagctacctgcacagctgcgacccccccatcatccacggcaacctgacctgcgacaccatcttcatccagcacaacggcctgatcaagatcggcagcgtggcccccgacaccatcaacaaccacgtgaagacctgcagagaggagcagaagaacctgcacttcttcgcccccgagtacggcgaggtgaccaacgtgaccaccgccgtggacatctacagcttcggcatgtgcgccctggagatggccgtgctggagatccagggcaacggcgagagcagctacgtgccccaggaggccatcagcagcgccatccagctgctggaggaccccctgcagagagagttcatccagaagtgcctgcagagcgagcccgccagaagacccaccgccagagagctgctgttccaccccgccctgttcgaggtgcccagcctgaagctgctggccgcccactgcatcgtgggccaccagcacatgatccccgagaacgccctggaggagatcaccaagaacatggacaccagcgccgtgctggccgagatccccgccggccccggcagagagcccgtgcagaccctgtacagccagagccccgccctggagctggacaagttcctggaggacgtgagaaacggcatctaccccctgaccgccttcggcctgcccagaccccagcagccccagcaggaggaggtgaccagccccgtggtgccccccagcgtgaagacccccacccccgagcccgccgaggtggagaccagaaaggtggtgctgatgcagtgcaacatcgagagcgtggaggagggcgtgaagcaccacctgaccctgctgctgaagctggaggacaagctgaacagacacctgagctgcgacctgatgcccaacgagaacatccccgagctggccgccgagctggtgcagctgggcttcatcagcgaggccgaccagagcagactgaccagcctgctggaggagaccctgaacaagttcaacttcgccagaaacagcaccctgaacagcgccgccgtgaccgtgagcagctag

SEQ ID NO: 11938 - DNA, 435 bp, synthetic construct
  source 1..435: mol_type = other DNA; note = Synthetic coding sequence
atgagcagccccctggccagcctgagcaagaccagaaaggtgcccctgcccagcgagcccatgaaccccggcagaagaggcatcagaatctacggcgacgaggacgaggtggacatgctgagcgacggctgcggcagcgaggagaagatcagcgtgcccagctgctacggcggcatcggcgcccccgtgagcagacaggtgcccgccagccacgacagcgagctgatggccttcatgaccagaaagctgtgggacctggagcagcaggtgaaggcccagaccgacgagatcctgagcaaggaccagaagatcgccgccctggaggacctggtgcagaccctgagaccccaccccgccgaggccaccctgcagagacaggaggagctggagaccatgtgcgtgcagctgcagagacaggtgagagagatggagtag

SEQ ID NO: 11939 - DNA, 1047 bp, synthetic construct
  source 1..1047: mol_type = other DNA; note = Synthetic coding sequence
atgcccgcccccccctgcgccagctgccacgccgccagagccgccctgagaagacccctgagcggccaggccctgtgcggcgcctgcttctgcgccgccttcgaggccgaggtgctgcacaccgtgctggccggcagactgctgccccccggcgccgtggtggccgtgggcgccagcggcggcaaggacagcaccgtgctggcccacgtgctgagagccctggcccccagactgggcatcagcctgcagctggtggccgtggacgagggcatcggcggctacagagacgccgccctggccgccgtgagaagacaggccgccagatgggagctgcccctgaccgtggtggcctacgaggacctgttcggcggctggaccatggacgccgtggccagaagcaccgccggcagcggcagaagcagaagctgctgcaccttctgcggcgtgctgagaagaagagccctggaggagggcgccagaagagtgggcgccacccacatcgtgaccggccacaacgccgacgacatggccgagaccgtgctgatgaacttcctgagaggcgacgccggcagactggccagaggcggcggcctgggcagccccggcgagggcggcgccctgcccagatgcagacccctgcagttcgccagccagaaggaggtggtgctgtacgcccacttcagaagactggactacttcagcgaggagtgcgtgtacgcccccgaggccttcagaggccacgccagagacctgctgaagagactggaggccgccagacccagcgccgtgctggacctggtgcacagcgccgagagactggccctggcccccgccgccagaccccccagacccggcgcctgcagcagatgcggcgccctggccagcagagccctgtgccaggcctgcgccctgctggacggcctgaacagaggcagacccagactggccatcggcaagggcagaagaggcctggacgaggaggccacccccggcacccccggcgaccccgccagaccccccgccagcaaggccgtgcccaccttctag

SEQ ID NO: 11940 - DNA, 321 bp, synthetic construct
  source 1..321: mol_type = other DNA; note = Synthetic coding sequence
atgcccgaggaccaggtgggcaagctggaggccaccgagaacaccatcagcgccatggccgccgccgccgccgagcagcagcagttctacctgctgctgggcaacctgctgagccccgacaacgtggtgagaaagcaggccgaggagacctacgagaacatccccggccagagcaagatcaccttcctgctgcaggccatcagaaacaccaccgccgccgaggaggccagacagatggccgccgtgctgctgagaagactgctgagcagcgccttcgacgaggtgtaccccgccctgcccagcgacgtgcagaccgcctag

SEQ ID NO: 11941 - DNA, 198 bp, synthetic construct
  source 1..198: mol_type = other DNA; note = Synthetic coding sequence
atggagctgagatgcggcggcctgctgttcagcagcagattcgacagcggcaacctggcccacgtggagaaggtggagagcctgagcagcgacggcgagggcgtgggcggcggcgccagcgccctgaccagcggcatcgccagcagccccgactacgagttcaacgtgtggaccagacccgactgcgccgagacctag

SEQ ID NO: 11942 - DNA, 1371 bp, synthetic construct; identical to SEQ ID NO: 11746
  source 1..1371: mol_type = other DNA; note = Synthetic coding sequence

SEQ ID NO: 11943 - DNA, 1275 bp, synthetic construct
  source 1..1275: mol_type = other DNA; note = Synthetic coding sequence
atggaccagcccagcggcagaagcttcatgcaggtgctgtgcgagaagtacagccccgagaacttcccctacagaagaggccccggcatgggcgtgcacgtgcccgccaccccccagggcagccccatgaaggacagactgaacctgcccagcgtgctggtgctgaacagctgcggcatcacctgcgccggcgacgagaaggagatcgccgccttctgcgcccacgtgagcgagctggacctgagcgacaacaagctggaggactggcacgaggtgagcaagatcgtgagcaacgtgccccagctggagttcctgaacctgagcagcaaccccctgaacctgagcgtgctggagagaacctgcgccggcagcttcagcggcgtgagaaagctggtgctgaacaacagcaaggccagctgggagaccgtgcacatgatcctgcaggagctgcccgacctggaggagctgttcctgtgcctgaacgactacgagaccgtgagctgccccagcatctgctgccacagcctgaagctgctgcacatcaccgacaacaacctgcaggactggaccgagatcagaaagctgggcgtgatgttccccagcctggacaccctggtgctggccaacaaccacctgaacgccatcgaggagcccgacgacagcctggccagactgttccccaacctgagaagcatcagcctgcacaagagcggcctgcagagctgggaggacatcgacaagctgaacagcttccccaagctggaggaggtgagactgctgggcatccccctgctgcagccctacaccaccgaggagagaagaaagctggtgatcgccagactgcccagcgtgagcaagctgaacggcagcgtggtgaccgacggcgagagagaggacagcgagagattcttcatcagatactacgtggacgtgccccaggaggaggtgcccttcagataccacgagctgatcaccaagtacggcaagctggagcccctggccgaggtggacctgagaccccagagcagcgccaaggtggaggtgcacttcaacgaccaggtggaggagatgagcatcagactggaccagaccgtggccgagctgaagaagcagctgaagaccctggtgcagctgcccaccagcaacatgctgctgtactacttcgaccacgaggcccccttcggccccgaggagatgaagtacagcagcagagccctgcacagcttcggcatcagagacggcgacaagatctacgtggagagcaagaccaagtag

SEQ ID NO: 11944 - DNA, 264 bp, synthetic construct
  source 1..264: mol_type = other DNA; note = Synthetic coding sequence
atgagcatcagcagcgacgaggtgaacttcctggtgtacagatacctgcaggagagcggcttcagccacagcgccttcaccttcggcatcgagagccacatcagccagagcaacatcaacggcgccctggtgccccccgccgccctgatcagcatcatccagaagggcctgcagtacgtggaggccgaggtgagcatcaacgaggacggcaccctgttcgacggcagacccatcgagagcctgagcctgatcgacgccgtgtag

SEQ ID NO: 11945 - DNA, 360 bp, synthetic construct; identical to SEQ ID NO: 10092
  source 1..360: mol_type = other DNA; note = Synthetic coding sequence

SEQ ID NO: 11946 - DNA, 23907 bp, synthetic construct
  source 1..23907: mol_type = other DNA; note = Synthetic coding sequence
atggaccagccccagttcagcggcgcccccagattcctgaccagacccaaggccttcgtggtgagcgtgggcaaggacgccaccctgagctgccagatcgtgggcaaccccaccccccaggtgagctgggagaaggaccagcagcccgtggccgccggcgccagattcagactggcccaggacggcgacctgtacagactgaccatcctggacctggccctgggcgacagcggccagtacgtgtgcagagccagaaacgccatcggcgaggccttcgccgccgtgggcctgcaggtggacgccgaggccgcctgcgccgagcaggccccccacttcctgctgagacccaccagcatcagagtgagagagggcagcgaggccaccttcagatgcagagtgggcggcagccccagacccgccgtgagctggagcaaggacggcagaagactgggcgagcccgacggccccagagtgagagtggaggagctgggcgaggccagcgccctgagaatcagagccgccagacccagagacggcggcacctacgaggtgagagccgagaaccccctgggcgccgccagcgccgccgccgccctggtggtggacagcgacgccgccgacaccgccagcagacccggcaccagcaccgccgccctgctggcccacctgcagagaagaagagaggccatgagagccgagggcgcccccgccagcccccccagcaccggcaccagaacctgcaccgtgaccgagggcaagcacgccagactgagctgctacgtgaccggcgagcccaagcccgagaccgtgtggaagaaggacggccagctggtgaccgagggcagaagacacgtggtgtacgaggacgcccaggagaacttcgtgctgaagatcctgttctgcaagcagagcgacagaggcctgtacacctgcaccgccagcaacctggtgggccagacctacagcagcgtgctggtggtggtgagagagcccgccgtgcccttcaagaagagactgcaggacctggaggtgagagagaaggagagcgccaccttcctgtgcgaggtgccccagcccagcaccgaggccgcctggttcaaggaggagaccagactgtgggccagcgccaagtacggcatcgaggaggagggcaccgagagaagactgaccgtgagaaacgtgagcgccgacgacgacgccgtgtacatctgcgagacccccgagggcagcagaaccgtggccgagctggccgtgcagggcaacctgctgagaaagctgcccagaaagaccgccgtgagagtgggcgacaccgccatgttctgcgtggagctggccgtgcccgtgggccccgtgcactggctgagaaaccaggaggaggtggtggccggcggcagagtggccatcagcgccgagggcaccagacacaccctgaccatcagccagtgctgcctggaggacgtgggccaggtggccttcatggccggcgactgccagaccagcacccagttctgcgtgagcgcccccagaaagccccccctgcagccccccgtggaccccgtggtgaaggccagaatggagagcagcgtgatcctgagctggagcccccccccccacggcgagagacccgtgaccatcgacggctacctggtggagaagaagaagctgggcacctacacctggatcagatgccacgaggccgagtgggtggccacccccgagctgaccgtggccgacgtggccgaggagggcaacttccagttcagagtgagcgccctgaacagcttcggccagagcccctacctggagttccccggcaccgtgcacctggcccccaagctggccgtgagaacccccctgaaggccgtgcaggccgtggagggcggcgaggtgaccttcagcgtggacctgaccgtggccagcgccggcgagtggttcctggacggccaggccctgaaggccagcagcgtgtacgagatccactgcgacagaaccagacacaccctgaccatcagagaggtgcccgccagcctgcacggcgcccagctgaagttcgtggccaacggcatcgagagcagcatcagaatggaggtgagagccgcccccggcctgaccgccaacaagccccccgccgccgccgccagagaggtgctggccagactgcacgaggaggcccagctgctggccgagctgagcgaccaggccgccgccgtgacctggctgaaggacggcagaaccctgagccccggccccaagtacgaggtgcaggccagcgccggcagaagagtgctgctggtgagagacgtggccagagacgacgccggcctgtacgagtgcgtgagcagaggcggcagaatcgcctaccagctgagcgtgcagggcctggccagattcctgcacaaggacatggccggcagctgcgtggacgccgtggccggcggccccgcccagttcgagtgcgagaccagcgaggcccacgtgcacgtgcactggtacaaggacggcatggagctgggccacagcggcgagagattcctgcaggaggacgtgggcaccagacacagactggtggccgccaccgtgaccagacaggacgagggcacctacagctgcagagtgggcgaggacagcgtggacttcagactgagagtgagcgagcccaaggtggtgttcgccaaggagcagctggccagaagaaagctgcaggccgaggccggcgccagcgccaccctgagctgcgaggtggcccaggcccagaccgaggtgacctggtacaaggacggcaagaagctgagcagcagcagcaaggtgtgcatggaggccaccggctgcaccagaagactggtggtgcagcaggccggccaggccgacgccggcgagtacagctgcgaggccggcggccagagactgagcttccacctggacgtgaaggagcccaaggtggtgttcgccaaggaccaggtggcccacagcgaggtgcaggccgaggccggcgccagcgccaccctgagctgcgaggtggcccaggcccagaccgaggtgatgtggtacaaggacggcaagaagctgagcagcagcctgaaggtgcacgtggaggccaagggctgcagaagaagactggtggtgcagcaggccggcaagaccgacgccggcgactacagctgcgaggccagaggccagagagtgagcttcagactgcacatcaccgagcccaagatgatgttcgccaaggagcagagcgtgcacaacgaggtgcaggccgaggccggcgccagcgccatgctgagctgcgaggtggcccaggcccagaccgaggtgacctggtacaaggacggcaagaagctgagcagcagcagcaaggtgggcatggaggtgaagggctgcaccagaagactggtgctgccccaggccggcaaggccgacgccggcgagtacagctgcgaggccggcggccagagagtgagcttccacctgcacatcaccgagcccaagggcgtgttcgccaaggagcagagcgtgcacaacgaggtgcaggccgaggccggcaccaccgccatgctgagctgcgaggtggcccagccccagaccgaggtgacctggtacaaggacggcaagaagctgagcagcagcagcaaggtgagaatggaggtgaagggctgcaccagaagactggtggtgcagcaggtgggcaaggccgacgccggcgagtacagctgcgaggccggcggccagagagtgagcttccagctgcacatcaccgagcccaaggccgtgttcgccaaggagcagctggtgcacaacgaggtgagaaccgaggccggcgccagcgccaccctgagctgcgaggtggcccaggcccagaccgaggtgacctggtacaaggacggcaagaagctgagcagcagcagcaaggtgagaatcgaggccgccggctgcatgagacagctggtggtgcagcaggccggccaggccgacgccggcgagtacacctgcgaggccggcggccagagactgagcttccacctggacgtgagcgagcccaaggccgtgttcgccaaggagcagctggcccacagaaaggtgcaggccgaggccggcgccatcgccaccctgagctgcgaggtggcccaggcccagaccgaggtgacctggtacaaggacggcaagaagctgagcagcagcagcaaggtgagaatggaggccgtgggctgcaccagaagactggtggtgcagcaggcctgccaggccgacaccggcgagtacagctgcgaggccggcggccagagactgagcttcagcctggacgtggccgagcccaaggtggtgttcgccaaggagcagcccgtgcacagagaggtgcaggcccaggccggcgccagcaccaccctgagctgcgaggtggcccaggcccagaccgaggtgatgtggtacaaggacggcaagaagctgagcttcagcagcaaggtgagaatggaggccgtgggctgcaccagaagactggtggtgcagcaggccggccaggccgtggccggcgagtacagctgcgaggccggcagccagagactgagcttccacctgcacgtggccgagcccaaggccgtgttcgccaaggagcagcccgccagcagagaggtgcaggccgaggccggcaccagcgccaccctgagctgcgaggtggcccaggcccagaccgaggtgacctggtacaaggacggcaagaagctgagcagcagcagcaaggtgagaatggaggccgtgggctgcaccagaagactggtggtgcaggaggccggccaggccgacgccggcgagtacagctgcaaggccggcgaccagagactgagcttccacctgcacgtggccgagcccaaggtggtgttcgccaaggagcagcccgcccacagagaggtgcaggccgaggccggcgccagcgccaccctgagctgcgaggtggcccaggcccagaccgaggtgacctggtacaaggacggcaagaagctgagcagcagcagcaaggtgagagtggaggccgtgggctgcaccagaagactggtggtgcagcaggccggccaggccgaggccggcgagtacagctgcgaggccggcggccagcagctgagcttcagactgcaggtggccgagctggagccccagatcagcgagagaccctgcagaagagagcccctggtggtgaaggagcacgaggacatcatcctgaccgccaccctggccacccccagcgccgccaccgtgacctggctgaaggacggcgtggagatcagaagaagcaagagacacgagaccgccagccagggcgacacccacaccctgaccgtgcacggcgcccaggtgctggacagcgccatctacagctgcagagtgggcgccgagggccaggacttccccgtgcaggtggaggaggtggccgccaagttctgcagactgctggagcccgtgtgcggcgagctgggcggcaccgtgaccctggcctgcgagctgagccccgcctgcgccgaggtggtgtggagatgcggcaacacccagctgagagtgggcaagagattccagatggtggccgagggccccgtgagaagcctgaccgtgctgggcctgagagccgaggacgccggcgagtacgtgtgcgagagcagagacgaccacaccagcgcccagctgaccgtgagcgtgcccagagtggtgaagttcatgagcggcctgagcaccgtggtggccgaggagggcggcgaggccaccttccagtgcgtggtgagccccagcgacgtggccgtggtgtggttcagagacggcgccctgctgcagcccagcgagaagttcgccatcagccagagcggcgccagccacagcctgaccatcagcgacctggtgctggaggacgccggccagatcaccgtggaggccgagggcgccagcagcagcgccgccctgagagtgagagaggcccccgtgctgttcaagaagaagctggagccccagaccgtggaggagagaagcagcgtgaccctggaggtggagctgaccagaccctggcccgagctgagatggaccagaaacgccaccgccctggcccccggcaagaacgtggagatccacgccgagggcgccagacacagactggtgctgcacaacgtgggcttcgccgacagaggcttcttcggctgcgagacccccgacgacaagacccaggccaagctgaccgtggagatgagacaggtgagactggtgagaggcctgcaggccgtggaggccagagagcagggcaccgccaccatggaggtgcagctgagccacgccgacgtggacggcagctggaccagagacggcctgagattccagcagggccccacctgccacctggccgtgagaggccccatgcacaccctgaccctgagcggcctgagacccgaggacagcggcctgatggtgttcaaggccgagggcgtgcacaccagcgccagactggtggtgaccgagctgcccgtgagcttcagcagacccctgcaggacgtggtgaccaccgagaaggagaaggtgaccctggagtgcgagctgagcagacccaacgtggacgtgagatggctgaaggacggcgtggagctgagagccggcaagaccatggccatcgccgcccagggcgcctgcagaagcctgaccatctacagatgcgagttcgccgaccagggcgtgtacgtgtgcgacgcccacgacgcccagagcagcgccagcgtgaaggtgcagggcagaacctacaccctgatctacagaagagtgctggccgaggacgccggcgagatccagttcgtggccgagaacgccgagagcagagcccagctgagagtgaaggagctgcccgtgaccctggtgagacccctgagagacaagatcgccatggagaagcacagaggcgtgctggagtgccaggtgagcagagccagcgcccaggtgagatggttcaagggcagccaggagctgcagcccggccccaagtacgagctggtgagcgacggcctgtacagaaagctgatcatcagcgacgtgcacgccgaggacgaggacacctacacctgcgacgccggcgacgtgaagaccagcgcccagttcttcgtggaggagcagagcatcaccatcgtgagaggcctgcaggacgtgaccgtgatggagcccgcccccgcctggttcgagtgcgagaccagcatccccagcgtgagaccccccaagtggctgctgggcaagaccgtgctgcaggccggcggcaacgtgggcctggagcaggagggcaccgtgcacagactgatgctgagaagaacctgcagcaccatgaccggccccgtgcacttcaccgtgggcaagagcagaagcagcgccagactggtggtgagcgacatccccgtggtgctgaccagacccctggagcccaagaccggcagagagctgcagagcgtggtgctgagctgcgacttcagacccgcccccaaggccgtgcagtggtacaaggacgacacccccctgagccccagcgagaagttcaagatgagcctggagggccagatggccgagctgagaatcctgagactgatgcccgccgacgccggcgtgtacagatgccaggccggcagcgcccacagcagcaccgaggtgaccgtggaggccagagaggtgaccgtgaccggccccctgcaggacgccgaggccaccgaggagggctgggccagcttcagctgcgagctgagccacgaggacgaggaggtggagtggagcctgaacggcatgcccctgtacaacgacagcttccacgagatcagccacaagggcagaagacacaccctggtgctgaagagcatccagagagccgacgccggcatcgtgagagccagcagcctgaaggtgagcaccagcgccagactggaggtgagagtgaagcccgtggtgttcctgaaggccctggacgacctgagcgccgaggagagaggcaccctggccctgcagtgcgaggtgagcgaccccgaggcccacgtggtgtggagaaaggacggcgtgcagctgggccccagcgacaagtacgacttcctgcacaccgccggcaccagaggcctggtggtgcacgacgtgagccccgaggacgccggcctgtacacctgccacgtgggcagcgaggagaccagagccagagtgagagtgcacgacctgcacgtgggcatcaccaagagactgaagaccatggaggtgctggagggcgagagctgcagcttcgagtgcgtgctgagccacgagagcgccagcgaccccgccatgtggaccgtgggcggcaagaccgtgggcagcagcagcagattccaggccaccagacagggcagaaagtacatcctggtggtgagagaggccgcccccagcgacgccggcgaggtggtgttcagcgtgagaggcctgaccagcaaggccagcctgatcgtgagagagagacccgccgccatcatcaagcccctggaggaccagtgggtggcccccggcgaggacgtggagctgagatgcgagctgagcagagccggcacccccgtgcactggctgaaggacagaaaggccatcagaaagagccagaagtacgacgtggtgtgcgagggcaccatggccatgctggtgatcagaggcgccagcctgaaggacgccggcgagtacacctgcgaggtggaggccagcaagagcaccgccagcctgcacgtggaggagaaggccaactgcttcaccgaggagctgaccaacctgcaggtggaggagaagggcaccgccgtgttcacctgcaagaccgagcaccccgccgccaccgtgacctggagaaagggcctgctggagctgagagccagcggcaagcaccagcccagccaggagggcctgaccctgagactgaccatcagcgccctggagaaggccgacagcgacacctacacctgcgacatcggccaggcccagagcagagcccagctgctggtgcagggcagaagagtgcacatcatcgaggacctggaggacgtggacgtgcaggagggcagcagcgccaccttcagatgcagaatcagccccgccaactacgagcccgtgcactggttcctggacaagacccccctgcacgccaacgagctgaacgagatcgacgcccagcccggcggctaccacgtgctgaccctgagacagctggccctgaaggacagcggcaccatctacttcgaggccggcgaccagagagccagcgccgccctgagagtgaccgagaagcccagcgtgttcagcagagagctgaccgacgccaccatcaccgagggcgaggacctgaccctggtgtgcgagaccagcacctgcgacatccccgtgtgctggaccaaggacggcaagaccctgagaggcagcgccagatgccagctgagccacgagggccacagagcccagctgctgatcaccggcgccaccctgcaggacagcggcagatacaagtgcgaggccggcggcgcctgcagcagcagcatcgtgagagtgcacgccagacccgtgagattccaggaggccctgaaggacctggaggtgctggagggcggcgccgccaccctgagatgcgtgctgagcagcgtggccgcccccgtgaagtggtgctacggcaacaacgtgctgagacccggcgacaagtacagcctgagacaggagggcgccatgctggagctggtggtgagaaacctgagaccccaggacagcggcagatacagctgcagcttcggcgaccagaccaccagcgccaccctgaccgtgaccgccctgcccgcccagttcatcggcaagctgagaaacaaggaggccaccgagggcgccaccgccaccctgagatgcgagctgagcaaggccgcccccgtggagtggagaaagggcagcgagaccctgagagacggcgacagatactgcctgagacaggacggcgccatgtgcgagctgcagatcagaggcctggccatggtggacgccgccgagtacagctgcgtgtgcggcgaggagagaaccagcgccagcctgaccatcagacccatgcccgcccacttcatcggcagactgagacaccaggagagcatcgagggcgccaccgccaccctgagatgcgagctgagcaaggccgcccccgtggagtggagaaagggcagagagagcctgagagacggcgacagacacagcctgagacaggacggcgccgtgtgcgagctgcagatctgcggcctggccgtggccgacgccggcgagtacagctgcgtgtgcggcgaggagagaaccagcgccaccctgaccgtgaaggccctgcccgccaagttcaccgagggcctgagaaacgaggaggccgtggagggcgccaccgccatgctgtggtgcgagctgagcaaggtggcccccgtggagtggagaaagggccccgagaacctgagagacggcgacagatacatcctgagacaggagggcaccagatgcgagctgcagatctgcggcctggccatggccgacgccggcgagtacctgtgcgtgtgcggccaggagagaaccagcgccaccctgaccatcagagccctgcccgccagattcatcgaggacgtgaagaaccaggaggccagagagggcgccaccgccgtgctgcagtgcgagctgaacagcgccgcccccgtggagtggagaaagggcagcgagaccctgagagacggcgacagatacagcctgagacaggacggcaccaagtgcgagctgcagatcagaggcctggccatggccgacaccggcgagtacagctgcgtgtgcggccaggagagaaccagcgccatgctgaccgtgagagccctgcccatcaagttcaccgagggcctgagaaacgaggaggccaccgagggcgccaccgccgtgctgagatgcgagctgagcaagatggcccccgtggagtggtggaagggccacgagaccctgagagacggcgacagacacagcctgagacaggacggcgccagatgcgagctgcagatcagaggcctggtggccgaggacgccggcgagtacctgtgcatgtgcggcaaggagagaaccagcgccatgctgaccgtgagagccatgcccagcaagttcatcgagggcctgagaaacgaggaggccaccgagggcgacaccgccaccctgtggtgcgagctgagcaaggccgcccccgtggagtggagaaagggccacgagaccctgagagacggcgacagacacagcctgagacaggacggcagcagatgcgagctgcagatcagaggcctggccgtggtggacgccggcgagtacagctgcgtgtgcggccaggagagaaccagcgccaccctgaccgtgagagccctgcccgccagattcatcgaggacgtgaagaaccaggaggccagagagggcgccaccgccgtgctgcagtgcgagctgagcaaggccgcccccgtggagtggagaaagggcagcgagaccctgagaggcggcgacagatacagcctgagacaggacggcaccagatgcgagctgcagatccacggcctgagcgtggccgacaccggcgagtacagctgcgtgtgcggccaggagagaaccagcgccaccctgaccgtgagagccccccagcccgtgttcagagagcccctgcagagcctgcaggccgaggagggcagcaccgccaccctgcagtgcgagctgagcgagcccaccgccaccgtggtgtggagcaagggcggcctgcagctgcaggccaacggcagaagagagcccagactgcagggctgcaccgccgagctggtgctgcaggacctgcagagagaggacaccggcgagtacacctgcacctgcggcagccaggccaccagcgccaccctgaccgtgaccgccgcccccgtgagattcctgagagagctgcagcaccaggaggtggacgagggcggcaccgcccacctgtgctgcgagctgagcagagccggcgccagcgtggagtggagaaagggcagcctgcagctgttcccctgcgccaagtaccagatggtgcaggacggcgccgccgccgagctgctggtgagaggcgtggagcaggaggacgccggcgactacacctgcgacaccggccacacccagagcatggccagcctgagcgtgagagtgcccagacccaagttcaagaccagactgcagagcctggagcaggagaccggcgacatcgccagactgtgctgccagctgagcgacgccgagagcggcgccgtggtgcagtggctgaaggagggcgtggagctgcacgccggccccaagtacgagatgagaagccagggcgccaccagagagctgctgatccaccagctggaggccaaggacaccggcgagtacgcctgcgtgaccggcggccagaagaccgccgccagcctgagagtgaccgagcccgaggtgaccatcgtgagaggcctggtggacgccgaggtgaccgccgacgaggacgtggagttcagctgcgaggtgagcagagccggcgccaccggcgtgcagtggtgcctgcagggcctgcccctgcagagcaacgaggtgaccgaggtggccgtgagagacggcagaatccacaccctgagactgaagggcgtgacccccgaggacgccggcaccgtgagcttccacctgggcaaccacgccagcagcgcccagctgaccgtgagagcccccgaggtgaccatcctggagcccctgcaggacgtgcagctgagcgagggccaggacgccagcttccagtgcagactgagcagagccagcggccaggaggccagatgggccctgggcggcgtgcccctgcaggccaacgagatgaacgacatcaccgtggagcagggcaccctgcacctgctgaccctgcacaaggtgaccctggaggacgccggcaccgtgagcttccacgtgggcacctgcagcagcgaggcccagctgaaggtgaccgccaagaacaccgtggtgagaggcctggagaacgtggaggccctggagggcggcgaggccctgttcgagtgccagctgagccagcccgaggtggccgcccacacctggctgctggacgacgagcccgtgcacaccagcgagaacgccgaggtggtgttcttcgagaacggcctgagacacctgctgctgctgaagaacctgagaccccaggacagctgcagagtgaccttcctggccggcgacatggtgaccagcgccttcctgaccgtgagaggctggagactggagatcctggagcccctgaagaacgccgccgtgagagccggcgcccaggcctgcttcacctgcaccctgagcgaggccgtgcccgtgggcgaggccagctggtacatcaacggcgccgccgtgcagcccgacgacagcgactggaccgtgaccgccgacggcagccaccacgccctgctgctgagaagcgcccagccccaccacgccggcgaggtgaccttcgcctgcagagacgccgtggccagcgccagactgaccgtgctgggcctgcccgacccccccgaggacgccgaggtggtggccagaagcagccacaccgtgaccctgagctgggccgcccccatgagcgacggcggcggcggcctgtgcggctacagagtggaggtgaaggagggcgccaccggccagtggagactgtgccacgagctggtgcccggccccgagtgcgtggtggacggcctggcccccggcgagacctacagattcagagtggccgccgtgggccccgtgggcgccggcgagcccgtgcacctgccccagaccgtgagactggccgagccccccaagcccgtgcccccccagcccagcgcccccgagagcagacaggtggccgccggcgaggacgtgagcctggagctggaggtggtggccgaggccggcgaggtgatctggcacaagggcatggagagaatccagcccggcggcagattcgaggtggtgagccagggcagacagcagatgctggtgatcaagggcttcaccgccgaggaccagggcgagtaccactgcggcctggcccagggcagcatctgccccgccgccgccaccttccaggtggccctgagccccgccagcgtggacgaggccccccagcccagcctgccccccgaggccgcccaggagggcgacctgcacctgctgtgggaggccctggccagaaagagaagaatgagcagagagcccaccctggacagcatcagcgagctgcccgaggaggacggcagaagccagagactgccccaggaggccgaggaggtggcccccgacctgagcgagggctacagcaccgccgacgagctggccagaaccggcgacgccgacctgagccacaccagcagcgacgacgagagcagagccggcacccccagcctggtgacctacctgaagaaggccggcagacccggcaccagccccctggccagcaaggtgggcgcccccgccgcccccagcgtgaagccccagcagcagcaggagcccctggccgccgtgagaccccccctgggcgacctgagcaccaaggacctgggcgaccccagcatggacaaggccgccgtgaagatccaggccgccttcaagggctacaaggtgagaaaggagatgaagcagcaggagggccccatgttcagccacaccttcggcgacaccgaggcccaggtgggcgacgccctgagactggagtgcgtggtggccagcaaggccgacgtgagagccagatggctgaaggacggcgtggagctgaccgacggcagacaccaccacatcgaccagctgggcgacggcacctgcagcctgctgatcaccggcctggacagagccgacgccggctgctacacctgccaggtgagcaacaagttcggccaggtgacccacagcgcctgcgtggtggtgagcggcagcgagagcgaggccgagagcagcagcggcggcgagctggacgacgccttcagaagagccgccagaagactgcacagactgttcagaaccaagagccccgccgaggtgagcgacgaggagctgttcctgagcgccgacgagggccccgccgagcccgaggagcccgccgactggcagacctacagagaggacgagcacttcatctgcatcagattcgaggccctgaccgaggccagacaggccgtgaccagattccaggagatgttcgccaccctgggcatcggcgtggagatcaagctggtggagcagggccccagaagagtggagatgtgcatcagcaaggagacccccgcccccgtggtgccccccgagcccctgcccagcctgctgaccagcgacgccgcccccgtgttcctgaccgagctgcagaaccaggaggtgcaggacggctaccccgtgagcttcgactgcgtggtgaccggccagcccatgcccagcgtgagatggttcaaggacggcaagctgctggaggaggacgaccactacatgatcaacgaggaccagcagggcggccaccagctgatcatcaccgccgtggtgcccgccgacatgggcgtgtacagatgcctggccgagaacagcatgggcgtgagcagcaccaaggccgagctgagagtggacctgaccagcaccgactacgacaccgccgccgacgccaccgagagcagcagctacttcagcgcccagggctacctgagcagcagagagcaggagggcaccgagagcaccaccgacgagggccagctgccccaggtggtggaggagctgagagacctgcaggtggcccccggcaccagactggccaagttccagctgaaggtgaagggctaccccgcccccagactgtactggttcaaggacggccagcccctgaccgccagcgcccacatcagaatgaccgacaagaagatcctgcacaccctggagatcatcagcgtgaccagagaggacagcggccagtacgccgcctacatcagcaacgccatgggcgccgcctacagcagcgccagactgctggtgagaggccccgacgagcccgaggagaagcccgccagcgacgtgcacgagcagctggtgccccccagaatgctggagagattcacccccaagaaggtgaagaagggcagcagcatcaccttcagcgtgaaggtggagggcagacccgtgcccaccgtgcactggctgagagaggaggccgagagaggcgtgctgtggatcggccccgacacccccggctacaccgtggccagcagcgcccagcagcacagcctggtgctgctggacgtgggcagacagcaccagggcacctacacctgcatcgccagcaacgccgccggccaggccctgtgcagcgccagcctgcacgtgagcggcctgcccaaggtggaggagcaggagaaggtgaaggaggccctgatcagcaccttcctgcagggcaccacccaggccatcagcgcccagggcctggagaccgccagcttcgccgacctgggcggccagagaaaggaggagcccctggccgccaaggaggccctgggccacctgagcctggccgaggtgggcaccgaggagttcctgcagaagctgaccagccagatcaccgagatggtgagcgccaagatcacccaggccaagctgcaggtgcccggcggcgacagcgacgaggacagcaagacccccagcgccagccccagacacggcagaagcagacccagcagcagcatccaggagagcagcagcgagagcgaggacggcgacgccagaggcgagatcttcgacatctacgtggtgaccgccgactacctgcccctgggcgccgagcaggacgccatcaccctgagagagggccagtacgtggaggtgctggacgccgcccaccccctgagatggctggtgagaaccaagcccaccaagagcagccccagcagacagggctgggtgagccccgcctacctggacagaagactgaagctgagccccgagtggggcgccgccgaggcccccgagttccccggcgaggccgtgagcgaggacgagtacaaggccagactgagcagcgtgatccaggagctgctgagcagcgagcaggccttcgtggaggagctgcagttcctgcagagccaccacctgcagcacctggagagatgcccccacgtgcccatcgccgtggccggccagaaggccgtgatcttcagaaacgtgagagacatcggcagattccacagcagcttcctgcaggagctgcagcagtgcgacaccgacgacgacgtggccatgtgcttcatcaagaaccaggccgccttcgagcagtacctggagttcctggtgggcagagtgcaggccgagagcgtggtggtgagcaccgccatccaggagttctacaagaagtacgccgaggaggccctgctggccggcgaccccagccagcccccccccccccccctgcagcactacctggagcagcccgtggagagagtgcagagataccaggccctgctgaaggagctgatcagaaacaaggccagaaacagacagaactgcgccctgctggagcaggcctacgccgtggtgagcgccctgccccagagagccgagaacaagctgcacgtgagcctgatggagaactaccccggcaccctgcaggccctgggcgagcccatcagacagggccacttcatcgtgtgggagggcgcccccggcgccagaatgccctggaagggccacaacagacacgtgttcctgttcagaaaccacctggtgatctgcaagcccagaagagacagcagaaccgacaccgtgagctacgtgttcagaaacatgatgaagctgagcagcatcgacctgaacgaccaggtggagggcgacgacagagccttcgaggtgtggcaggagagagaggacagcgtgagaaagtacctgctgcaggccagaaccgccatcatcaagagcagctgggtgaaggagatctgcggcatccagcagagactggccctgcccgtgtggagaccccccgacttcgaggaggagctggccgactgcaccgccgagctgggcgagaccgtgaagctggcctgcagagtgaccggcacccccaagcccgtgatcagctggtacaaggacggcaaggccgtgcaggtggacccccaccacatcctgatcgaggaccccgacggcagctgcgccctgatcctggacagcctgaccggcgtggacagcggccagtacatgtgcttcgccgccagcgccgccggcaactgcagcaccctgggcaagatcctggtgcaggtgccccccagattcgtgaacaaggtgagagccagccccttcgtggagggcgaggacgcccagttcacctgcaccatcgagggcgccccctacccccagatcagatggtacaaggacggcgccctgctgaccaccggcaacaagttccagaccctgagcgagcccagaagcggcctgctggtgctggtgatcagagccgccagcaaggaggacctgggcctgtacgagtgcgagctggtgaacagactgggcagcgccagagccagcgccgagctgagaatccagagccccatgctgcaggcccaggagcagtgccacagagagcagctggtggccgccgtggaggacaccaccctggagagagccgaccaggaggtgaccagcgtgctgaagagactgctgggccccaaggcccccggccccagcaccggcgacctgaccggccccggcccctgccccagaggcgcccccgccctgcaggagaccggcagccagccccccgtgaccggcaccagcgaggcccccgccgtgccccccagagtgccccagcccctgctgcacgagggccccgagcaggagcccgaggccatcgccagagcccaggagtggaccgtgcccatcagaatggagggcgccgcctggcccggcgccggcaccggcgagctgctgtgggacgtgcacagccacgtggtgagagagaccacccagagaacctacacctaccaggccatcgacacccacaccgccagaccccccagcatgcaggtgaccatcgaggacgtgcaggcccagaccggcggcaccgcccagttcgaggccatcatcgagggcgacccccagcccagcgtgacctggtacaaggacagcgtgcagctggtggacagcaccagactgagccagcagcaggagggcaccacctacagcctggtgctgagacacgtggccagcaaggacgccggcgtgtacacctgcctggcccagaacaccggcggccaggtgctgtgcaaggccgagctgctggtgctgggcggcgacaacgagcccgacagcgagaagcagagccacagaagaaagctgcacagcttctacgaggtgaaggaggagatcggcagaggcgtgttcggcttcgtgaagagagtgcagcacaagggcaacaagatcctgtgcgccgccaagttcatccccctgagaagcagaaccagagcccaggcctacagagagagagacatcctggccgccctgagccaccccctggtgaccggcctgctggaccagttcgagaccagaaagaccctgatcctgatcctggagctgtgcagcagcgaggagctgctggacagactgtacagaaagggcgtggtgaccgaggccgaggtgaaggtgtacatccagcagctggtggagggcctgcactacctgcacagccacggcgtgctgcacctggacatcaagcccagcaacatcctgatggtgcaccccgccagagaggacatcaagatctgcgacttcggcttcgcccagaacatcacccccgccgagctgcagttcagccagtacggcagccccgagttcgtgagccccgagatcatccagcagaaccccgtgagcgaggccagcgacatctgggccatgggcgtgatcagctacctgagcctgacctgcagcagccccttcgccggcgagagcgacagagccaccctgctgaacgtgctggagggcagagtgagctggagcagccccatggccgcccacctgagcgaggacgccaaggacttcatcaaggccaccctgcagagagccccccaggccagacccagcgccgcccagtgcctgagccacccctggttcctgaagagcatgcccgccgaggaggcccacttcatcaacaccaagcagctgaagttcctgctggccagaagcagatggcagagaagcctgatgagctacaagagcatcctggtgatgagaagcatccccgagctgctgagaggcccccccgacagccccagcctgggcgtggccagacacctgtgcagagacaccggcggcagcagcagcagcagcagcagcagcgacaacgagctggcccccttcgccagagccaagagcctgccccccagccccgtgacccacagccccctgctgcaccccagaggcttcctgagacccagcgccagcctgcccgaggaggccgaggccagcgagagaagcaccgaggcccccgccccccccgccagccccgagggcgccggcccccccgccgcccagggctgcgtgcccagacacagcgtgatcagaagcctgttctaccaccaggccggcgagagccccgagcacggcgccctggcccccggcagcagaagacaccccgccagaagaagacacctgctgaagggcggctacatcgccggcgccctgcccggcctgagagagcccctgatggagcacagagtgctggaggaggaggccgccagagaggagcaggccaccctgctggccaaggcccccagcttcgagaccgccctgagactgcccgccagcggcacccacctggcccccggccacagccacagcctggagcacgacagccccagcacccccagacccagcagcgaggcctgcggcgaggcccagagactgcccagcgcccccagcggcggcgcccccatcagagacatgggccacccccagggcagcaagcagctgcccagcaccggcggccaccccggcaccgcccagcccgagagacccagccccgacagcccctggggccagcccgcccccttctgccaccccaagcagggcagcgccccccaggagggctgcagcccccaccccgccgtggccccctgcccccccggcagcttcccccccggcagctgcaaggaggcccccctggtgcccagcagccccttcctgggccagccccaggccccccccgcccccgccaaggccagcccccccctggacagcaagatgggccccggcgacatcagcctgcccggcagacccaagcccggcccctgcagcagccccggcagcgccagccaggccagcagcagccaggtgagcagcctgagagtgggcagcagccaggtgggcaccgagcccggccccagcctggacgccgagggctggacccaggaggccgaggacctgagcgacagcacccccaccctgcagagaccccaggagcaggccaccatgagaaagttcagcctgggcggcagaggcggctacgccggcgtggccggctacggcaccttcgccttcggcggcgacgccggcggcatgctgggccagggccccatgtgggccagaatcgcctgggccgtgagccagagcgaggaggaggagcaggaggaggccagagccgagagccagagcgaggagcagcaggaggccagagccgagagccccctgccccaggtgagcgccagacccgtgcccgaggtgggcagagcccccaccagaagcagccccgagcccaccccctgggaggacatcggccaggtgagcctggtgcagatcagagacctgagcggcgacgccgaggccgccgacaccatcagcctggacatcagcgaggtggaccccgcctacctgaacctgagcgacctgtacgacatcaagtacctgcccttcgagttcatgatcttcagaaaggtgcccaagagcgcccagcccgagccccccagccccatggccgaggaggagctggccgagttccccgagcccacctggccctggcccggcgagctgggcccccacgccggcctggagatcaccgaggagagcgaggacgtggacgccctgctggccgaggccgccgtgggcagaaagagaaagtggagcagccccagcagaagcctgttccacttccccggcagacacctgcccctggacgagcccgccgagctgggcctgagagagagagtgaaggccagcgtggagcacatcagcagaatcctgaagggcagacccgagggcctggagaaggagggcccccccagaaagaagcccggcctggccagcttcagactgagcggcctgaagagctgggacagagcccccaccttcctgagagagctgagcgacgagaccgtggtgctgggccagagcgtgaccctggcctgccaggtgagcgcccagcccgccgcccaggccacctggagcaaggacggcgcccccctggagagcagcagcagagtgctgatcagcgccaccctgaagaacttccagctgctgaccatcctggtggtggtggccgaggacctgggcgtgtacacctgcagcgtgagcaacgccctgggcaccgtgaccaccaccggcgtgctgagaaaggccgagagacccagcagcagcccctgccccgacatcggcgaggtgtacgccgacggcgtgctgctggtgtggaagcccgtggagagctacggccccgtgacctacatcgtgcagtgcagcctggagggcggcagctggaccaccctggccagcgacatcttcgactgctgctacctgaccagcaagctgagcagaggcggcacctacaccttcagaaccgcctgcgtgagcaaggccggcatgggcccctacagcagccccagcgagcaggtgctgctgggcggccccagccacctggccagcgaggaggagagccagggcagaagcgcccagcccctgcccagcaccaagaccttcgccttccagacccagatccagagaggcagattcagcgtggtgagacagtgctgggagaaggccagcggcagagccctggccgccaagatcatcccctaccaccccaaggacaagaccgccgtgctgagagagtacgaggccctgaagggcctgagacacccccacctggcccagctgcacgccgcctacctgagccccagacacctggtgctgatcctggagctgtgcagcggccccgagctgctgccctgcctggccgagagagccagctacagcgagagcgaggtgaaggactacctgtggcagatgctgagcgccacccagtacctgcacaaccagcacatcctgcacctggacctgagaagcgagaacatgatcatcaccgagtacaacctgctgaaggtggtggacctgggcaacgcccagagcctgagccaggagaaggtgctgcccagcgacaagttcaaggactacctggagaccatggcccccgagctgctggagggccagggcgccgtgccccagaccgacatctgggccatcggcgtgaccgccttcatcatgctgagcgccgagtaccccgtgagcagcgagggcgccagagacctgcagagaggcctgagaaagggcctggtgagactgagcagatgctacgccggcctgagcggcggcgccgtggccttcctgagaagcaccctgtgcgcccagccctggggcagaccctgcgccagcagctgcctgcagtgcccctggctgaccgaggagggccccgcctgcagcagacccgcccccgtgaccttccccaccgccagactgagagtgttcgtgagaaacagagagaagagaagagccctgctgtacaagagacacaacctggcccaggtgagatag

SEQ ID NO: 11947 - DNA, 750 bp, synthetic construct
  source 1..750: mol_type = other DNA; note = Synthetic coding sequence
atgaccgaggacagccagagaaacttcagaagcgtgtactacgagaaggtgggcttcagaggcgtggaggagaagaagagcctggagatcctgctgaaggacgacagactggacaccgagaagctgtgcaccttcagccagagattccccctgcccagcatgtacagagccctggtgtggaaggtgctgctgggcatcctgcccccccaccacgagagccacgccaaggtgatgatgtacagaaaggagcagtacctggacgtgctgcacgccctgaaggtggtgagattcgtgagcgacgccaccccccaggccgaggtgtacctgagaatgtaccagctggagagcggcaagctgcccagaagccccagcttccccctggagcccgacgacgaggtgttcctggccatcgccaaggccatggaggagatggtggaggacagcgtggactgctactggatcaccagaagattcgtgaaccagctgaacaccaagtacagagacagcctgccccagctgcccaaggccttcgagcagtacctgaacctggaggacggcagactgctgacccacctgagaatgtgcagcgccgcccccaagctgccctacgacctgtggttcaagagatgcttcgccggctgcctgcccgagagcagcctgcagagagtgtgggacaaggtggtgagcggcagctgcaagatcctggtgttcgtggccgtggagatcctgctgaccttcaagatcaagtag

SEQ ID NO: 11948 - DNA, 417 bp, synthetic construct
  source 1..417: mol_type = other DNA; note = Synthetic coding sequence
atgagcagcctgggcgccagcttcgtgcagatcaagttcgacgacctgcagttcttcgagaactgcggcggcggcagcttcggcagcgtgtacagagccaagtggatcagccaggacaaggaggtggccgtgaagaagctgctgaagatcgagaaggaggccgagatcctgagcgtgctgagccacagaaacatcatccagttctacggcgtgatcctggagccccccaactacggcatcgtgaccgagtacgccagcctgggcagcctgtacgactacatcaacagcaacagaagcgaggagatggacatggaccacatcatgacctgggccaccgacgtggccaagggcatgcactacctgcacatggaggcccccgtgaaggtgatccacagagacctgaagagcagaaactag

SEQ ID NO: 11949 - DNA, 1122 bp, synthetic construct
  source 1..1122: mol_type = other DNA; note = Synthetic coding sequence
atggccagcagcagcgtgccccccgccaccgtgagcgccgccaccgccggccccggccccggcttcggcttcgccagcaagaccaagaagaagcacttcgtgcagcagaaggtgaaggtgttcagagccgccgaccccctggtgggcgtgttcctgtggggcgtggcccacagcatcaacgagctgagccaggtgcccccccccgtgatgctgctgcccgacgacttcaaggccagcagcaagatcaaggtgaacaaccacctgttccacagagagaacctgcccagccacttcaagttcaaggagtactgcccccaggtgttcagaaacctgagagacagattcggcatcgacgaccaggactacctgtacatcgtgaagtgccacggcaacaccctgctgccccagttcctgggcatgtacagagtgagcgtggacaacgaggacagctacatgctggtgatgagaaacatgttcagccacagactgcccgtgcacagaaagtacgacctgaagggcagcctggtgagcagagaggccagcgacaaggagaaggtgaaggagctgcccaccctgaaggacatggacttcctgaacaagaaccagaaggtgtacatcggcgaggaggagaagaagatcttcctggagaagctgaagagagacgtggagttcctggtgcagctgaagatcatggactacagcctgctgctgggcatccacgacatcatcagaggcagcgagcccgaggaggaggcccccgtgagagaggacgagagcgaggtggacggcgactgcagcctgaccggcccccccgccctggtgggcagctacggcaccagccccgagggcatcggcggctacatccacagccacagacccctgggccccggcgagttcgagagcttcatcgacgtgtacgccatcagaagcgccgagggcgccccccagaaggaggtgtacttcatgggcctgatcgacatcctgacccagtacgacgccaagaagaaggccgcccacgccgccaagaccgtgaagcacggcgccggcgccgagatcagcaccgtgcaccccgagcagtacgccaagagattcctggacttcatcaccaacatcttcgcctag

SEQ ID NO: 11950 - DNA, 549 bp, synthetic construct
  source 1..549: mol_type = other DNA; note = Synthetic coding sequence
atggaggagatccccgcccaggaggccgccggcagccccagagtgcagttccagagcctggagacccagagcgagtgcctgagccccgagccccagttcgtgcaggacaccgacatggagcagggcctgaccggcggcttccccatcagcaagcccgacggcatcagccagctggagcaggacctgcaggtgttcgacctggagaccaagaccagagaggtgctgagagacgactgcagcgacggcgagaccagagaggagaacaagctgctgatccccaagcagaagatcagcgaggaggtgcacagctacaaggtgagagtgggcagactgaagcacgacatcacccaggtgcccgagaccagagaggtgtacaagagcgaggacagactggagagactgcaggagatcctgagaaagttcctgtacctggagagagagttcagacagatcaccatcagcaaggagaccttcaccagcgagaagaacaacgagtgccacgagcccgagaagagcttcagcctggacagcaccatcgacgccgactag

SEQ ID NO: 11951 - DNA, 2253 bp, synthetic construct
  source 1..2253: mol_type = other DNA; note = Synthetic coding sequence
atgagcctgggcaaggcctacggcgtggagagccacgtgctgagccccgccgagaccaagaccctgtaccccctgatgaacgtggacgacctgtacggcaccctgtacgtgccccacgacggcaccatggaccccgccggcacctgcaccaccctggccagagccgccagcgccagaggcgcccaggtgatcgagaactgccccgtgaccggcatcagagtgtggaccgacgacttcggcgtgagaagagtggccggcgtggagacccagcacggcagcatccagaccccctgcgtggtgaactgcgccggcgtgtgggccagcgccgtgggcagaatggccggcgtgaaggtgcccctggtggccatgcaccacgcctacgtggtgaccgagagaatcgagggcatccagaacatgcccaacgtgagagaccacgacgccagcgtgtacctgagactgcagggcgacgccctgagcgtgggcggctacgaggccaaccccatcttctgggaggaggtgagcgacaagttcgccttcggcctgttcgacctggactgggaggtgttcacccagcacatcgagggcgccatcaacagagtgcccgtgctggagaagaccggcatcaagagcaccgtgtgcggccccgagagcttcacccccgaccacaagcccctgatgggcgaggcccccgagctgagaggcttcttcctgggctgcggcttcaacagcgccggcatgatgctgggcggcggctgcggccaggagctggcccactggatcatccacggcagacccgagaaggacatgcacggctacgacatcagaagattccaccacagcctgaccgaccaccccagatggatcagagagagaagccacgagagctacgccaagaactacagcgtggtgttcccccacgacgagcccctggccggcagaaacatgagaagagaccccctgcacgaggagctgctgggccagggctgcgtgttccaggagagacacggctgggagagacccggctggttccaccccagaggccccgcccccgtgctggagtacgactactacggcgcctacggcagcagagcccacgaggactacgcctacagaagactgctggccgacgagtacaccttcgccttccccccccaccacgacaccatcaagaaggagtgcctggcctgcagaggcgccgccgccgtgttcgacatgagctacttcggcaagttctacctggtgggcctggacgccagaaaggccgccgactggctgttcagcgccgacgtgagcagaccccccggcagcaccgtgtacacctgcatgctgaaccacagaggcggcaccgagagcgacctgaccgtgagcagactggcccccagccaccaggccagccccctggcccccgccttcgagggcgacggctactacctggccatgggcggcgccgtggcccagcacaactggagccacatcaccaccgtgctgcaggaccagaagagccagtgccagctgatcgacagcagcgaggacctgggcatgatcagcatccagggccccgccagcagagccatcctgcaggaggtgctggacgccgacctgagcaacgaggccttccccttcagcacccacaagctgctgagagccgccggccacctggtgagagccatgagactgagcttcgtgggcgagctgggctgggagctgcacatccccaaggccagctgcgtgcccgtgtacagagccgtgatggccgccggcgccaagcacggcctgatcaacgccggctacagagccatcgacagcctgagcatcgagaagggctacagacactggcacgccgacctgagacccgacgacagccccctggaggccggcctggccttcacctgcaagctgaagagccccgtgcccttcctgggcagagaggccctggagcagcagagagccgccggcctgagaagaagactggtgtgcttcaccatggaggacaaggtgcccatgttcggcctggaggccatctggagaaacggccaggtggtgggccacgtgagaagagccgacttcggcttcgccatcgacaagaccatcgcctacggctacatccacgaccccagcggcggccccgtgagcctggacttcgtgaagagcggcgactacgccctggagagaatgggcgtgacctacggcgcccaggcccacctgaagagccccttcgaccccaacaacaagagagtgaagggcatctactag

SEQ ID NO: 11952 - DNA, 459 bp, synthetic construct; identical to SEQ ID NO: 11867
  source 1..459: mol_type = other DNA; note = Synthetic coding sequence

SEQ ID NO: 11953 - DNA, 1620 bp, synthetic construct; identical to SEQ ID NO: 10018
  source 1..1620: mol_type = other DNA; note = Synthetic coding sequence

SEQ ID NO: 11954 - DNA, 1266 bp, synthetic construct
  source 1..1266: mol_type = other DNA; note = Synthetic coding sequence
atgatggaggacaacaagcagctggccctgagaatcgacggcgccgtgcagagcgccagccaggaggtgaccaacctgagagccgagctgaccgccaccaacagaagactggccgagctgagcggcggcggcggccccggccccggccccggcgccgccgccagcgccagcgccgccggcgacagcgccgccaccaacatggagaacccccagctgggcgcccaggtgctgctgagagaggaggtgagcagactgcaggaggaggtgcacctgctgagacagatgaaggagatgctggccaaggacctggaggagagccagggcggcaagagcagcgaggtgctgagcgccaccgagctgagagtgcagctggcccagaaggagcaggagctggccagagccaaggaggccctgcaggccatgaaggccgacagaaagagactgaagggcgagaagaccgacctggtgagccagatgcagcagctgtacgccaccctggagagcagagaggagcagctgagagacttcatcagaaactacgagcagcacagaaaggagagcgaggacgccgtgaaggccctggccaaggagaaggacctgctggagagagagaagtgggagctgagaagacaggccaaggaggccaccgaccacgccaccgccctgagaagccagctggacctgaaggacaacagaatgaaggagctggaggccgagctggccatggccaagcagagcctggccaccctgaccaaggacgtgcccaagagacacagcctggccatgcccggcgagaccgtgctgaacggcaaccaggagtgggtggtgcaggccgacctgcccctgaccgccgccatcagacagagccagcagaccctgtaccacagccaccccccccaccccgccgacagacaggccgtgagagtgagcccctgccacagcagacagcccagcgtgatcagcgacgccagcgccgccgagggcgacagaagcagcacccccagcgacatcaacagccccagacacagaacccacagcctgtgcaacggcgacagccccggccccgtgcagaagaacctgcacaaccccatcgtgcagagcctggaggacctggaggaccagaagagaaagaagaagaaggagaagatgggcttcggcagcatcagcagagtgttcgccagaggcaagcagagaaagagcctggaccccggcctgttcgacggcaccgcccccgactactacatcgaggaggacgccgactggtag

SEQ ID NO: 11955 - DNA, 492 bp, synthetic construct
  source 1..492: mol_type = other DNA; note = Synthetic coding sequence
atggtgggcggcggcggcgtgggcggcggcctgctggagaacgccaaccccctgatctaccagagaagcggcgagagacccgtgaccgccggcgaggaggacgagcaggtgcccgacagcatcgacgccagagagatcttcgacctgatcagaagcatcaacgaccccgagcaccccctgaccctggaggagctgaacgtggtggagcaggtgagagtgcaggtgagcgaccccgagagcaccgtggccgtggccttcacccccaccatcccccactgcagcatggccaccctgatcggcctgagcatcaaggtgaagctgctgagaagcctgccccagagattcaagatggacgtgcacatcacccccggcacccacgccagcgagcacgccgtgaacaagcagctggccgacaaggagagagtggccgccgccctggagaacacccacctgctggaggtggtgaaccagtgcctgagcgccagaagctag

SEQ ID NO: 11956 - DNA, 207 bp, synthetic construct
  source 1..207: mol_type = other DNA; note = Synthetic coding sequence
atgagcatcagcagcgacgaggtgaacttcctggtgtacagatacctgcaggagagcggcttcagccacagcgccttcaccttcggcatcgagagccacatcagccagagcaacatcaacggcgccctggtgccccccgccgccctgatcagcatcatccagaagggcctgcagtacgtggaggccgaggtgagcatcaacgagtag

SEQ ID NO: 11957 - DNA, 534 bp, synthetic construct
  source 1..534: mol_type = other DNA; note = Synthetic coding sequence
atgagcagcaacgagtgcttcaagtgcggcagaagcggccactgggccagagagtgccccaccggcggcggcagaggcagaggcatgagaagcagaggcagaggcggcttcaccagcgacagaggcttccagttcgtgagcagcagcctgcccgacatctgctacagatgcggcgagagcggccacctggccaaggactgcgacctgcaggaggacgcctgctacaactgcggcagaggcggccacatcgccaaggactgcaaggagcccaagagagagagagagcagtgctgctacaactgcggcaagcccggccacctggccagagactgcgaccacgccgacgagcagaagtgctacagctgcggcgagttcggccacatccagaaggactgcaccaaggtgaagtgctacagatgcggcgagaccggccacgtggccatcaactgcagcaagaccagcgaggtgaactgctacagatgcggcgagagcggccacctggccagagagtgcaccatcgaggccaccgcctag

SEQ ID NO: 11958 - DNA, 429 bp, synthetic construct
  source 1..429: mol_type = other DNA; note = Synthetic coding sequence
atgacccagctgagacaggtgctggagagcagactgcagagacccctgcccgaggacctggccagactgtggcccgtggtgatcctgtgccagctggccaaccagctgagacccagaagcgtgcccttcatccacgtgcccagccccgccgtgcccaagctgagcgccctgaaggccagaaagaacgtggagagcttcctggaggcctgcagaaagatgggcgtgcccgaggccgacctgtgcagccccagcgacctgctgcagggcaccgccagaggcctgagaaccgccctggaggccgtgaagagagtgggcggcaaggccctgccccccctgtggccccccagcggcctgggcggcttcgtggtgttctacgtggtgctgatgctgctgctgtacgtgacctacaccagactgctgggcagctag

SEQ ID NO: 11959 - DNA, 1296 bp, synthetic construct
  source 1..1296: mol_type = other DNA; note = Synthetic coding sequence
atggaggacctgaagggccccaccgtgagcagcttcctgagcggcatgaagaccgagctgtaccccggcgtgaccgccatcgacatgatgtacaaggagggcctgcacggcgtggacaacggcatcctgatcttcgacaaggtgagaatccccagagagaacctgctggacaagttcggcagcgtggcccccgacggccagtaccacagccccatcagaaacaagagcgccagattcaacgccatgctggccgccctgacccccagcagactggccgtggccttccaggccatgggcgccatgaagctgggcctgaccatcgccatcagatacagccacagcagaagacagttcggccccaagaccaaggaggaggtgaagatcatcgagcaccagacccagaccctgagactgatgccccacctggccaccgccctggccctgaccttcgtgagcagatacgccggcgccctgctggacgaggacgtgttccagggcaaggagctggtgaacagcagaagcctgcaggccctggtggccggcctgaaggcctacagcacctgggagaacatcagatgcctgcaggactgcagagagtgcaccggcggcatggtggtgggcagagagctgctggcccagtacaccaagcagtacgaggagaagcccctgttcggcctgctgcagaactgggccgagagcgtgggcgacaagctgagaaccagcttcctggccttcaacatggacaccgtggacgacctggccttcctgctgaaggccgtgaagttcagagagagagtgctgcagagaggcctggtggccagaatctactacaaggtgaagaccaagaaggaggacttcttccacgcctggaacagctgcctgcaccacgtggccagcctgagcctggcccacacccacagagtgaccctggagcagttcagcctggccgtgaagagctgccccgaccaggaggaccagaccctgctgatgaagttctgcctgctgtacggcaccaagctggtgttccaggagagagcctggtacctggagcacaagtacctgacccccatggccagcaccagaatcagaaaccagctgctggacctgtgcgacagcgtgaaggacgacgccagaagagtgatcagcaccttcaacatcccccacacctacctgcacgcccccatcgccggcatcagcaaccccagagccgcctgggccttctaccccgcccccctgcagcccagacccagagaggaggccagaagcagaagacccaagctgggcgccaagctgtag

SEQ ID NO: 11960 - DNA, 1443 bp, synthetic construct
  source 1..1443: mol_type = other DNA; note = Synthetic coding sequence
atggccgagctgcagatgctgctggaggaggagatccccggcggcagaagagccctgttcgacagctacaccaacctggagagagtggccgactactgcgagaacaactacatccagagcgccgacaagcagagagccctggaggagaccaaggcctacaccacccagagcctggccagcgtggcctacctgatcaacaccctggccaacaacgtgctgcagatgctggacatccaggccagccagctgagaagaatggagagcagcatcaaccacatcagccagaccgtggacatccacaaggagaaggtggccagaagagagatcggcatcctgaccaccaacaagaacaccagcagaacccacaagatcatcgcccccgccaacctggagagacccgtgagatacatcagaaagcccatcgactacaccatcctggacgacatcggccacggcgtgaagtggctgctgagattcaaggtgagcacccagaacatgaagatgggcggcctgcccagaaccaccccccccacccagaagccccccagcccccccatgagcggcaagggcaccctgggcagacacagcccctacagaaccctggagcccgtgagaccccccgtggtgcccaacgactacgtgcccagccccaccagaaacatggcccccagccagcagagccccgtgagaaccgccagcgtgaaccagagaaacagaacctacagcagcagcggcagcagcggcggcagccaccccagcagcagaagcagcagcagagagaacagcggcagcggcagcgtgggcgtgcccatcgccgtgcccacccccagcccccccagcgtgttccccgacgccgccgccggcggcgcccagaccctggccgacggcttcaccagccccaccccccccgtggtgagcagcaccccccccaccggccaccccgtgcagttctacagcatgaacagacccgccagcagacacaccccccccaccatcggcggcagcctgccctacagaagaccccccagcatcaccagccagaccagcctgcagaaccagatgaacggcggccccttctacagccagaaccccgtgagcgacaccccccccccccccccccccgtggaggagcccgtgttcgacgagagccccccccccccccccccccccgaggactacgaggaggaggaggccgccgtggtggagtacagcgacccctacgccgaggaggaccccccctgggcccccagaagctacctggagaaggtggtggccatctacgactacaccaaggacaaggaggacgagctgagcttccaggagggcgccatcatctacgtgatcaagaagaacgacgacggctggtacgagggcgtgatgaacggcgtgaccggcctgttccccggcaactacgtggagagcatcatgcactacagcgagtag

SEQ ID NO: 11961 - DNA, 3102 bp, synthetic construct
  source 1..3102: mol_type = other DNA; note = Synthetic coding sequence
atggacgaggaggagaaccactacgtgagccagctgagagaggtgtacagcagctgcgacaccaccggcaccggcttcctggacagacaggagctgacccagctgtgcctgaagctgcacctggagcagcagctgcccgtgctgctgcagaccctgctgggcaacgaccacttcgccagagtgaacttcgaggagttcaaggagggcttcgtggccgtgctgagcagcaacgccggcgtgagacccagcgacgaggacagcagcagcctggagagcgccgccagcagcgccatcccccccaagtacgtgaacggcagcaagtggtacggcagaagaagcagacccgagctgtgcgacgccgccaccgaggccagaagagtgcccgagcagcagacccaggccagcctgaagagccacctgtggagaagcgccagcctggagagcgtggagagccccaagagcgacgaggaggccgagagcaccaaggaggcccagaacgagctgttcgaggcccagggccagctgcagacctgggacagcgaggacttcggcagcccccagaagagctgcagccccagcttcgacacccccgagagccagatcagaggcgtgtgggaggagctgggcgtgggcagcagcggccacctgagcgagcaggagctggccgtggtgtgccagagcgtgggcctgcagggcctggagaaggaggagctggaggacctgttcaacaagctggaccaggacggcgacggcaaggtgagcctggaggagttccagctgggcctgttcagccacgagcccgccctgctgctggagagcagcaccagagtgaagcccagcaaggcctggagccactaccaggtgcccgaggagagcggctgccacaccaccaccaccagcagcctggtgagcctgtgcagcagcctgagactgttcagcagcatcgacgacggcagcggcttcgccttccccgaccaggtgctggccatgtggacccaggagggcatccagaacggcagagagatcctgcagagcctggacttcagcgtggacgagaaggtgaacctgctggagctgacctgggccctggacaacgagctgatgaccgtggacagcgccgtgcagcaggccgccctggcctgctaccaccaggagctgagctaccagcagggccaggtggagcagctggccagagagagagacaaggccagacaggacctggagagagccgagaagagaaacctggagttcgtgaaggagatggacgactgccacagcaccctggagcagctgaccgagaagaagatcaagcacctggagcagggctacagagagagactgagcctgctgagaagcgaggtggaggccgagagagagctgttctgggagcaggcccacagacagagagccgccctggagtgggacgtgggcagactgcaggccgaggaggccggcctgagagagaagctgaccctggccctgaaggagaacagcagactgcagaaggagatcgtggaggtggtggagaagctgagcgacagcgagagactggccctgaagctgcagaaggacctggagttcgtgctgaaggacaagctggagccccagagcgccgagctgctggcccaggaggagagattcgccgccgtgctgaaggagtacgagctgaagtgcagagacctgcaggacagaaacgacgagctgcaggccgagctggagggcctgtgggccagactgcccaagaacagacacagccccagctggagccccgacggcagaagaagacagctgcccggcctgggccccgccggcatcagcttcctgggcaacagcgcccccgtgagcatcgagaccgagctgatgatggagcaggtgaaggagcactaccaggacctgagaacccagctggagaccaaggtgaactactacgagagagagatcgccgccctgaagagaaacttcgagaaggagagaaaggacatggagcaggccagaagaagagaggtgagcgtgctggagggccagaaggccgacctggaggagctgcacgagaagagccaggaggtgatctggggcctgcaggagcagctgcaggacaccgccagaggccccgagcccgagcagatgggcctggccccctgctgcacccaggccctgtgcggcctggccctgagacaccacagccacctgcagcagatcagactggagttccacagactgagcgaggagaacaccctgctgaagaacgacctgggcagagtgagacaggagctggaggccgccgagagcacccacgacgcccagagaaaggagatcgaggtgctgaagaaggacaaggagaaggcctgcagcgagatggaggtgctgaacagacagaaccagaactacaaggaccagctgagccagctgaacgtgagagtgctgcagctgggccaggaggccagcacccaccaggcccagaacgaggagcacagagtgaccatccagatgctgacccagagcctggaggaggtggtgagaagcggccagcagcagagcgaccagatccagaagctgagagtggagctggagtgcctgaaccaggagcaccagagcctgcagctgccctggagcgagctgacccagaccctggaggagagccaggaccaggtgcagggcgcccacctgagactgagacaggcccaggcccagcacctgcaggaggtgagactggtgccccaggacagagtggccgagctgcacagactgctgagcctgcagggcgagcaggccagaagaagactggacgcccagagagaggagcacgagaagcagctgaaggccaccgaggagagagtggaggaggccgagatgatcctgaagaacatggagatgctgctgcaggagaaggtggacaagctgaaggagcagttcgagaagaacaccaagagcgacctgctgctgaaggagctgtacgtggagaacgcccacctggtgagagccctgcaggccaccgaggagaagcagagaggcgccgagaagcagagcagactgctggaggagaaggtgagagccctgaacaagctggtgagcagaatcgcccccgccgccctgagcgtgtag

SEQ ID NO: 11962 - DNA, 627 bp, synthetic construct
  source 1..627: mol_type = other DNA; note = Synthetic coding sequence
tgctgcggctgcagcggcggctgcggcagcggctgcggcggcagaggcagcggctgcggcggctgcggcagcggctgcggcggctgcggcagcggctgcggcggctgcggcagcggctgcggcggctgcggcggctgcggcagcggctgcgccggctgcggcggctgcaagggcggctgcggcagctgcggcggcagcaagagaggctgcgtgagctgcggcgtgagcaagggcgcctgcggcagctgcggcggcagcaagggcggctgcggcagctgcggcggcagcaagggcggctgcggcagctgcggcggcagcaagggcggctgcggcagctgcggcggcagcaagggcggctgcggcagctacggctgcagccagagcagctgctgcaagccctgctgctgcagcagcggctgcggcagcagctgctgccagagcagctgctgcaagccctactgctgccagagcagctgctgcaagccctactgctgccagagcagctgctgcaagccctgcagctgcttcagcggctgcggcagcagctgctgccagagcagctgctacaagccctgctgctgccagagcagctgctgcgtgcccgtgtgctgccagtgcaagatctag

SEQ ID NO: 11963 - DNA, 642 bp, synthetic construct
  source 1..642: mol_type = other DNA; note = Synthetic coding sequence
atggccggcagccccgagctggtggtgctggaccccccctgggacaaggagctggccgccggcaccgagagccaggccctggtgagcgccacccccagagaggacttcagagtgagatgcaccagcaagagagccgtgaccgagatgctgcagctgtgcggcagattcgtgcagaagctgggcgacgccctgcccgaggagatcagagagcccgccctgagagacgcccagtggaccttcgagagcgccgtgcaggagaacatcagcatcaacggccaggcctggcaggaggccagcgacaactgcttcatggacagcgacatcaaggtgctggaggaccagttcgacgagatcatcgtggacatcgccaccaagagaaagcagtaccccagaaagatcctggagtgcgtgatcaagaccatcaaggccaagcaggagatcctgaagcagtaccaccccgtggtgcaccccctggacctgaagtacgaccccgaccccgtgctgaacggcaacgccttcaacttcagccccttcaacatgatgctggccgtggacctgagctacatggtgttcatcaccagcagccccagctacggcaagttcgagatgcagagaggcaacagcagcaagggcgaccagtag

SEQ ID NO: 11964 - DNA, 3720 bp, synthetic construct
  source 1..3720: mol_type = other DNA; note = Synthetic coding sequence
atgaccatctggcagatgcagaagcaggcccagagaggcagccccgccagaacccacagcatgatgagcctgagcgtgagaccccagagaagactgctgagcgccagagtgaacagaagccagagcttcgccggcgtgctgggcagccacgagagaggccccagaagcttccccgtgttcagcccccccggcccccccagaaagccccccgccctgagcagagtgagcagaatgttcagcgtggcccaccccgccgccaaggtgccccagcccgagagactggacctggtgtacaccgccctgaagagaggcctgaccgcctacctggaggtgcaccagcaggagcaggagaagctgcagggccagatcagagagagcaagagaaacagcagactgggcttcctgtacgacctggacaagcaggtgaagagcatcgagagattcctgagaagactggagttccacgccagcaagatcgacgagctgtacgaggcctactgcgtgcagagaagactgagagacggcgcctacaacatggtgagagcctacaccaccggcagccccggcagcagagaggccagagacagcctggccgaggccaccagaggccacagagagtacaccgagagcatgtgcctgctggagagcgagctggaggcccagctgggcgagttccacctgagaatgaagggcctggccggcttcgccagactgtgcgtgggcgaccagtacgagatctgcatgaagtacggcagacagagatggaagctgagaggcagaatcgagggcagcggcaagcaggtgtgggacagcgaggagaccatcttcctgcccctgctgaccgagttcctgagcatcaaggtgaccgagctgaagggcctggccaaccacgtggtggtgggcagcgtgagctgcgagaccaaggacctgttcgccgccctgccccaggtggtggccgtggacatcaacgacctgggcaccatcaagctgagcctggaggtgacctggagccccttcgacaaggacgaccagcccagcgccgccagcagcgtgaacaaggccagcaccgtgaccaagagattcagcacctacagccagagcccccccgacacccccagcctgagagagcaggccttctacaacatgctgagaagacaggaggagctggagaacggcaccgcctggagcctgagcagcgagagcagcgacgacagcagcagcccccagctgagcggcaccgccagacacagccccgcccccagacccctggtgcagcagcccgagcccctgcccatccaggtggccttcagaagacccgagacccccagcagcggccccctggacgaggagggcgccgtggcccccgtgctggccaacggccacgccccctacagcagaaccctgagccacatcagcgaggccagcgtggacgccgccctggccgaggccagcgtggaggccgtgggccccgagagcctggcctggggccccagcccccccacccaccccgcccccacccacggcgagcaccccagccccgtgccccccgccctggaccccggccacagcgccaccagcagcaccctgggcaccaccggcagcgtgcccaccagcaccgaccccgcccccagcgcccacctggacagcgtgcacaagagcaccgacagcggccccagcgagctgcccggccccacccacaccaccaccggcagcacctacagcgccatcaccaccacccacagcgcccccagccccctgacccacaccaccaccggcagcacccacaagcccatcatcagcaccctgaccaccaccggccccaccctgaacatcatcggccccgtgcagaccaccaccagccccacccacaccatgcccagccccacccacaccaccgccagccccacccacaccagcaccagccccacccacacccccaccagccccacccacaagaccagcatgagcccccccaccaccaccagccccacccccagcggcatgggcctggtgcagaccgccaccagccccacccaccccaccaccagccccacccaccccaccaccagccccatcctgatcaacgtgagccccagcaccagcctggagctggccaccctgagcagccccagcaagcacagcgaccccaccctgcccggcaccgacagcctgccctgcagcccccccgtgagcaacagctacacccaggccgaccccatggcccccagaaccccccaccccagccccgcccacagcagcagaaagcccctgaccagccccgcccccgaccccagcgagagcaccgtgcagagcctgagccccacccccagcccccccacccccgccccccagcacagcgacctgtgcctggccatggccgtgcagacccccgtgcccaccgccgccggcggcagcggcgacagaagcctggaggaggccctgggcgccctgatggccgccctggacgactacagaggccagttccccgagctgcagggcctggagcaggaggtgaccagactggagagcctgctgatgcagagacagggcctgaccagaagcagagccagcagcctgagcatcaccgtggagcacgccctggagagcttcagcttcctgaacgaggacgaggacgaggacaacgacgtgcccggcgacagaccccccagcagccccgaggccggcgccgaggacagcatcgacagccccagcgccagacccctgagcaccggctgccccgccctggacgccgccctggtgagacacctgtaccactgcagcagactgctgctgaagctgggcaccttcggccccctgagatgccaggaggcctgggccctggagagactgctgagagaggccagagtgctggaggccgtgtgcgagttcagcagaagatgggagatccccgccagcagcgcccaggaggtggtgcagttcagcgccagcagacccggcttcctgaccttctgggaccagtgcaccgagagactgagctgcttcctgtgccccgtggagagagtgctgctgaccttctgcaaccagtacggcgccagactgagcctgagacagcccggcctggccgaggccgtgtgcgtgaagttcctggaggacgccctgggccagaagctgcccagaagaccccagcccggccccggcgagcagctgaccgtgttccagttctggagcttcgtggagaccctggacagccccaccatggaggcctacgtgaccgagaccgccgaggaggtgctgctggtgagaaacctgaacagcgacgaccaggccgtggtgctgaaggccctgagactggcccccgagggcagactgagaagagacggcctgagagccctgagcagcctgctggtgcacggcaacaacaaggtgatggccgccgtgagcacccagctgagaagcctgagcctgggccccaccttcagagagagagccctgctgtgcttcctggaccagctggaggacgaggacgtgcagaccagagtggccggctgcctggccctgggctgcatcaaggcccccgagggcatcgagcccctggtgtacctgtgccagaccgacaccgaggccgtgagagaggccgccagacagagcctgcagcagtgcggcgaggagggccagagcgcccacagaagactggaggagagcctggacgccctgcccagaatcttcggccccggcagcatggccagcaccgccttctag

SEQ ID NO: 11965 - DNA, 732 bp, synthetic construct
  source 1..732: mol_type = other DNA; note = Synthetic coding sequence
atggtgaccgactacggcgccttcatcaagatccccggctgcagaaagcagggcctggtgcacagaacccacatgagcagctgcagagtggacaagcccagcgagatcgtggacgtgggcgacaaggtgtgggtgaagctgatcggcagagagatgaagaacgacagaatcaaggtgagcctgagcatgaaggtggtgaaccagggcaccggcaaggacctggaccccaacaacgtgatcatcgagcaggaggagagaagaagaagaagcttccaggactacaccggccagaagatcaccctggaggccgtgctgaacaccacctgcaagaagtgcggctgcaagggcagagtgaagcccctgcccttccccagattcagcccctgcggctggaccctgttctggaagaaggaggccgcccagtgccacttcgccaaggactgcttcatgcagcccggcggcaccaagtacagcctgatccccgacgaggaggaggagaaggaggaggccaagagcgccgagttcgagaagcccgaccccaccagaaaccccagcagaaagagaaagaaggagaagaagaagaagaagcacagagacagaaagagcagcgacagcgacagcagcgacagcgagagcgacaccggcaagagagccagacacaccagcaaggacagcaaggccgccaagaagaagaagaagaagaagaagcacaagaagaagcacaaggagtag

SEQ ID NO: 11966 - DNA, 330 bp, synthetic construct
  source 1..330: mol_type = other DNA; note = Synthetic coding sequence
atggaggagatccccgcccaggaggccgccggcagccccagagtgcagttccagagcctggagacccagagcgagtgcctgagccccgagccccagttcgtgcaggacaccgacatggagcagggcctgaccggcggcttccccatcagcaagcccgacggcatcagccagctggagcaggacctgcaggtgttcgacctggagaccaagaccagagaggtgctgagagacgactgcagcgacggcgagaccagagaggagaacaagctgctgatccccaagcagaagatcagcgaggaggtgcacagctacaaggtgagagtgggctag

SEQ ID NO: 11967 - DNA, 4134 bp, synthetic construct
  source 1..4134: mol_type = other DNA; note = Synthetic coding sequence
atgagcctggagagagagctgagacagctgagcaaggccaaggccaaggcccagagagccggccagagaagagaggaggccgccctgtgccaccagctgggcgagctgctggccggccacggcagatacgccgaggccctggagcagcactggcaggagctgcagctgagagagagagccgacgaccccctgggctgcgccgtggcccacagaaagatcggcgagagactggccgagatggaggactaccccgccgccctgcagcaccagcaccagtacctggagctggcccacagcctgagaaaccacaccgagctgcagagagcctgggccaccatcggcagaacccacctggacatctacgaccactgccagagcagagacgccctgctgcaggcccaggccgccttcgagaagagcctggccatcgtggacgaggagctggagggcaccctggcccagggcgagctgaacgagatgagaaccagactgtacctgaacctgggcctgaccttcgagagcctgcagcagaccgccctgtgcaacgactacttcagaaagagcatcttcctggccgagcagaaccacctgtacgaggacctgttcagagccagatacaacctgggcaccatccactggagagccggccagcacagccaggccatgagatgcctggagggcgccagagagtgcgcccacaccatgagaaagagattcatggagagcgagtgctgcgtggtgatcgcccaggtgctgcaggacctgggcgacttcctggccgccaagagagccctgaagaaggcctacagactgggcagccagaagcccgtgcagagagccgccatctgccagaacctgcagcacgtgctggccgtggtgagactgcagcagcagctggaggaggccgagggcagagacccccagggcgccatggtgatctgcgagcagctgggcgacctgttcagcaaggccggcgacttccccagagccgccgaggcctaccagaagcagctgagattcgccgagctgctggacagacccggcgccgagagagccatcatccacgtgagcctggccaccaccctgggcgacatgaaggaccaccacggcgccgtgagacactacgaggaggagctgagactgagaagcggcaacgtgctggaggaggccaagacctggctgaacatcgccctgagcagagaggaggccggcgacgcctacgagctgctggccccctgcttccagaaggccctgagctgcgcccagcaggcccagagaccccagctgcagagacaggtgctgcagcacctgcacaccgtgcagctgagactgcagccccaggaggcccccgagaccgagaccagactgagagagctgagcgtggccgaggacgaggacgaggaggaggaggccgaggaggccgccgccaccgccgagagcgaggccctggaggccggcgaggtggagctgagcgagggcgaggacgacaccgacggcctgaccccccagctggaggaggacgaggagctgcagggccacctgggcagaagaaagggcagcaagtggaacagaagaaacgacatgggcgagaccctgctgcacagagcctgcatcgagggccagctgagaagagtgcaggacctggtgagacagggccaccccctgaaccccagagactactgcggctggacccccctgcacgaggcctgcaactacggccacctggagatcgtgagattcctgctggaccacggcgccgccgtggacgaccccggcggccagggctgcgagggcatcacccccctgcacgacgccctgaactgcggccacttcgaggtggccgagctgctgctggagagaggcgccagcgtgaccctgagaaccagaaaggccagcgccagatggagaagatgcagcagcggcaagctgtacagaagagacctggacctggagaccagacagaaggccagagccatggagatgctgctgcaggccgccgccagcggccaggacccccacagcagccaggccttccacacccccagcagcctgctgttcgaccccgagaccagcccccccctgagcccctgccccgagccccccagcaacagcaccagactgcccgaggccagccaggcccacgtgagagtgagccccggccaggccgcccccgccatggccagacccagaagaagcagacacggccccgccagcagcagcagcagcagcgagggcgaggacagcgccggccccgccagacccagccagaagagacccagatgcagcgccaccgcccagagagtggccgcctggacccccggccccgccagcaacagagaggccgccaccgccagcaccagcagagccgcctaccaggccgccatcagaggcgtgggcagcgcccagagcagactgggccccggcccccccagaggccacagcaaggccctggccccccaggccgccctgatccccgaggaggagtgcctggccggcgactggctggagctggacatgcccctgaccagaagcagaagacccagacccagaggcaccggcgacaacagaagacccagcagcaccagcggcagcgacagcgaggagagcagacccagagccagagccaagcaggtgagactgacctgcatgcagagctgcagcgcccccgtgaacgccggccccagcagcctggccagcgagccccccggcagccccagcacccccagagtgagcgagcccagcggcgacagcagcgccgccggccagcccctgggccccgccccccccccccccatcagagtgagagtgcaggtgcaggaccacctgttcctgatccccgtgccccacagcagcgacacccacagcgtggcctggctggccgagcaggccgcccagagatactaccagacctgcggcctgctgcccagactgaccctgagaaaggagggcgccctgctggccccccaggacctgatccccgacgtgctgcagagcaacgacgaggtgctggccgaggtgaccagctgggacctgccccccctgaccgacagatacagaagagcctgccagagcctgggccagggcgagcaccagcaggtgctgcaggccgtggagctgcagggcctgggcctgagcttcagcgcctgcagcctggccctggaccaggcccagctgacccccctgctgagagccctgaagctgcacaccgccctgagagagctgagactggccggcaacagactgggcgacaagtgcgtggccgagctggtggccgccctgggcaccatgcccagcctggccctgctggacctgagcagcaaccacctgggccccgagggcctgagacagctggccatgggcctgcccggccaggccaccctgcagagcctggaggagctggacctgagcatgaaccccctgggcgacggctgcggccagagcctggccagcctgctgcacgcctgccccctgctgagcaccctgagactgcaggcctgcggcttcggccccagcttcttcctgagccaccagaccgccctgggcagcgccttccaggacgccgagcacctgaagaccctgagcctgagctacaacgccctgggcgcccccgccctggccagaaccctgcagagcctgcccgccggcaccctgctgcacctggagctgagcagcgtggccgccggcaagggcgacagcgacctgatggagcccgtgttcagatacctggccaaggagggctgcgccctggcccacctgaccctgagcgccaaccacctgggcgacaaggccgtgagagacctgtgcagatgcctgagcctgtgccccagcctgatcagcctggacctgagcgccaaccccgagatcagctgcgccagcctggaggagctgctgagcaccctgcagaagagaccccagggcctgagcttcctgggcctgagcggctgcgccgtgcagggccccctgggcctgggcctgtgggacaagatcgccgcccagctgagagagctgcagctgtgcagcagaagactgtgcgccgaggacagagacgccctgagacagctgcagcccagcagacccggccccggcgagtgcaccctggaccacggcagcaagctgttcttcagaagactgtag

SEQ ID NO: 11968 - DNA, 675 bp, synthetic construct
  source 1..675: mol_type = other DNA; note = Synthetic coding sequence
atgcccaccctgttcaagggcgtgtggggcgtggtggagcacagcagagccctgggcagattctgccccgcctgcctgcccagcggcccccacctgcacacccagcccgccctgggcaccgccgagatgaccctgctgagcagccagagcagcagcctggtggcccccagcggcagcgtgagcgccgagaaccccgagcagagaatgctggagaagagagccaaggtgatcgaggagctgctgcagaccgagagagactacatcagagacctggagatgtgcatcgagagaatcatggtgcccatgcagcaggcccaggtgcccaacatcgacttcgagggcctgttcggcaacatgcagatggtgatcaaggtgagcaagcagctgctggccgccctggagatcagcgacgccgtgggccccgtgttcctgggccacagagacgagctggagggcacctacaagatctactgccagaaccacgacgaggccatcgccctgctggagatctacgagaaggacgagaagatccagaagcacctgcaggacagcctggccgacctgaagagcctgtacaacgagtggggctgcaccaactacatcaacctgggcagcttcctgatcaagcccgtgcagagagtgatgagataccccctgctgctgatggagctgtag

SEQ ID NO: 11969 - DNA, 354 bp, synthetic construct
  source 1..354: mol_type = other DNA; note = Synthetic coding sequence
gtgtgcggcgactacctgctgagcagaatggacgtgaccagctgcatcagctacagaaacttcgccagctgcatgggcgacagcagactgctgaacaaggtggacgcctacatccaggagcacctgctgcagatcagcgaggaggaggagttcctgaagctgcccagactgaagctggaggtgatgctggaggacaacgtgtgcctgcccagcaacggcaagctgtacaccaaggtgatcaactgggtgcagagaagcatctgggagaacggcgacagcctggaggagctgatggaggaggtgagcttcaaggtgaacggcatccagcccttcctgaagatcatcctgctgtag

SEQ ID NO: 11970 - DNA, 285 bp, synthetic construct
  source 1..285: mol_type = other DNA; note = Synthetic coding sequence
atgctgtgctggggctactggagcctgggccagcccggcatcagcaccaacctgcagggcatcgtggccgagccccaggtgtgcggcttcatcagcgacagaagcgtgaaggaggtggcctgcggcggcaaccacagcgtgttcctgctggaggacggcgaggtgtacacctgcggcctgaacaccaagggccagctgggccacgagagagagggcaacaagcccgagcagatcggcgccctggccgaccagcacatcatccacgtggcctgcggcgagagctag

SEQ ID NO: 11971 - DNA, 747 bp, synthetic construct; identical to SEQ ID NO: 11765
  source 1..747: mol_type = other DNA; note = Synthetic coding sequence

SEQ ID NO: 11972 - DNA, 2814 bp, synthetic construct
  source 1..2814: mol_type = other DNA; note = Synthetic coding sequence
atggagcccgacatcatcagaatgtacagcagcagccccccccccctggacaacggcgccgaggacgacgacgacgacgagttcggcgagttcggcggcttcagcgaggtgagccccagcggcgtgggcttcgtggacttcgacacccccgactacaccagacccaaggaggagttcgtgcccagcaaccacttcatgcccatccacgagttcagcgagaacgtggacagcctgaccagcttcaagagcatcaagaacggcaacgacaaggacatcaccgccgagctgagcgcccccgtgaagggccagagcgacgtgctgctgagcaccaccagcaaggagatcatcagcagcgagatgctggccaccagcatcgacggcatggagagacccggcaacctgaacaaggtggtggagcagagacagaacgtgggcaccctggagagcttcagccccggcgacttcagaaccaacatgaacgtggtgcaccagaacaagcagctggagagctgcaacggcgagaagcccccctgcctggagatcctgaccaacggcttcgccgtgctggagaccgtgaacccccagggcaccgacgacctggacaacgtggccgacagcaagggcagaaagcccctgagcacccacagcaccgagtacaacctggacagcgtgcccagccccgccgaggagttcgccgacttcgccaccttcagcaagaaggagagaatccagctggaggagatcgagtgcgccgtgctgaacgacagagaggccctgaccatcagagagaacaacaagatcaacagagtgaacgagctgaacagcgtgaaggaggtggccctgggcagaagcctggacaacaagggcgacaccgacggcgaggaccaggtgtgcgtgagcgagatcagcatcgtgaccaacagaggcttcagcgtggagaagcagggcctgcccaccctgcagcaggacgagttcctgcagagcggcgtgcagagcaaggcctggagcctggtggacagcgccgacaacagcgaggccatcagaagagagcagtgcaagaccgaggagaagctggacctgctgaccagcaagtgcgcccacctgtgcatggacagcgtgaagaccagcgacgacgaggtgggcagccccaaggaggagagcagaaagttcaccaacttccagagccccaacatcgaccccaccgaggagaacgacctggacgacagcctgagcgtgaagaacggcgacagcagcaacgacttcgtgacctgcaacgacatcaacgaggacgacttcggcgacttcggcgacttcggcagcgccagcggcagcaccccccccttcgtgaccggcacccaggacagcatgagcgacgccaccttcgaggagagcagcgagcacttcccccacttcagcgagcccggcgacgacttcggcgagttcggcgacatcaacgccgtgagctgccaggaggagaccatcctgaccaagagcgacctgaagcagaccagcgacaacctgagcgaggagtgccagctggccagaaagagcagcggcaccggcaccgagcccgtggccaagctgaagaacggccaggagggcgagatcggccacttcgacagcgtgcccaacatccaggacgactgcaacggcttccaggacagcgacgacttcgccgacttcagcagcgccggccccagccaggtggtggactggaacgccttcgaggacgagcagaaggacagctgcagctgggccgccttcggcgaccagcaggccaccgagagccaccacagaaaggaggcctggcagagccacagaaccgacgagaacatcgacacccccggcacccccaagacccacagcgtgcccagcgccaccagcaagggcgccgtggccagcggccacctgcaggagagcgccaccagcgtgcagaccgccctgctgaacagactggagagaatcttcgaggcctgcttccccagcatcctggtgcccgacgccgaggaggaggtgaccagcctgaagcacctgctggagaccagcaccctgcccatcaagaccagagaggccctgcccgagagcggcgagctgctggacgtgtggaccgagctgcaggacatccacgacgcccacggcctgagataccagtggggcggcagccacagcaacaagaagctgctgagcagcctgggcatcgacaccagaaacatcctgttcaccggcaacaagaagcagcccgtgatcgtgcccatgtacgccgccggcctgggcatgctggagcccaccaaggagcccctgaagcccctgagcgccgccgagaagatcgccagcatcggccagaccgccaccatgagccccgacatgaacacctgcaccagcgaccagttccaggagagcctgccccccgtgcagttcgactggagcagcagcggcctgaccaaccccctggacgccagcggcggcagcaccctgctgaacctggacttcttcggccccgtggacgacagcagcagcagcagcagcaccaccatccccggcgtggaccccgagctgtacgagctgaccaccagcaagctggagatcagcaccagcagcctgaaggtgaccgacgccttcgccagactgatgagcaccgtggagaagaccagcaccagcaccagcagaaagcccaagagagaggagcacctgagcgaggaggccatcaaggtgatcgccggcctgcccgacctgaccttcatgcacgccaaggtgctgatgttccccgccaccctgacccccagcaccagcagccaggagaaggccgacggctag

SEQ ID NO: 11973 - DNA, 114 bp, synthetic construct
  source 1..114: mol_type = other DNA; note = Synthetic coding sequence
atggccagcgaggacatcgccaagctggccgagaccctggccaagacccaggtggccggcggccagctgagcttcaagggcaagagcctgaagctgaacaccgccgaggactag

SEQ ID NO: 11974 - DNA, 309 bp, synthetic construct
  source 1..309: mol_type = other DNA; note = Synthetic coding sequence
atgcagaccagcagcagcagaagcgtgcacctgagcgagtggcagaagaactacttcgccatcaccagcggcatctgcaccggccccaaggccgacgcctacagagcccagatcctgagaatccagtacgcctgggccaacagcgagatcagccaggtgtgcgccaccaagctgttcaagaagtacgccgagaagtacagcgccatcatcgacagcgacaacgtggagagcggcctgaacaactacgccgagaacatcctgaccctggccggcagccagcagaccgacagcgacaagtggcagagctag

SEQ ID NO: 11975 - DNA, 474 bp, synthetic construct; identical to SEQ ID NO: 11812
  source 1..474: mol_type = other DNA; note = Synthetic coding sequence

SEQ ID NO: 11976 - DNA, 348 bp, synthetic construct
  source 1..348: mol_type = other DNA; note = Synthetic coding sequence
atggccggcgcccccaccgtgagcctgcccgagctgagaagcctgctggccagcggcagagccagactgttcgacgtgagaagcagagaggaggccgccgccggcaccatccccggcgccctgaacatccccgtgagcgagctggagagcgccctgcagatggagcccgccgccttccaggccctgtacagcgccgagaagcccaagctggaggacgagcacctggtgttcttctgccagatgggcaagagaggcctgcaggccacccagctggccagaagcctgggctacaccggcgccagaaactacgccggcgcctacagagagtggctggagaaggagagctag

SEQ ID NO: 11977 - DNA, 4767 bp, synthetic construct; identical to SEQ ID NO: 10006
  source 1..4767: mol_type = other DNA; note = Synthetic coding sequence

SEQ ID NO: 11978 - DNA, 381 bp, synthetic construct
  source 1..381: mol_type = other DNA; note = Synthetic coding sequence
atggccgccgccaccggcgaccccggcctgagcaagctgcagttcgcccccttcagcagcgccctggacgtgggcttctggcacgagctgacccagaagaagctgaacgagtacagactggacgaggcccccaaggacatcaagggctactactacaacggcgacagcgccggcctgcccgccagactgaccctggagttcagcgccttcgacatgagcgcccccacccccgccagatgctgccccgccatcggcaccctgtacaacaccaacaccctggagagcttcaagaccgccgacaagaagctgctgctggagcaggccgccaacgagatctgggagagcatcaagagcggcaccgccctggagaaccccgtgtag

SEQ ID NO: 11979 - DNA, 1434 bp, synthetic construct
  source 1..1434: mol_type = other DNA; note = Synthetic coding sequence
atggccgacggccaggtggccgagctgctgctgagaagactggaggccagcgacggcggcctggacagcgccgagctggccgccgagctgggcatggagcaccaggccgtggtgggcgccgtgaagagcctgcaggccctgggcgaggtgatcgaggccgagctgagaagcaccaagcactgggagctgaccgccgagggcgaggagatcgccagagagggcagccacgaggccagagtgttcagaagcatcccccccgagggcctggcccagagcgagctgatgagactgcccagcggcaaggtgggcttcagcaaggccatgagcaacaagtggatcagagtggacaagagcgccgccgacggccccagagtgttcagagtggtggacagcatggaggacgaggtgcagagaagactgcagctggtgagaggcggccaggccgagaagctgggcgagaaggagagaagcgagctgagaaagagaaagctgctggccgaggtgggcagctggagagacagacccttcaagccctacaacttcctggcccacggcgtgctgcccgacagcggccacctgcaccccctgctgaaggtgagaagccagttcagacagatcttcctggagatgggcttcaccgagatgcccaccgacaacttcatcgagagcagcttctggaacttcgacgccctgttccagccccagcagcaccccgccagagaccagcacgacaccttcttcctgagagaccccgccgaggccctgcagctgcccatggactacgtgcagagagtgaagagaacccacagccagggcggctacggcagccagggctacaagtacaactggaagctggacgaggccagaaagaacctgctgagaacccacaccaccagcgccagcgccagagccctgtacagactggcccagaagaagcccttcacccccgtgaagtacttcagcatcgacagagtgttcagaaacgagaccctggacgccacccacctggccgagttccaccagatcgagggcgtggtggccgaccacggcctgaccctgggccacctgatgggcgtgctgagagagttcttcaccaagctgggcatcacccagctgagattcaagcccgcctacaacccctacaccgagcccagcatggaggtgttcagctaccaccagggcctgaagaagtgggtggaggtgggcaacagcggcgtgttcagacccgagatgctgctgcccatgggcctgcccgagaacgtgagcgtgatcgcctggggcctgagcctggagagacccaccatgatcaagtacggcatcaacaacatcagagagctggtgggccacaaggtgaacctgcagatggtgtacgacagccccctgtgcagactggacgccgagcccagacccccccccacccaggaggccgcctag

SEQ ID NO: 11980 - DNA, 3195 bp, synthetic construct
  source 1..3195: mol_type = other DNA; note = Synthetic coding sequence
atgcccgtgcaggccgcccagtggaccgagttcctgagctgccccatctgctacaacgagttcgacgagaacgtgcacaagcccatcagcctgggctgcagccacaccgtgtgcaagacctgcctgaacaagctgcacagaaaggcctgccccttcgaccagaccgccatcaacaccgacatcgacgtgctgcccgtgaacttcgccctgctgcagctggtgggcgcccaggtgcccgaccaccagagcatcaagctgagcaacctgggcgagaacaagcactacgaggtggccaagaagtgcgtggaggacctggccctgtacctgaagcccctgagcggcggcaagggcgtggccagcctgaaccagagcgccctgagcagacccatgcagagaaagctggtgaccctggtgaactgccagctggtggaggaggagggcagagtgagagccatgagagccgccagaagcctgggcgagagaaccgtgaccgagctgatcctgcagcaccagaacccccagcagctgagcgccaacctgtgggccgccgtgagagccagaggctgccagttcctgggccccgccatgcaggaggaggccctgaagctggtgctgctggccctggaggacggcagcgccctgagcagaaaggtgctggtgctgttcgtggtgcagagactggagcccagattcccccaggccagcaagaccagcatcggccacgtggtgcagctgctgtacagagccagctgcttcaaggtgaccaagagagacgaggacagcagcctgatgcagctgaaggaggagttcagaagctacgaggccctgagaagagagcacgacgcccagatcgtgcacatcgccatggaggccggcctgagaatcagccccgagcagtggagcagcctgctgtacggcgacctggcccacaagagccacatgcagagcatcatcgacaagctgcagagccccgagagcttcgccaagagcgtgcaggagctgaccatcgtgctgcagagaaccggcgaccccgccaacctgaacagactgagaccccacctggagctgctggccaacatcgaccccaaccccgacgccgtgagccccacctgggagcagctggagaacgccatggtggccgtgaagaccgtggtgcacggcctggtggacttcatccagaactacagcagaaagggccacgagaccccccagccccagcccaacagcaagtacaagaccagcatgtgcagagacctgagacagcagggcggctgccccagaggcaccaactgcaccttcgcccacagccaggaggagctggagaagtacagactgagaaacaagaagatcaacgccaccgtgagaaccttccccctgctgaacaaggtgggcgtgaacaacaccgtgaccaccaccgccggcaacgtgatcagcgtgatcggcagcaccgagaccaccggcaagatcgtgcccagcaccaacggcatcagcaacgccgagaacagcgtgagccagctgatcagcagaagcaccgacagcaccctgagagccctggagaccgtgaagaaggtgggcaaggtgggcgccaacggccagaacgccgccggccccagcgccgacagcgtgaccgagaacaagatcggcagcccccccaagacccccgtgagcaacgtggccgccaccagcgccggccccagcaacgtgggcaccgagctgaacagcgtgccccagaagagcagccccttcctgaccagagtgcccgtgtaccccccccacagcgagaacatccagtacttccaggaccccagaacccagatccccttcgaggtgccccagtacccccagaccggctactacccccccccccccaccgtgcccgccggcgtggccccctgcgtgcccagattcgtgagaagcaacaacgtgcccgagagcagcctgccccccgccagcatgccctacgccgaccactacagcaccttcagccccagagacagaatgaacagcagcccctaccagcccccccccccccagccctacggccccgtgccccccgtgcccagcggcatgtacgcccccgtgtacgacagcagaagaatctggagaccccccatgtaccagagagacgacatcatcagaagcaacagcctgccccccatggacgtgatgcacagcagcgtgtaccagaccagcctgagagagagatacaacagcctggacggctactacagcgtggcctgccagccccccagcgagcccagaaccaccgtgcccctgcccagagagccctgcggccacctgaagaccagctgcgaggagcagatcagaagaaagcccgaccagtgggcccagtaccacacccagaaggcccccctggtgagcagcaccctgcccgtggccacccagagccccaccccccccagccccctgttcagcgtggacttcagagccgacttcagcgagagcgtgagcggcaccaagttcgaggaggaccacctgagccactacagcccctggagctgcggcaccatcggcagctgcatcaacgccatcgacagcgagcccaaggacgtgatcgccaacagcaacgccgtgctgatggacctggacagcggcgacgtgaagagaagagtgcacctgttcgagacccagagaagaaccaaggaggaggaccccatcatccccttcagcgacggccccatcatcagcaagtggggcgccatcagcagaagcagcagaaccggctaccacaccaccgaccccgtgcaggccaccgccagccagggcagcgccaccaagcccatcagcgtgagcgactacgtgccctacgtgaacgccgtggacagcagatggagcagctacggcaacgaggccaccagcagcgcccactacgtggagagagacagattcatcgtgaccgacctgagcggccacagaaagcacagcagcaccggcgacctgctgagcctggagctgcagcaggccaagagcaacagcctgctgctgcagagagaggccaacgccctggccatgcagcagaagtggaacagcctggacgagggcagacacctgaccctgaacctgctgagcaaggagatcgagctgagaaacggcgaggtgaagaagctgaacctgagcgccagctgcctgatgtacctgttcagcgccgccgccagctggctgtaccactactag

SEQ ID NO: 11981 - DNA, 1548 bp, synthetic construct
  source 1..1548: mol_type = other DNA; note = Synthetic coding sequence
tgagccggcggcagccccagcgtggtggactacttccccagcgaggacttctacagatgcggctactgcaagaacgagagcggcagcagaagcaacggcatgtgggcccacagcatgaccgtgcaggactaccaggacctgatcgacagaggctggagaagaagcggcaagtacgtgtacaagcccgtgatgaaccagacctgctgcccccagtacaccatcagatgcagacccctgcagttccagcccagcaagagccacaagaaggtgctgaagaagatgctgaagttcctggccaagggcgaggtgcccaagggcagctgcgaggacgagcccatggacagcaccatggacgacgccgtggccggcgacttcgccctgatcaacaagctggacatccagtgcgacctgaagaccctgagcgacgacatcaaggagagcctggagagcgagggcaagaacagcaagaaggaggagccccaggagctgctgcagagccaggacttcgtgggcgagaagctgggcagcggcgagcccagccacagcgtgaaggtgcacaccgtgcccaagcccggcaagggcgccgacctgagcaagcccccctgcagaaaggccaaggagatcagaaaggagagaaagagactgaagctgatgcagcagaaccccgccggcgagctggagggcttccaggcccagggccacccccccagcctgttcccccccaaggccaagagcaaccagcccaagagcctggaggacctgatcttcgagagcctgcccgagaacgccagccacaagctggaggtgagagtggtgagaagcagcccccccagcagccagttcaaggccaccctgctggagagctaccaggtgtacaagagataccagatggtgatccacaagaacccccccgacacccccaccgagagccagttcaccagattcctgtgcagcagccccctggaggccgagaccccccccaacggccccgactgcggctacggcagcttccaccagcagtactggctggacggcaagatcatcgccgtgggcgtgatcgacatcctgcccaactgcgtgagcagcgtgtacctgtactacgaccccgactacagcttcctgagcctgggcgtgtacagcgccctgagagagatcgccttcaccagacagctgcacgagaagaccagccagctgagctactactacatgggcttctacatccacagctgccccaagatgaagtacaagggccagtacagacccagcgacctgctgtgccccgagacctacgtgtgggtgcccatcgagcagtgcctgcccagcctggagaacagcaagtactgcagattcaaccaggaccccgaggccgtggacgaggacagaagcaccgagcccgacagactgcaggtgttccacaagagagccatcatgccctacggcgtgtacaagaagcagcagaaggaccccagcgaggaggccgccgtgctgcagtacgccagcctggtgggccagaagtgcagcgagagaatgctgctgttcagaaactag

SEQ ID NO: 11982 - DNA, 225 bp, synthetic construct
  source 1..225: mol_type = other DNA; note = Synthetic coding sequence
atggccatggcccccagccccagcctggtgcaggtgtacaccagccccgccgccgtggccgtgtgggagtggcaggacggcctgggcacctggcacccctacagcgccaccgtgtgcagcttcatcgagcagcagttcgtgcagcagaagggccagagattcggcctgggcagcctggcccacagcatccccctgggccaggccgaccccagcctggccccctag

SEQ ID NO: 11983 - DNA, 594 bp, synthetic construct
  source 1..594: mol_type = other DNA; note = Synthetic coding sequence
atggccgccttcagagacatcgaggaggtgagccagggcctgctgagcctgctgggcgccaacagagccgaggcccagcagagaagactgctgggcagacacgagcaggtggtggagagactgctggagacccaggacggcgccgagaagcagctgagagagatcctgaccatggagaaggaggtggcccagagcctgctgaacgccaaggagcaggtgcaccagggcggcgtggagctgcagcagctggaggccggcctgcaggaggccggcgaggaggacaccagactgaaggccagcctgctgcagctgaccagagagctggaggagctgaaggagatcgaggccgacctggagagacaggagaaggaggtggacgaggacaccaccgtgaccatccccagcgccgtgtacgtggcccagctgtaccaccaggtgagcaagatcgagtgggactacgagtgcgagcccggcatggtgaagggcatccaccacggccccagcgtggcccagcccatccacctggacagcacccagctgagcagaaagttcatcagcgactacctgtggagcctggtggacaccgagtggtag

SEQ ID NO: 11984 - DNA, 2271 bp, synthetic construct; identical to SEQ ID NO: 10852
  source 1..2271: mol_type = other DNA; note = Synthetic coding sequence

SEQ ID NO: 11985 - DNA, 1941 bp, synthetic construct
  source 1..1941: mol_type = other DNA; note = Synthetic coding sequence
gcccagggcagcgtgagcttcaacgacgtgaccgtggacttcacccaggaggagtggcagcacctggaccacgcccagaagaccctgtacatggacgtgatgctggagaactactgccacctgatcagcgtgggctgccacatgaccaagcccgacgtgatcctgaagctggagagaggcgaggagccctggaccagcttcgccggccacacctgcctggaggagaactggaaggccgaggacttcctggtgaagttcaaggagcaccaggagaagtacagcagaagcgtggtgagcatcaaccacaagaagctggtgaaggagaagagcaagatctacgagaagaccttcaccctgggcaagaaccccgtgaacagcaagaacctgccccccgagtacgacacccacggcagaatcctgaagaacgtgagcgagctgatcatcagcaacctgaaccccgccagaaagagactgagcgagtacaacggctacggcaagagcctgctgagcaccaagcaggagaccacccaccccgaggtgaagagccacaaccagagcgccagagccttcagccacaacgaggtgctgatgcagtaccagaagaccgagacccccgcccagagcttcggctacaacgactgcgagaagagcttcctgcagagaggcggcctgatcacccacagcagaccctacaagggcgagaaccccagcgtgtacaacaagaagagaagagccaccaacatcgagaagaagcacacctgcaacgagtgcggcaagagcttctgcagaaagagcgtgctgatcctgcaccagggcatccacagcgaggagaagccctaccagtgccaccagtgcggcaacgccttcagaagaaagagctacctgatcgaccaccagagaacccacaccggcgagaagcccttcgtgtgcaacgagtgcggcaagagcttcagactgaagaccgccctgaccgaccaccagagaacccacaccggcgagaagagctacgagtgcctgcagtgcagaaacgccttcagactgaagagccacctgatcagacaccagagaacccacaccggcgagaagccctacgagtgcaacgactgcggcaagagcttcagacagaagaccaccctgagcctgcaccagagaatccacaccggcgagaagccctacatctgcaaggagtgcggcaagagcttccaccagaaggccaacctgaccgtgcaccagagaacccacaccggcgagaagccctacatctgcaacgagtgcggcaagagcttcagccagaagaccaccctggccctgcacgagaagacccacaacgaggagaagccctacatctgcagcgagtgcggcaagagcttcagacagaagaccaccctggtggcccaccagagaacccacaccggcgagaagagctacgagtgcccccactgcggcaaggccttcagaatgaagagctacctgatcgaccaccacagaacccacaccggcgagaagccctacgagtgcaacgagtgcggcaagagcttcagccagaagaccaacctgaacctgcaccagagaatccacaccggcgagaagccctacgtgtgcaacgagtgcggcaagagcttcagacagaaggccaccctgaccgtgcaccagaagatccacaccggccagaagagctacgagtgcccccagtgcggcaaggccttcagcagaaagagctacctgatccaccaccagagaacccacaccggcgagaagccctacaagtgcagcgagtgcggcaagtgcttcagacagaagaccaacctgatcgtgcaccagagaacccacaccggcgagaagccctacgtgtgcaacgagtgcggcaagagcttcagctacaagagaaacctgatcgtgcaccagagaacccacaagggcgagaacatcgagatgcagtag

SEQ ID NO: 11986 - DNA, 594 bp, synthetic construct
  source 1..594: mol_type = other DNA; note = Synthetic coding sequence
atgggcggcagaaagagagagagaaaggccgccgtggaggaggacaccagcctgagcgagagcgagggccccagacagcccgacggcgacgaggaggagagcaccgccctgagcatcaacgaggagatgcagagaatgctgaaccagctgagagagtacgacttcgaggacgactgcgacagcctgacctgggaggagaccgaggagaccctgctgctgtgggaggacttcagcggctacgccatggccgccgccgaggcccagggcgagcaggaggacagcctggagaaggtgatcaaggacaccgagagcctgttcaagaccagagagaaggagtaccaggagaccatcgaccagatcgagctggagctggccaccgccaagaacgacatgaacagacacctgcacgagtacatggagatgtgcagcatgaagagaggcctggacgtgcagatggagacctgcagaagactgatcacccagagcggcgacagaaagagccccgccttcaccgccgtgcccctgagcgaccccccccccagacaggccagactgagaacccccatcgccatgagccacctgaccgccccctag

SEQ ID NO: 11987 - DNA, 423 bp, synthetic construct
  source 1..423: mol_type = other DNA; note = Synthetic coding sequence
atggccatggcccccagccccagcctggtgcaggtgtacaccagccccgccgccgtggccgtgtgggagtggcaggacggcctgggcacctggcacccctacagcgccaccgtgtgcagcttcatcgagcagcagttcgtgcagcagaagggccagagattcggcctgggcagcctggcccacagcatccccctgggccaggccgaccccagcctggccccctacatcatcgacctgcccagctggacccagttcagacaggacaccggcaccatgagagccgtgagaagacacctgttcccccagcacagcgcccccggcagaggcgtggtgtgggagtggctgagcgacgacggcagctggaccgcctacgaggccagcgtgtgcgactacctggagcagcaggtggccagaggcaactag

SEQ ID NO: 11988 - DNA, 3237 bp, synthetic construct
  source 1..3237: mol_type = other DNA; note = Synthetic coding sequence
gtgtgcatgcacccccacaacgtgctgagcgacgtggtgaactacaccctgtggctgatggagtgcagccacgccagcggctgctgccacgccaccatgttcttcagcatctgcttcagcttcagagccgtgctggagctgttcgacagatacgacggcctgagaagactggtgaacctgatcagcaccctggagatcctgaacctggaggaccagggcgccctgctgagcgacgacgagatcttcgccagcagacagaccggcaagcacacctgcatggccctgagaaagtacttcgaggcccacctggccatcaagctggagcaggtgaagcagagcctgcagagaaccgagggcggcatcctggtgcacccccagcccccctacaaggcctgcagctacacccacgagcagatcgtggagatgatggagttcctgatcgagtacggccccgcccagctgtactgggagcccgccgaggtgttcctgaagctgagctgcgtgcagctgctgctgcagctgatcagcatcgcctgcaactggaagacctactacgccagaaacgacaccgtgagattcgccctggacgtgctggccatcctgaccgtggtgcccaagatccagctgcagctggccgagagcgtggacgtgctggacgaggccggcagcaccgtgagcaccgtgggcatcagcatcatcctgggcgtggccgagggcgagttcttcatccacgacgccgagatccagaagagcgccctgcagatcatcatcaactgcgtgtgcggccccgacaacagaatcagcagcatcggcaagttcatcagcggcacccccagaagaaagctgccccagaaccccaagagcagcgagcacaccctggccaagatgtggaacgtggtgcagagcaacaacggcatcaaggtgctgctgagcctgctgagcatcaagatgcccatcaccgacgccgaccagatcagagccctggcctgcaaggccctggtgggcctgagcagaagcagcaccgtgagacagatcatcagcaagctgcccctgttcagcagctgccagatccagcagctgatgaaggagcccgtgctgcaggacaagagaagcgaccacgtgaagttctgcaagtacgccgccgagctgatcgagagagtgagcggcaagcccctgctgatcggcaccgacgtgagcctggccagactgcagaaggccgacgtggtggcccagagcagaatcagcttccccgagaaggagctgctgctgctgatcagaaaccacctgatcagcaagggcctgggcgagaccgccaccgtgctgaccaaggaggccgacctgcccatgaccgccgccagccacagcagcgccttcacccccgtgaccgccgccgccagccccgtgagcctgcccagaacccccagaatcgccaacggcatcgccaccagactgggcagccacgccgccgtgggcgccagcgcccccagcgcccccaccgcccacccccagcccagacccccccagggccccctggccctgcccggccccagctacgccggcaacagccccctgatcggcagaatcagcttcatcagagagagacccagcccctgcaacggcagaaagatcagagtgctgagacagaagagcgaccacggcgcctacagccagagccccgccatcaagaagcagctggacagacacctgcccagcccccccaccctggacagcatcatcaccgagtacctgagagagcagcacgccagatgcaagaaccccgtggccacctgcccccccttcagcctgttcaccccccaccagtgccccgagcccaagcagagaagacaggcccccatcaacttcaccagcagactgaacagaagagccagcttccccaagtacggcggcgtggacggcggctgcttcgacagacacctgatcttcagcagattcagacccatcagcgtgttcagagaggccaacgaggacgagagcggcttcacctgctgcgccttcagcgccagagagagattcctgatgctgggcacctgcaccggccagctgaagctgtacaacgtgttcagcggccaggaggaggccagctacaactgccacaacagcgccatcacccacctggagcccagcagagacggcagcctgctgctgaccagcgccacctggagccagcccctgagcgccctgtggggcatgaagagcgtgttcgacatgaagcacagcttcaccgaggaccactacgtggagttcagcaagcacagccaggacagagtgatcggcaccaagggcgacatcgcccacatctacgacatccagaccggcaacaagctgctgaccctgttcaaccccgacctggccaacaactacaagagaaactgcgccaccttcaaccccaccgacgacctggtgctgaacgacggcgtgctgtgggacgtgagaagcgcccaggccatccacaagttcgacaagttcaacatgaacatcagcggcgtgttccaccccaacggcctggaggtgatcatcaacaccgagatctgggacctgagaaccttccacctgctgcacaccgtgcccgccctggaccagtgcagagtggtgttcaaccacaccggcaccgtgatgtacggcgccatgctgcaggccgacgacgaggacgacctgatggaggagagaatgaagagccccttcggcagcagcttcagaaccttcaacgccaccgactacaagcccatcgccaccatcgacgtgaagagaaacatcttcgacctgtgcaccgacaccaaggactgctacctggccgtgatcgagaaccagggcagcatggacgccctgaacatggacaccgtgtgcagactgtacgaggtgggcagacagagactggccgaggacgaggacgaggaggaggaccaggaggaggaggagcaggaggaggaggacgacgacgaggacgacgacgacaccgacgacctggacgagctggacaccgaccagctgctggaggccgagctggaggaggacgacaacaacgagaacgccggcgaggacggcgacaacgacttcagccccagcgacgaggagctggccaacctgctggaggagggcgaggacggcgaggacgaggacagcgacgccgacgaggaggtggagctgatcctgggcgacaccgacagcagcgacaacagcgacctggaggacgacatcatcctgagcctgaacgagtag

SEQ ID NO: 11989 - DNA, 447 bp, synthetic construct
  source 1..447: mol_type = other DNA; note = Synthetic coding sequence
atgctgagcgacggctgcggcagcgaggagaagatcagcgtgcccagctgctacggcggcatcggcgcccccgtgagcagacaggtgcccgccagccacgacagcgagctgatggccttcatgaccagaaagctgtgggacctggagcagcaggtgaaggcccagaccgacgagatcctgagcaaggaccagaagatcgccgccctggaggacctggtgcagaccctgagaccccaccccgccgaggccaccctgcagagacaggaggagctggagaccatgtgcgtgcagctgcagagacaggtgagagagatggagagattcctgagcgactacggcctgcagtgggtgggcgagcccatggaccaggaggacagcgagagcaagaccgtgagcgagcacggcgagagagactggatgaccgccaagaagttctggaagccctag

SEQ ID NO: 11990 - DNA, 1755 bp, synthetic construct
  source 1..1755: mol_type = other DNA; note = Synthetic coding sequence
atgagcctgccccccgagaaggccagcgagctgaagcagctgatccaccagcagctgagcaagatggacgtgcacggcagaatcagagagatcctggccgagaccatcagagaggagctggcccccgaccagcagcacctgagcaccgaggacctgatcaaggccctgagaagaagaggcatcatcgacgacgtgatgaaggagctgaacttcgtgaccgacagcgtggagcaggagctgcccagcagccccaagcagcccatctgcttcgacagacagagcaccctgaagaagagcgacggcaccagaatggccgacagcaccaccatgctgagcatcagcgaccccatccacatggtgctgatcaagaccgacatcttcggcgagaccaccctggtggccagctacttcctggagtggagaagcgtgctgggcagcgagaacggcgtgaccagcctgaccgtggagctgatgggcgtgggcaccgagagcaaggtgagcgtgggcatcctgaacatcaagctggagatgtacccccccctgaaccagaccctgagccaggaggtggtgaacacccagctggccctggagagacagaagaccgccgagaaggagagactgttcctggtgtacgccaagcagtggtggagagagtacctgcagatcagacccagccacaacagcagactggtgaagatcttcgcccaggacgagaacggcatcaacagacccgtgtgcagctacgtgaagcccctgagagccggcagactgctggacacccccagacaggccgccagattcgtgaacgtgctgggctacgagagagcccccgtgatcggcggcggcggcaagcaggagcagtggtgcaccctgctggccttcctgtgcagaaacaagggcgactgcgaggaccacgccaacctgctgtgcagcctgctgctgggctacggcctggaggccttcgtgtgcgtgggcaccaaggccaagggcgtgccccacgcctgggtgatgacctgcggcaccgacggcgccatcaccttctgggagagcctgaccggccacagatacatccacaagcccaccaaccccgacgagccccccgtggccgagcagcccaagcccctgtacccctacagaaccatcggctgcgtgttcaaccaccagatgttcctgggcaactgccagcccagcgacgccgtggagacctgcgtgttcgacctgaacgacgagagcaagtggaagcccatgagcgaggaggccatcaagagcgtgtgcgcccccggcgccaccaccagcctgccccccttcccccccctgtgcgccagcaccatcgacgccagcgtgaccagcaacgagatcgagatgcagctgagactgctggtgagcgagcacagaaaggacctgggcctgaccaccgtgtgggaggaccagctgagctacctgctgagccccgccctggccagctacgagttcgagagaaccaccagcatcagcgccggcaacgaggagttccaggacgccatcagaagagccgtgcccgacggccacaccttcaagggcttccccatccacttcgtgtacagaaacgccagaagagccttcgccacctgcctgagaagccccttctgcgaggagatcatctgctgcagaggcgaccaggtgagactggccgtgagagtgagagtgttcacctaccccgagagcgcctgcgccgtgtggatcatgttcgcctgcaagtacagaagcgtgctgtag

SEQ ID NO: 11991 - DNA, 4515 bp, synthetic construct
  source 1..4515: mol_type = other DNA; note = Synthetic coding sequence
atggtgagcgagagcgacttcagcaaggacgtggccgtgcaggtgctgcccctggacaagatcgaggagaacaacaagcagaaggccaacgacatcttcatcagccagtacaccatgggccagaaggacgccctgagaaccgtgctgaagcagaacgtgagcctgtgcctgaccggctggagcgaccacagcggcgtgatcaccacccactgcagcctgtacctgctgagactgatgagaagcagccacctgagcctgcccagcagctgggactacagagcccagagcatgcccgtgttcaaggaggtgaaggtgcacctgctggaggacgccggcatcgagaaggacgccgtgacccaggagaccagaatcagccccagcggcatcgacagcgccaccaccgtggccgccgccaccgccgccgccatcgccaccgccgcccccctgatcaaggtgcagagcgacctggaggccaaggtgaacagcgtgaccgagctgctgagcaagctgcaggagaccgacaagcacctgcagagagtgaccgagcagcagaccagcatccagagaaagcaggagaagctgcactgccacgaccacgagaagcagatgaacgtgttcatggagcagcacatcagacacctggagaagctgcagcagcagcagatcgacatccagacccacttcatcagcgccgccctgaagaccagcagcttccagcccgtgagcatgcccagcagcagagccgtggagaagtacagcgtgaagcccgagcaccccaacctgggcagctgcaaccccagcctgtacaacaccttcgccagcaagcaggcccccctgaaggaggtggaggacaccagcttcgacaagcagaagagccccctggagacccccgcccccagaagattcgcccccgtgcccgtgagcagagacgacgagctgagcaagagagagaacctgctggaggagaaggagaacatggaggtgagctgccacagaggcaacgtgagactgctggagcagatcctgaacaacaacgacagcctgaccagaaagagcgagagcagcaacaccaccagcctgaccagaagcaagatcggctggacccccgagaagaccaacagattccccagctgcgaggagctggagaccaccaaggtgaccatgcagaagagcgacgacgtgctgcacgacctgggccagaaggagaaggagaccaacagcatggtgcagcccaaggagagcctgagcatgctgaagctgcccgacctgccccagaacagcgtgaagctgcagaccaccaacaccaccagaagcgtgctgaaggacgccgagaagatcctgagaggcgtgcagaacaacaagaaggtgctggaggagaacctggaggccatcatcagagccaaggacggcgccgccatgtacagcctgatcaacgccctgagcaccaacagagagatgagcgagaagatcagaatcagaaagaccgtggacgagtggatcaagaccatcagcgccgagatccaggacgagctgagcagaaccgactacgagcagaagagattcgaccagaagaaccagagaaccaagaagggccagaacatgaccaaggacatcagaaccaacacccaggacaagaccgtgaacaagagcgtgatccccagaaagcacagccagaagcagatcgaggagcacttcagaaacctgcccatgagaggcatgcccgccagcagcctgcagaaggagagaaaggagggcctgctgaaggccaccaccgtgatccaggacgaggactacatgctgcaggtgtacggcaagcccgtgtaccagggccacagaagcaccctgaagaagggcccctacctgagattcaacagccccagccccaagagcagaccccagagacccaaggtgatcgagagagtgaagggcaccaaggtgaagagcatcagaacccagaccgacttctacgccaccaagcccaagaagatggacagcaagatgaagcacagcgtgcccgtgctgccccacggcgaccagcagtacctgttcagccccagcagagagatgcccaccttcagcggcaccctggagggccacctgatccccatggccatcctgctgggccagacccagagcaacagcgacaccatgccccccgccggcgtgatcgtgagcaagccccaccccgtgaccgtgaccaccagcatcccccccagcagcagaaaggtggagaccggcgtgaagaagcccaacatcgccatcgtggagatgaagagcgagaagaaggaccccccccagctgaccgtgcaggtgctgcccagcgtggacatcgacagcatcagcaacagcagcgccgacgtgctgagccccctgagcagccccaaggaggccagcctgccccccgtgcagacctggatcaagacccccgagatcatgaaggtggacgaggaggaggtgaagttccccggcaccaacttcgacgagatcatcgacgtgatccaggaggaggagaagtgcgacgagatccccgacagcgagcccatcctggagttcaacagaagcgtgaaggccgacagcaccaagtacaacggcccccccttcccccccgtggccagcaccttccagcccaccgccgacatcctggacaaggtgatcgagagaaaggagaccctggagaacagcctgatccagtgggtggagcaggagatcatgagcagaatcatcagcggcctgttccccgtgcagcagcagatcgcccccagcatcagcgtgagcgtgagcgagaccagcgagcccctgaccagcgacatcgtggagggcaccagcagcggcgccctgcagctgttcgtggacgccggcgtgcccgtgaacagcaacgtgatcaagcacttcgtgaacgaggccctggccgagaccatcgccgtgatgctgggcgacagagaggccaagaagcagggccccgtggccaccggcgtgagcggcgacgccagcaccaacgagacctacctgcccgccagagtgtgcacccccctgcccaccccccagcccacccccccctgcagccccagcagccccgccaaggagtgcgtgctggtgaagacccccgacagcagcccctgcgacagcgaccacgacatggccttccccgtgaaggagatctgcgccgagaagggcgacgacatgcccgccatcatgctggtgaacacccccaccgtgacccccaccaccacccccccccccgccgccgccgtgttcacccccaccctgagcgacatcagcatcgacaagctgaaggtgagcagccccgagctgcccaagccctggggcgacggcgacctgcccctggaggaggagaaccccaacagcccccaggaggagctgcaccccagagccatcgtgatgagcgtggccaaggacgaggagcccgagagcatggacttccccgcccagccccccccccccgagcccgtgcccttcatgcccttccccgccggcaccaaggcccccagccccagccagatgcccggcagcgacagcagcaccctggagagcaccctgagcgtgaccgtgaccgagaccgagaccctggacaagcccatcagcgagggcgagatcctgttcagctgcggccagaagctggcccccaagatcctggaggacatcggcctgtacctgaccaacctgaacgacagcctgagcagcaccctgcacgacgccgtggagatggaggacgacccccccagcgagggccaggtgatcagaatgagccacaagaagttccacgccgacgccatcctgagcttcgccaagcagaaccaggagagcgccgtgagccagcaggccgtgtaccacagcgaggacctggagaacagcgtgggcgagctgagcgagggccagagaccccagctgaccgccgccgccgagaacatcctgatgggccacagcctgtacatgcagccccccgtgaccaacacccagagcctggaccagcagtgcgaccccaagcccctgagcagacagttcgacaccgtgagcggcagcatctacgaggacagctgcgccagccacggccccatgagcctgggcgagctggagctggagcccaacagcaagctggtgctgcccaccaccctgctgaccgcccaggagaacgacgtgaacctgcccgtggccgccgaggacttcagccagtaccagctgaagcagaaccaggacgtgaagcaggtggagcacaagcccagccagagctacctgagagtgagaaacaagagcgacatcgcccccagccagcagcaggtgagccccggcgacatggacagaacccagatcgagctgaacccctacctgacctgcgtgttcagcggcggcaaggccgtgcccctgagcgccagccagatgccccccgccaagatgagcgtgatgctgcccagcgtgaacctggaggactgcagccagagcctgagcctgagcaccatgcaggaggacatggagagcagcggcgccgacaccttctag

SEQ ID NO: 11992 - DNA, 2271 bp, synthetic construct
  source 1..2271: mol_type = other DNA; note = Synthetic coding sequence
atggtggcccccgtgctggagaccagccacgtgttctgctgccccaacagagtgagaggcgtgctgaactggagcagcggccccagaggcctgctggccttcggcaccagctgcagcgtggtgctgtacgaccccctgaagagagtggtggtgaccaacctgaacggccacaccgccagagtgaactgcatccagtggatctgcaagcaggacggcagccccagcaccgagctggtgagcggcggcagcgacaaccaggtgatccactgggagatcgaggacaaccagctgctgaaggccgtgcacctgcagggccacgagggccccgtgtacgccgtgcacgccgtgtaccagagaagaaccagcgaccccgccctgtgcaccctgatcgtgagcgccgccgccgacagcgccgtgagactgtggagcaagaagggccccgagggcagagacctgttcctggccagctgcagccaggactgcctgatcagaatctggaagctgtacatcaagagcaccagcctggagacccaggacgacgacaacatcagactgaaggagaacaccttcaccatcgagaacgagagcgtgaagatcgccttcgccgtgaccctggagaccgtgctggccggccacgagaactgggtgaacgccgtgcactggcagcccgtgttctacaaggacggcgtgctgcagcagcccgtgagactgctgagcgccagcatggacaagaccatgatcctgtgggcccccgacgaggagagcggcgtgtggctggagcaggtgagagtgggcgaggtgggcggcaacaccctgggcttctacgactgccagttcaacgaggacggcagcatgatcatcgcccacgccttccacggcgccctgcacctgtggaagcagaacaccgtgaaccccagagagtggacccccgagatcgtgatcagcggccacttcgacggcgtgcaggacctggtgtgggaccccgagggcgagttcatcatcaccgtgggcaccgaccagaccaccagactgttcgccccctggaagagaaaggaccagagccaggtgacctggcacgagatcgccagaccccagatccacggctacgacctgaagtgcctggccatgatcaacagattccagttcgtgagcggcgccgacgagaaggtgctgagagtgttcagcgcccccagaaacttcgtggagaacttctgcgccatcaccggccagagcctgaaccacgtgctgtgcaaccaggacagcgacctgcccgagggcgccaccgtgcccgccctgggcctgagcaacaaggccgtgttccagggcgacatcgccagccagcccagcgacgaggaggagctgctgaccagcaccggcttcgagtaccagcaggtggccttccagcccagcatcctgaccgagccccccaccgaggaccacctgctgcagaacaccctgtggcccgaggtgcagaagctgtacggccacggctacgagatcttctgcgtgacctgcaacagcagcaagaccctgctggccagcgcctgcaaggccgccaagaaggagcacgccgccatcatcctgtggaacaccaccagctggaagcaggtgcagaacctggtgttccacagcctgaccgtgacccagatggccttcagccccaacgagaagttcctgctggccgtgagcagagacagaacctggagcctgtggaagaagcaggacaccatcagccccgagttcgagcccgtgttcagcctgttcgccttcaccaacaagatcaccagcgtgcacagcagaatcatctggagctgcgactggagccccgacagcaagtacttcttcaccggcagcagagacaagaaggtggtggtgtggggcgagtgcgacagcaccgacgactgcatcgagcacaacatcggcccctgcagcagcgtgctggacgtgggcggcgccgtgaccgccgtgagcgtgtgccccgtgctgcaccccagccagagatacgtggtggccgtgggcctggagtgcggcaagatctgcctgtacacctggaagaagaccgaccaggtgcccgagatcaacgactggacccactgcgtggagaccagccagagccagagccacaccctggccatcagaaagctgtgctggaagaactgcagcggcaagaccgagcagaaggaggccgagggcgccgagtggctgcacttcgccagctgcggcgaggaccacaccgtgaagatccacagagtgaacaagtgcgccctgtag

SEQ ID NO: 11993 - DNA, 345 bp, synthetic construct
  source 1..345: mol_type = other DNA; note = Synthetic coding sequence
atgcaggagatcaaccagaacctggccgaggaggccggcctgaacatcacccacatctgcctgccccccgacagcagcgaggccgagatcatcgacgagatcctgaagatcaacgaggacaccagagtgcacggcctggccctgcagatcagcgagaacctgttcagcaacaaggtgctgaacgccctgaagcccgagaaggacgtggacggcgtgaccgacatcaacctgggcaagctggtgagaggcgacgcccacgagtgcttcgtgagccccgtggccaaggccgtgatcgagctgctggagaagagcggcgtgaacctggacggcaagaagatcctgtag

SEQ ID NO: 11994 - DNA, 747 bp, synthetic construct; identical to SEQ ID NO: 11765
  source 1..747: mol_type = other DNA; note = Synthetic coding sequence

SEQ ID NO: 11995 - DNA, 1461 bp, synthetic construct; identical to SEQ ID NO: 9652
  source 1..1461: mol_type = other DNA; note = Synthetic coding sequence

SEQ ID NO: 11996 - DNA, 1710 bp, synthetic construct
  source 1..1710: mol_type = other DNA; note = Synthetic coding sequence
atggccctgctgagcgagggcctggacgaggtgcccgccgcctgcctgagcccctgcggcccccccaaccccaccgagctgttcagcgagagcagaagactggccctggaggagctggtggccggcggccccgaggccttcgccgccttcctgagaagagagagactggccagattcctgaaccccgacgaggtgcacgccatcctgagagccgccgagagacccggcgaggagggcgccgccgccgccgccgccgccgaggacagcttcggcagcagccacgactgcagcagcggcacctacttccccgagcagagcgacctggagccccccctgctggagctgggctggcccgccttctaccagggcgccggcgagggcggcccctacggctgcaaggacgccctgagacagcagctgagaagcgccagagaggtgatcgccgtggtgatggacgtgttcaccgacatcgacatcttcagagacctgcaggagatctgcagaaagcagggcgtggccgtgtacatcctgctggaccaggccctgctgagccagttcctggacatgtgcatggacctgaaggtgcaccccgagcaggagaagctgatgaccgtgagaaccatcaccggcaacatctactacgccagaagcggcaccaagatcatcggcaaggtgcacgagaagttcaccctgatcgacggcatcagagtggccaccggcagctacagcttcacctggaccgacggcaagctgaacagcagcaacctggtgatcctgagcggccaggtggtggagcacttcgacctggagttcagaatcctgtacgcccagagcaagcccatcagccccaagctgctgagccacttccagagcagcaacaagttcgaccacctgaccaacagaaagccccagagcaaggagctgaccctgggcaacctgctgagaatgagactggccagactgagcagcacccccagaaaggccgacctggaccccgagatgcccgccgagggcaaggccgagagaaagccccacgactgcgagagcagcaccgtgagcgaggaggactacttcagcagccacagagacgagctgcagagcagaaaggccatcgacgccgccacccagaccgagcccggcgaggagatgcccggcctgagcgtgagcgaggtgggcacccagaccagcatcaccaccgcctgcgccggcacccagaccgccgtgatcaccagaatcgccagcagccagaccaccatctggagcagaagcaccaccacccagaccgacatggacgagaacatcctgttccccagaggcacccagagcaccgagggcagccccgtgagcaagatgagcgtgagcagaagcagcagcctgaagagcagcagcagcgtgagcagccagggcagcgtggccagcagcaccggcagccccgccagcatcagaaccaccgacttccacaaccccggctaccccaagtacctgggcaccccccacctggagctgtacctgagcgacagcctgagaaacctgaacaaggagagacagttccacttcgccggcatcagaagcagactgaaccacatgctggccatgctgagcagaagaaccctgttcaccgagaaccacctgggcctgcacagcggcaacttcagcagagtgaacctgctggccgtgagagacgtggccctgtaccccagctaccagtag

SEQ ID NO: 11997 - DNA, 1224 bp, synthetic construct
  source 1..1224: mol_type = other DNA; note = Synthetic coding sequence
atggtgctgttcagcgacagcagcctgccccactggcagcagcagcccccccagcccgccccccccccccccctgttccccagacagcagcaggtgcaggtgaacaagggcagagtgaactgccaccccagatgcagatacatcaagaccaagccctgccaccagctgagccaccaggtgtgggtgcagcagaagcccagccacagactgctgagcctgcagctgagccccagccccaagcccagccccagcccccagctgagcctgaagttcagactgagcctgaagttcagacccaagcagctgttccaccccatgagcctgctgaagcacaacccccccacccacagccaccccagccccaagctgcagcagagccagccccagagcaacgtgcagggccagagccccgtgagagtgcagagccccagccagaccagaatcagacccagcacccccagccagctgagccccggccagcagagccaggtgcagaccaccaccagccagcccatccccatccagccccacaccagcctgcagatccccagccagggccagccccagagccagccccaggtggtgatgaagcacaacgccgtgatcgagcacctgaagcagaagaagagcatgacccccgccgagagagaggagaaccagagaatgatcgtgtgcaaccaggtgatgaagtacatcctggacaagatcgacaaggaggagaagcaggccgccaagaagagaaagagagaggagagcgtggagcagaagagaagcaagcagaacgccaccaagctgagcgccctgctgttcaagcacaaggagcagctgagagccgagatcctgaagaagagagccctgctggacaaggacctgcagatcgaggtgcaggaggagctgaagagagacctgaagatcaagaaggagaaggacctgatgcagctggcccaggccaccgccgtggccgccccctgcccccccgtgacccccgccccccccgccccccccgcccccccccccagccccccccccccccccgccgtgcagcacaccggcctgctgagcacccccaccctgcccgccgccagccagaagagaaagagagaggaggagaaggacagcagcagcaagagcaagaagaagaagatgatcagcaccaccagcaaggagaccaagaaggacaccaagctgtactgcatctgcaagaccccctacgacgagagctag

SEQ ID NO: 11998 - DNA, 480 bp, synthetic construct; identical to SEQ ID NO: 11816
  source 1..480: mol_type = other DNA; note = Synthetic coding sequence

SEQ ID NO: 11999 - DNA, 309 bp, synthetic construct
  source 1..309: mol_type = other DNA; note = Synthetic coding sequence
atgaacgaggccgagatcgtggacgtggccctgggcatcctgatcgagagcagaaagcaggagaaggcctgcgagcagcccgccctggccggcgccgacaaccccgagcacagccccccctgcagcgtgagcccccacaccagcagcggcagcagcagcgaggaggaggacagcggcaagcaggccctggcccccggcctgagccccagccagagacccggcggcagcagcagcgcctgcagcagaagccccgaggaggaggaggaggaggacgtgctgaagtacgtgagagagatcttcttcagctag

SEQ ID NO: 12000 - DNA, 345 bp, synthetic construct
  source 1..345: mol_type = other DNA; note = Synthetic coding sequence
atgcagttcggcgagctgctggccgccgtgagaaaggcccaggccaacgtgatgctgttcctggaggagaaggagcaggccgccctgagccaggccaacggcatcaaggcccacctggagtacagaagcgccgagatggagaagagcaagcaggagctggagaccatggccgccatcagcaacaccgtgcagttcctggagagaagcatgaccagcgagctgaagtgcctgcccctgttcagcgccaacatcggcctgcccaacctgagccccgcccccggcaacagcagcagcaacatgtgcatgaccagcagaagcaccagaacccagcacaccagcatctag

SEQ ID NO: 12001 - DNA, 579 bp, synthetic construct; identical to SEQ ID NO: 9780
  source 1..579: mol_type = other DNA; note = Synthetic coding sequence

SEQ ID NO: 12002 - DNA, 888 bp, synthetic construct
  source 1..888: mol_type = other DNA; note = Synthetic coding sequence
atgaagcagtacggcctgggccccaacggcggcatcgtgaccagcctgaacctgttcgccaccagattcgaccaggtgatgaagttcatcgagaaggcccagaacatgagcaagtacgtgctgatcgacacccccggccagatcgaggtgttcacctggagcgccagcggcaccatcatcaccgaggccctggccagcagcttccccaccgtggtgatctacgtgatggacaccagcagaagcaccaaccccgtgaccttcatgagcaacatgctgtacgcctgcagcatcctgtacaagaccaagctgcccttcatcgtggtgatgaacaagaccgacatcatcgaccacagcttcgccgtggagtggatgcaggacttcgaggccttccaggacgccctgaaccaggagaccacctacgtgagcaacctgaccagaagcatgagcctggtgctggacgagttctacagcagcctgagagtggtgggcgtgagcgccgtgctgggcaccggcctggacgagctgttcgtgcaggtgaccagcgccgccgaggagtacgagagagagtacagacccgagtacgagagactgaagaagagcctggccaacgccgagagccagcagcagagagagcagctggagagactgagaaaggacatgggcagcgtggccctggacgccggcaccgccaaggacagcctgagccccgtgctgcaccccagcgacctgatcctgaccagaggcaccctggacgaggaggacgaggaggccgacagcgacaccgacgacatcgaccacagagtgaccgaggagagccacgaggagcccgccttccagaacttcatgcaggagagcatggcccagtactggaagagaaacaacaagtag

SEQ ID NO: 12003 - DNA, 1212 bp, synthetic construct
  source 1..1212: mol_type = other DNA; note = Synthetic coding sequence
atgcccagcgccgaggccaagctgaagaagaacagatgcgccaactgcttcgactgccccggctgcatgcacaccctgagcaccagagccaccagcatcagcacccagctgcccgacgaccccgccaagaccaccatgaagaaggcctactacctggcctgcggcttctgcagatggaccagcagagacgtgggcatggccgacaagagcgtggccagcggcggctggcaggagcccgagaacccccacacccagagaatgaacaagctgatcgagtactaccagcagctggcccagaaggagaaggtggagagagacagaaagaagctggccagaagaagaaactacatgcccctggccttcagcgacaagtacggcctgggcaccagactgcagagacccagagccggcgccagcatcagcaccctggccggcctgagcctgaaggagggcgaggaccagaaggagatcaagatcgagcccgcccaggccgtggacgaggtggagcccctgcccgaggactactacaccagacccgtgaacctgaccgaggtgaccaccctgcagcagagactgctgcagcccgacttccagcccgtgtgcgccagccagctgtaccccagacacaagcacctgctgatcaagagaagcctgagatgcagaaagtgcgagcacaacctgagcaagcccgagttcaaccccaccagcatcaagttcaagatccagctggtggccgtgaactacatccccgaggtgagaatcatgagcatccccaacctgagatacatgaaggagagccaggtgctgctgaccctgaccaaccccgtggagaacctgacccacgtgaccctgttcgagtgcgaggagggcgaccccgacgacatcaacagcaccgccaaggtggtggtgccccccaaggagctggtgctggccggcaaggacgccgccgccgagtacgacgagctggccgagccccaggacttccaggacgaccccgacatcatcgccttcagaaaggccaacaaggtgggcatcttcatcaaggtgaccccccagagagaggagggcgaggtgaccgtgtgcttcaagatgaagcacgacttcaagaacctggccgcccccatcagacccatcgaggagagcgaccagggcaccgaggtgatctggctgacccagcacgtggagctgagcctgggccccctgctgccctag

SEQ ID NO: 12004 - DNA, 1674 bp, synthetic construct; identical to SEQ ID NO: 10192
  source 1..1674: mol_type = other DNA; note = Synthetic coding sequence

SEQ ID NO: 12005 - DNA, 462 bp, synthetic construct
  source 1..462: mol_type = other DNA; note = Synthetic coding sequence
atggccgagcaggagcagagaaagatccccctggtgcccgagaacctgctgaagaagagaaaggcctaccaggccctgaaggccacccaggccaagcaggccctgctggccaagaaggagcagaagaagggcaagggcctgagattcaagagactggagagcttcctgcacgacagctggagacagaagagagacaaggtgagactgagaagactggaggtgaagccccacgccctggagctgcccgacaagcacagcctggccttcgtggtgagaatcgagagaatcgacggcgtgagcctgctggtgcagagaaccatcgccagactgagactgaagaagatcttcagcggcgtgttcgtgaaggtgaccccccagaacctgaagatgctgagaatcgtggagccctacgtgacctggggcgaggtgtggagacacctgctgggcagaccccacagctag

SEQ ID NO: 12006 - DNA, 2070 bp, synthetic construct
  source 1..2070: mol_type = other DNA; note = Synthetic coding sequence
atgatcgacagcgtgaagctgagaagagacagcgccgccgacttcttcagccactacgagtacctgtgcgccctgcagaacagcgtgcccctgcccgccgtgagagcctgcctgagagagggcgtgctggacttcaacgccgacagactgagaggcgtggactgggcccccctgctgagcaccctgaagatcaacaaggacctgcccctggtgagcatcaagagcttcttccagccctggctgggcgacaccggcagcgacatgaacaagttctgcagaagcagagtgcccgccatcagatacaaggacgtgaccttccagctgtgcaaggccctgaagggctgcctgagcatcagcagcgtgctgaagaacctggagctgaacggcctgatcctgagagagagagacctgaccatcctggccaagggcctgaacaagagcgccagcctggtgcacctgagcctggccaactgccccatcggcgacggcggcctggagatcatctgccagggcatcaagagcagcatcaccctgaagaccgtgaacttcaccggctgcaacctgacctggcagggcgccgaccacatggccaagatcctgaagtaccagaccatgagaagacacgaggagacctgggccgagagcctgagatacagaagacccgacctggactgcatggccggcctgagaagaatcaccctgaactgcaacaccctgatcggcgacctgggcgcctgcgccttcgccgacagcctgagcgaggacctgtggctgagagccctggacctgcagcagtgcggcctgaccaacgagggcgccaaggccctgctggaggccctggagaccaacaccaccctggtggtgctggacatcagaaagaaccccctgatcgaccacagcatgatgaaggccgtgatcaagaaggtgctgcagaacggcagaagcgccaagagcgagtaccagtggatcaccagccccagcgtgaaggagcccagcaagaccgccaagcagaagagaagaaccatcatcctgggcagcggccacaagggcaaggccaccatcagaatcggcctggccaccaagaagcccgtgagcagcggcagaaagcacagcctgggcaaggagtactacgcccccgcccccctgccccccggcgtgagcggcttcctgccctggagaaccgccgagagagccaagagacacagaggcttccccctgatcaagaccagagacatctgcaaccagctgcagcagcccggcttccccgtgaccgtgaccgtggagagccccagcagcagcgaggtggaggaggtggacgacagcagcgagagcgtgcacgaggtgcccgagaagaccagcatcgagcaggaggccctgcaggagaagctggaggagtgcctgaagcagctgaaggaggagagagtgatcagactgaaggtggacaagagagtgagcgagctggagcacgagaacgcccagctgagaaacatcaacttcagcctgagcgaggccctgcacgcccagagcctgaccaacatgatcctggacgacgagggcgtgctgggcagcatcgagaacagcttccagaagttccacgccttcctggacctgctgaaggacgccggcctgggccagctggccaccatggccggcatcgaccagagcgacttccagctgctgggccacccccagatgaccagcaccgtgagcaacccccccaaggaggagaagaaggccctggaggacgagaagcccgagcccaagcagaacgccctgggccagatgcagaacatccagttccagaagatcaccggcgacgccagaatccccctgcccctggacagcttccccgtgcccgtgagcacccccgagggcctgggcaccagcagcaacaacctgggcgtgcccgccaccgagcagagacaggagagcttcgagggcttcatcgccagaatgtgcagccccagccccgacgccaccagcggcaccggcagccagagaaaggaggaggagctgagcagaaacagcagaagcagcagcgagaagaagaccaagaccgagagccactag

SEQ ID NO: 12007 - DNA, 915 bp, synthetic construct
  source 1..915: mol_type = other DNA; note = Synthetic coding sequence
atgaacttcagcgaggtgttcaagctgagcagcctgctgtgcaagttcagccccgacggcaagtacctggccagctgcgtgcagtacagactggtggtgagagacgtgaacaccctgcagatcctgcagctgtacacctgcctggaccagatccagcacatcgagtggagcgccgacagcctgttcatcctgtgcgccatgtacaagagaggcctggtgcaggtgtggagcctggagcagcccgagtggcactgcaagatcgacgagggcagcgccggcctggtggccagctgctggagccccgacggcagacacatcctgaacaccaccgagttccacctgagaatcaccgtgtggagcctgtgcaccaagagcgtgagctacatcaagtaccccaaggcctgcctgcagggcatcaccttcaccagagacggcagatacatggccctggccgagagaagagactgcaaggactacgtgagcatcttcgtgtgcagcgactggcagctgctgagacacttcgacaccgacacccaggacctgaccggcatcgagtgggcccccaacggctgcgtgctggccgtgtgggacacctgcctggaggtgagaatcctgaaccacgtgacctggaagatgatcaccgagttcggccaccccgccgccatcaacgaccccaagatcgtggtgtacaaggaggccgagaagagcccccagctgggcctgggctgcctgagcttccccccccccagagccggcgccggccccctgcccagcagcgagagcaagtacgagatcgccagcgtgcccgtgagcctgcagaccctgaagcccgtgaccgacagagccaaccccaagatcggcatcggcatgctggccttcagccccgacagctacttcctggccaccagaaactag

SEQ ID NO: 12008 - DNA, 483 bp, synthetic construct
  source 1..483: mol_type = other DNA; note = Synthetic coding sequence
atgaaggaggtgggcagacccagagaggtgagaggcagacccggcaagagcagaatccagaaggagctggccgacatcaccctggaccccccccccaactgcagcgccggccccaagggcgacaacatctacgagtggagaagcaccatcctgggcccccccggcagcgtgtacgagggcggcgtgttcttcctggacatcaccttcacccccgagtaccccttcaagccccccaaggtgaccttcagaaccagaatctaccactgcaacatcaacagccagggcgtgatctgcctggacatcctgaaggacaactggagccccgccctgaccatcagcaaggtgctgctgagcatctgcagcctgctgaccgactgcaaccccgccgaccccctggtgggcagcatcgccacccagtacatgaccaacagagccgagcacgacagaatggccagacagtggaccaagagatacgccacctag

SEQ ID NO: 12009 - DNA, 516 bp, synthetic construct
  source 1..516: mol_type = other DNA; note = Synthetic coding sequence
atgagcagcggcaacgccaagatcggccaccccgcccccaacttcaaggccaccgccgtgatgcccgacggccagttcaaggacatcagcctgagcgactacaagggcaagtacgtggtgttcttcttctaccccctggacttcaccttcgtgtgccccaccgagatcatcgccttcagcgacagagccgaggagttcaagaagctgaactgccaggtgatcggcgccagcgtggacagccacttctgccacctggcctgggtgaacacccccaagaagcagggcggcctgggccccatgaacatccccctggtgagcgaccccaagagaaccatcgcccaggactacggcgtgctgaaggccgacgagggcatcagcttcagaggcctgttcatcatcgacgacaagggcatcctgagacagatcaccgtgaacgacctgcccgtgggcagaagcgtggacgagaccctgagactggtgcaggccttccagttcaccgacaagcacggcgagtag

SEQ ID NO: 12010 - DNA, 603 bp, synthetic construct
  source 1..603: mol_type = other DNA; note = Synthetic coding sequence
gtgctgatcttcgcctgcctggtgcccggcttccccgccgtgatgagcagcagaggcccctgcaccctggagaccctgatcaaccccagccccagcgtggccgacgtgaagatctaccccgaggagatcacccccctgctgcccgccatcagcggcgagaagatcgccgaggaccagacctgcttcttcctgcagatcctgctgaagtacatggtgatccaggccgccagcctggagtggaagaacaaggagaaccaggacaccggcttcaagttcctgttcaccctgttcagaaagtactacctgccccacctgttccccagcttcaccaagctgaccaacatctacaagcccgtgctggacatcccccacctgagacccaagcccgtgtacatcaccaccaccagagacaacgagaacatctacagcaccaagatcccctacatggccgccagagtggtgttcatcaagtggatcgtgaccttcttcctggagaagaagtacctgaccgccacccagaacaccaagaacggcgtggacgtgctgcccaagatcatccaggtgtgccaccccagcagcttctacctgctgatgctggtgtag

SEQ ID NO: 12011 - DNA, 576 bp, synthetic construct
  source 1..576: mol_type = other DNA; note = Synthetic coding sequence
atgagcagcaccctgggcaagctgagcaaccaggtggaggagaccctgcccctgctgaagaagcccctgaagagagccatcaccaccctgatggccggcatcctgagactggtggtgcagtggccccccggcagactgcagaccgtgaccaagggcgtggagagcctgatctgcaccgactggatcagacacaagttcaccagaagcagaatccccgagaaggtgttccaggccagccccgaggaccacgagaagtacggcggcgacccccagaacccccacaagctgcacatcgtgaccagaatcaagagcaccagaagaagaccctactgggagaaggacatcatcaagatgctgggcctggagaaggcccacaccccccaggtgcacaagaacatccccagcgtgaacgccaagctgaaggtggtgaagcacctgatcagaatcaagcccctgaagctgccccagggcctgcccgccgaggagaacatgagcaacacctgcctgaagagcaccggcgagctggtggtgcagtggcacctgaagcccgtggagcagaaggcccacgagagctag

SEQ ID NO: 12012 - DNA, 483 bp, synthetic construct; identical to SEQ ID NO: 10977
  source 1..483: mol_type = other DNA; note = Synthetic coding sequence

SEQ ID NO: 12013 - DNA, 321 bp, synthetic construct
  source 1..321: mol_type = other DNA; note = Synthetic coding sequence
accttcctggagcagagcaagaccagattcaacaagaactacaagggcatgagcctgagcaagatcaccaccaccgtgggcctgaacatcggcaccgtggacgtgggcaaggccagactgatgttctgggacctgggcggccaggaggagctgcagagcctgtgggacaaggacaagaccaagtgcggcgacctgggcaccctgcacagcagcaaggtgagcgccagcttcagactgagagacctggccgccgaccaccacagaacccagaagtggcagagacccgacgtgggcaccgccggctggctgcccctgccctag

SEQ ID NO: 12014 - DNA, 1524 bp, synthetic construct
  source 1..1524: mol_type = other DNA; note = Synthetic coding sequence
atggccgagctgcagatgctgctggaggaggagatccccggcggcagaagagccctgttcgacagctacaccaacctggagagagtggccgactactgcgagaacaactacatccagagcgccgacaagcagagagccctggaggagaccaaggcctacaccacccagagcctggccagcgtggcctacctgatcaacaccctggccaacaacgtgctgcagatgctggacatccaggccagccagctgagaagaatggagagcagcatcaaccacatcagccagaccgtggacatccacaaggagaaggtggccagaagagagatcggcatcctgaccaccaacaagaacaccagcagaacccacaagatcatcgcccccgccaacctggagagacccgtgagatacatcagaaagcccatcgactacaccatcctggacgacatcggccacggcgtgaaggtgagcacccagaacatgaagatgggcggcctgcccagaaccaccccccccacccagaagccccccagcccccccatgagcggcaagggcaccctgggcagacacagcccctacagaaccctggagcccgtgagaccccccgtggtgcccaacgactacgtgcccagccccaccagaaacatggcccccagccagcagagccccgtgagaaccgccagcgtgaaccagagaaacagaacctacagcagcagcggcagcagcggcggcagccaccccagcagcagaagcagcagcagagagaacagcggcagcggcagcgtgggcgtgcccatcgccgtgcccacccccagcccccccagcgtgttccccgcccccgccggcagcgccggcaccccccccctgcccgccaccagcgccagcgcccccgcccccctggtgcccgccaccgtgcccagcagcaccgcccccgacgccgccgccggcggcgcccagaccctggccgacggcttcaccagccccaccccccccgtggtgagcagcaccccccccaccggccaccccgtgcagttctacagcatgaacagacccgccagcagacacaccccccccaccatcggcggcagcctgccctacagaagaccccccagcatcaccagccagaccagcctgcagaaccagatgaacggcggccccttctacagccagaaccccgtgagcgacaccccccccccccccccccccgtggaggagcccgtgttcgacgagagccccccccccccccccccccccgaggactacgaggaggaggaggccgccgtggtggagtacagcgacccctacgccgaggaggaccccccctgggcccccagaagctacctggagaaggtggtggccatctacgactacaccaaggacaaggaggacgagctgagcttccaggagggcgccatcatctacgtgatcaagaagaacgacgacggctggtacgagggcgtgatgaacggcgtgaccggcctgttccccggcaactacgtggagagcatcatgcactacagcgagtag

SEQ ID NO: 12015 - DNA, 303 bp, synthetic construct
  source 1..303: mol_type = other DNA; note = Synthetic coding sequence
atggccagcgccggcacccagcactacagcatcggcctgagacagaagaacagcttcaagcagagcggccccagcggcaccgtgcccgccaccccccccgagaagcccagcgagggcagagtgtggccccaggcccaccagcaggtgaagcccatctggaagctggagaagaagcaggtggagaccctgagcgccggcctgggccccggcctgctgggcgtgcccccccagcccgcctacttcttctgccccagcaccctgtgcagcagcggcaccaccgccgtgatcgccggccacagctag

SEQ ID NO: 12016 - DNA, 1212 bp, synthetic construct
  source 1..1212: mol_type = other DNA; note = Synthetic coding sequence
atggccagcgccctgagaccccccagagtgcccaagcccaagggcgtgctgcccagccactactacgagagcttcctggagaagaagggcccctgcgacagagactacaagaagttctgggccggcctgcagggcctgaccatctacttctacaacagcaacagagacttccagcacgtggagaagctgaacctgggcgccttcgagaagctgaccgacgagatcccctggggcagcagcagagaccccggcacccacttcagcctgatcctgagagaccaggagatcaagttcaaggtggagaccctggagtgcagagagatgtggaagggcttcatcctgaccgtggtggagctgagagtgcccaccgacctgaccctgctgcccggccacctgtacatgatgagcgaggtgctggccaaggaggaggccagaagagccctggagacccccagctgcttcctgaaggtgagcagactggaggcccagctgctgctggagagataccccgagtgcggcaacctgctgctgagacccagcggcgacggcgccgacggcgtgagcgtgaccaccagacagatgcacaacggcacccacgtggtgagacactacaaggtgaagagagagggccccaagtacgtgatcgacgtggagcagcccttcagctgcaccagcctggacgccgtggtgaactacttcgtgagccacaccaagaaggccctggtgcccttcctgctggacgaggactacgagaaggtgctgggctacgtggaggccgacaaggagaacggcgagaacgtgtgggtggcccccagcgcccccggccccggccccgccccctgcaccggcggccccaagcccctgagccccgccagcagccaggacaagctgccccccctgccccccctgcccaaccaggaggagaactacgtgacccccatcggcgacggccccgccgtggactacgagaaccaggacgtggccagcagcagctggcccgtgatcctgaagcccaagaagctgcccaagccccccgccaagctgcccaagccccccgtgggccccaagcccgagcccaaggtgttcaacggcggcctgggcagaaagctgcccgtgagcagcgcccagcccctgttccccaccgccggcctggccgacatgaccgccgagctgcagaagaagctggagaagagaagagccctggagcactag

SEQ ID NO: 12017 - DNA, 1551 bp, synthetic construct
  source 1..1551: mol_type = other DNA; note = Synthetic coding sequence
atgctgagaagaggcagccaggccctgagaagattcagcaccggcagagtgtacttcaagaacaagctgaagctggccctgatcggccagagcctgttcggccaggaggtgtacagccacctgagaaaggagggccacagagtggtgggcgtgttcaccgtgcccgacaaggacggcaaggccgaccccctggccctggccgccgagaaggacggcacccccgtgttcaagctgcccaagtggagagtgaagggcaagaccatcaaggaggtggccgaggcctacagaagcgtgggcgccgagctgaacgtgctgcccttctgcacccagttcatccccatggacatcatcgacagccccaagcacggcagcatcatctaccaccccagcatcctgcccagacacagaggcgccagcgccatcaactggaccctgatcatgggcgacaagaaggccggcttcagcgtgttctgggccgacgacggcctggacaccggccccatcctgctgcagagaagctgcgacgtggagcccaacgacaccgtggacgccctgtacaacagattcctgttccccgagggcatcaaggccatggtggaggccgtgcagctgatcgccgacggcaaggcccccagaatcccccagcccgaggagggcgccacctacgagggcatccagaagaaggagaacgccgagatcagctgggaccagagcgccgaggtgctgcacaactggatcagaggccacgacaaggtgcccggcgcctggaccgagatcaacggccagatggtgaccttctacggcagcaccctgctgaacagcagcgtgccccccggcgagcccctggagatcaagggcgccaagaagcccggcctggtgaccaagaacggcctggtgctgttcggcaacgacggcaaggccctgaccgtgagaaacctgcagttcgaggacggcaagatgatccccgccagccagtacttcagcaccggcgagaccagcgtggtggagctgaccgccgaggaggtgaaggtggccgagaccatcaaggtgatctgggccggcatcctgagcaacgtgcccatcatcgaggacagcaccgacttcttcaagagcggcgccagcagcatggacgtggccagactggtggaggagatcagacagaagtgcggcggcctgcagctgcagaacgaggacgtgtacatggccaccaagttcgagggcttcatccagaaggtggtgagaaagctgagaggcgaggaccaggaggtggagctggtggtggactacatcagcaaggaggtgaacgagatcatggtgaagatgccctaccagtgcttcatcaacggccagttcaccgacgccgacgacggcaagacctacgacaccatcaaccccaccgacggcagcaccatctgcaaggtgagctacgccagcctggccgacgtggacaaggccgtggccgccgccaaggacgccttcgagaacggcgagtggggcagaatgaacgccagagagagaggcagactgatgtacagcatgagaatgaactag

SEQ ID NO: 12018 - DNA, 1581 bp, synthetic construct
  source 1..1581: mol_type = other DNA; note = Synthetic coding sequence
atggaggagatccccgcccaggaggccgccggcagccccagagtgcagttccagagcctggagacccagagcgagtgcctgagccccgagccccagttcgtgcaggacaccgacatggagcagggcctgaccggcggcttccccatcagcaagcccgacggcatcagccagctggagcaggacctgcaggtgttcgacctggagaccaagaccagagaggtgctgagagacgactgcagcgacggcgagaccagagaggagaacaagctgctgatccccaagcagaagatcagcgaggaggtgcacagctacaaggtgagagtgggcagactgaagcacgacatcacccaggtgcccgagaccagagaggtgtacaagagcgaggacagactggagagactgcaggagatcctgagaaagttcctgtacctggagagagagttcagacagatcaccatcagcaaggagaccttcaccagcgagaagaacaacgagtgccacgagcccgagaagagcttcagcctggacagcaccatcgacgccgaccagagagtgctgagaatccagaacaccgacgacaacgacaagtacgacatgagcttcaaccagaacagcgccagcggcaagcacgagcacctgaacctgaccgaggacttccagagcagcgagtgcaaggagagcctgatggacctgagccacctgaacaagtgggagagcatccccaacaccgagaagagctacaagtgcgacgtgtgcggcaagatcttccaccagagcagcgccctgaccagacaccagagaatccacaccagagagaagccctacaagtgcaaggagtgcgagaagagcttcagccagagcagcagcctgagcagacacaagagaatccacaccagagagaagccctacaagtgcgaggccagcgacaagagctgcgaggccagcgacaagagctgcagccccagcagcggcatcatccagcacaagaagatccacaccagagccaagagctacaagtgcagcagctgcgagagagtgttcagcagaagcgtgcacctgacccagcaccagaagatccacaaggagatgccctgcaagtgcaccgtgtgcggcagcgacttctgccacaccagctacctgctggagcaccagagagtgcaccacgaggagaaggcctacgagtacgacgagtacggcctggcctacatcaagcagcagggcatccacttcagagagaagccctacacctgcagcgagtgcggcaaggacttcagactgaacagccacctgatccagcaccagagaatccacaccggcgagaaggcccacgagtgcaacgagtgcggcaaggccttcagccagaccagctgcctgatccagcaccacaagatgcacagaaaggagaagagctacgagtgcaacgagtacgagggcagcttcagccacagcagcgacctgatcctgcagcaggaggtgctgaccagacagaaggccttcgactgcgacgtgtgggagaagaacagcagccagagagcccacctggtgcagcaccagagcatccacaccaaggagaacagctag

SEQ ID NO: 12019 - DNA, 603 bp, synthetic construct; identical to SEQ ID NO: 12010
  source 1..603: mol_type = other DNA; note = Synthetic coding sequence

SEQ ID NO: 12020 - DNA, 540 bp, synthetic construct
  source 1..540: mol_type = other DNA; note = Synthetic coding sequence
aacatcaagcccggcgagggcctgggcatgtacatcaagagcacctacgacggcctgcacgtgatcaccggcaccaccgagaacgtgggctggcagctgaagaacctggtgaagaagctgagagagaaccccaccggcgtggtgctgctgctgaagaagagacccaccggcagcttcaacttcacccccgcccccctgaagaacctgagatggaagccccccctggtgcagaccagccccccccccgccaccacccagagccccgagagcaccatggacaccagcctgaagaaggagaagagcgccatcctggacctgtacatcccccccccccccgccgtgccctacagccccagagacgagaacggcagcttcgtgtacggcggcagcagcaagtgcaagcagcccctgcccggccccaagggcagcgagagccccaacagcttcctggaccaggagagcagaagaagaagattcaccatcgccgacagcgaccagctgcccggctacagcgtggagaccaacatcctgcccacctag

SEQ ID NO: 12021 - DNA, 1368 bp, synthetic construct
  source 1..1368: mol_type = other DNA; note = Synthetic coding sequence
atgatgggcgcccccaacctgatcgccgacagcatggagtacggcctgagctacagcgtgatcagctacctgaagaagctgagccagcaggccaagatcgagagcgacagagtgatcggcagcgtgggcaagaaggtggtgcaggagaccggcatcaaggtgagaagcagaagccacggcctgagcatggcctacagaaaggacttccagcagctgctgcagggcatcagcgaggacgtgccccacagactgctggacctgaacatgaaggagtacaccggcttccaggtggccctgctgaacaaggacctgaagccccagaccttcagaaacgcctacgacatccccagaagaaacctgctggaccacctgaccagaatgagaagcaacctgctgaagagcaccagaagattcctgaagggccaggacgaggaccaggtgcacagcgtgcccatcgcccagatgggcaactaccaggagtacctgaagcaggtgcccagccccctgagagagctggaccccgaccagcccagaagactgcacaccttcggcaaccccttcaagctggacaagaagggcatgatgatcgacgaggccgacgagttcgtggccggcccccagaacaagcacaagagacccggcgagcccaacatgcagggcatccccaagagaagaagatgcatgagccccctgctgagaggcagacagcagaaccccgtggtgaacaaccacatcggcggcaagggcccccccgcccccaccacccaggcccagcccgacctgatcaagcccctgcccctgcacaagatcagcgagaccaccaacgacagcatcatccacgacgtggtggagaaccacgtggccgaccagctgagcagcgacatcacccccaacgccatggacaccgagttcagcgccagcagccccgccagcctgctggagagacccaccaaccacatggaggccctgggccacgaccacctgggcaccaacgacctgaccgtgggcggcttcctggagaaccacgaggagcccagagacaaggagcagtgcgccgaggagaacatccccgccagcagcctgaacaagggcaagaagctgatgcactgcagaagccacgaggaggtgaacaccgagctgaaggcccagatcatgaaggagatcagaaagcccggcagaaagtacgagagaatcttcaccctgctgaagcacgtgcagggcagcctgcagaccagactgatcttcctgcagaacgtgatcaaggaggccagcagattcaagaagagaatgctgatcgagcagctggagaacttcctggacgagatccacagaagagccaaccagatcaaccacatcaacagcaactag

SEQ ID NO: 12022 - DNA, 1467 bp, synthetic construct
  source 1..1467: mol_type = other DNA; note = Synthetic coding sequence
ctggactgcggccccagactgcccgtggaggtgggccccagcctgagcagccccagcagcggctgcggcgagggcagcatcagcgtgggcgagaacgtgagcgacgtggcccccacccagccctggtggcccaacacccccggcgacagcgtgagcgaggagctgggccccggcagaagcggcgacaccgaggacctgagccccaactggcccctgaacagccaggaggacaccgccgcccagagcagccccggcagaggcgaggaggccgaggccagcgccgccgaggcccagggcggcgagcaggcctacctggccggcctggccggccagtaccacctggagagataccccgacagctacgagagcatgagcgagccccccatcgcccacctgctgagacccgtgctgcccagagccttcgccttccccgtggacccccaggtgcagagcgccgccgacgagaccgccgtgcagctgagcgagctgctgaccctgcccgtgctgatgaagagaagcatcaccgcccccctggccgcccacatcagcctggtgaacaaggccgccgtggactacttcttcgtggagctgcacctggaggcccactacgaggccctgagacacttcctgctgatggaggacggcgagttcgcccagagcctgagcgacctgctgttcgagaagctgggcgccggccagacccccggcgagctgctgaaccccctggtgctgaacagcgtgctgagcaaggccctgcagtgcagcctgcacggcgacaccccccacgccagcaacctgagcctggccctgaagtacctgcccgaggtgttcgcccccaacgcccccgacgtgctgagctgcctggagctgagatacaaggtggactggcccctgaacatcgtgatcaccgagggctgcgtgagcaagtacagcggcgtgttcagcttcctgctgcagctgaagctgatgatgtgggccctgaaggacgtgtgcttccacctgaagagaaccgtgcccagcgccgccgccgtgcaggccagagacgccgccttcagagagggccaccccggcctgcacagacagcccgaccccgccagacacctggtgagagtgcagggccaggtgggccacagaggcagacccggcggcgaccccgcctgcgccagaagagtgcccgcccagggcagactgcaggccgcccccgtgatgaacgtgatccacagcatcttcagcctggtgctgaagttcagaagccagctgatcagccaggcctggggcccccccggcggccccagaggcgccgagcaccccaacttcgccctgatgcagcagagctacaacaccttcaagtactacagccacttcctgttcaaggtggtgaccaagctggtgaacagaggctaccagccccacctggaggacttcctgctgagaatcaacttcaacaactactaccaggacgcctag

SEQ ID NO: 12023 - DNA, 3819 bp, synthetic construct
  source 1..3819: mol_type = other DNA; note = Synthetic coding sequence
atggccaacgacagccccgccaagagcctggtggacatcgacctgagcagcctgagagaccccgccggcatcttcgagctggtggaggtggtgggcaacggcacctacggccaggtgtacaagggcagacacgtgaagaccggccagctggccgccatcaaggtgatggacgtgaccgaggacgaggaggaggagatcaagctggagatcaacatgctgaagaagtacagccaccacagaaacatcgccacctactacggcgccttcatcaagaagagcccccccggccacgacgaccagctgtggctggtgatggagttctgcggcgccggcagcatcaccgacctggtgaagaacaccaagggcaacaccctgaaggaggactggatcgcctacatcagcagagagatcctgagaggcctggcccacctgcacatccaccacgtgatccacagagacatcaagggccagaacgtgctgctgaccgagaacgccgaggtgaagctggtggacttcggcgtgagcgcccagctggacagaaccgtgggcagaagaaacaccttcatcggcaccccctactggatggcccccgaggtgatcgcctgcgacgagaaccccgacgccacctacgactacagaagcgacctgtggagctgcggcatcaccgccatcgagatggccgagggcgccccccccctgtgcgacatgcaccccatgagagccctgttcctgatccccagaaaccccccccccagactgaagagcaagaagtggagcaagaagttcttcagcttcatcgagggctgcctggtgaagaactacatgcagagacccagcaccgagcagctgctgaagcaccccttcatcagagaccagcccaacgagagacaggtgagaatccagctgaaggaccacatcgacagaaccagaaagaagagaggcgagaaggacgagaccgagtacgagtacagcggcagcgaggaggaggaggaggaggtgcccgagcaggagggcgagcccagcagcatcgtgaacgtgcccggcgagagcaccctgagaagagacttcctgagactgcagcaggagaacaaggagagaagcgaggccctgagaagacagcagctgctgcaggagcagcagctgagagagcaggaggagtacaagagacagctgctggccgagagacagaagagaatcgagcagcagaaggagcagagaagaagactggaggagcagcagagaagagagagagaggccagaagacagcaggagagagagcagagaagaagagagcaggaggagaagagaagactggaggagctggagagaagaagaaaggaggaggaggagagaagaagagccgaggaggagaagagaagagtggagagagagcaggagtacatcagaagacagctggaggaggagcagagacacctggaggtgctgcagcagcagctgctgcaggagcaggccatgctgctgcacgaccacagaagaccccacccccagcacagccagcagcccccccccccccagcaggagagaagcaagcccagcttccacgcccccgagcccaaggcccactacgagcccgccgacagagccagagaggtggaggacagattcagaaagaccaaccacagcagccccgaggcccagagcaagcagaccggcagagtgctggagccccccgtgcccagcagaagcgagagcttcagcaacggcaacagcgagagcgtgcaccccgccctgcagagacccgccgagccccaggtgcccgtgagaaccaccagcagaagccccgtgctgagcagaagagacagccccctgcagggcagcggccagcagaacagccaggccggccagagaaacagcaccagcatcgagcccagactgctgtgggagagagtggagaagctggtgcccagacccggcagcggcagcagcagcggcagcagcaacagcggcagccagcccggcagccaccccggcagccagagcggcagcggcgagagattcagagtgagaagcagcagcaagagcgagggcagccccagccagagactggagaacgccgtgaagaagcccgaggacaagaaggaggtgttcagacccctgaagcccgccgacctgaccgccctggccaaggagctgagagccgtggaggacgtgagacccccccacaaggtgaccgactacagcagcagcagcgaggagagcggcaccaccgacgaggaggacgacgacgtggagcaggagggcgccgacgagagcaccagcggccccgaggacaccagagccgccagcagcctgaacctgagcaacggcgagaccgagagcgtgaagaccatgatcgtgcacgacgacgtggagagcgagcccgccatgacccccagcaaggagggcaccctgatcgtgagacagagcaccgtggaccagaagagagccagccaccacgagagcaacggcttcgccggcagaatccacctgctgcccgacctgctgcagcagagccacagcagcagcaccagcagcaccagcagcagccccagcagcagccagcccacccccaccatgagcccccagaccccccaggacaagctgaccgccaacgagacccagagcgccagcagcaccctgcagaagcacaagagcagcagcagcttcacccccttcatcgaccccagactgctgcagatcagccccagcagcggcaccaccgtgaccagcgtggtgggcttcagctgcgacggcatgagacccgaggccatcagacaggaccccaccagaaagggcagcgtggtgaacgtgaaccccaccaacaccagaccccagagcgacacccccgagatcagaaagtacaagaagagattcaacagcgagatcctgtgcgccgccctgtggggcgtgaacctgctggtgggcaccgagagcggcctgatgctgctggacagaagcggccagggcaaggtgtaccccctgatcaacagaagaagattccagcagatggacgtgctggagggcctgaacgtgctggtgaccatcagcggcaagaaggacaagctgagagtgtactacctgagctggctgagaaacaagatcctgcacaacgaccccgaggtggagaagaagcagggctggaccaccgtgggcgacctggagggctgcgtgcactacaaggtggtgaagtacgagagaatcaagttcctggtgatcgccctgaagagcagcgtggaggtgtacgcctgggcccccaagccctaccacaagttcatggccttcaagagcttcggcgagctggtgcacaagcccctgctggtggacctgaccgtggaggagggccagagactgaaggtgatctacggcagctgcgccggcttccacgccgtggacgtggacagcggcagcgtgtacgacatctacctgcccacccacatccagtgcagcatcaagccccacgccatcatcatcctgcccaacaccgacggcatggagctgctggtgtgctacgaggacgagggcgtgtacgtgaacacctacggcagaatcaccaaggacgtggtgctgcagtggggcgagatgcccaccagcgtggcctacatcagaagcaaccagaccatgggctggggcgagaaggccatcgagatcagaagcgtggagaccggccacctggacggcgtgttcatgcacaagagagcccagagactgaagttcctgtgcgagagaaacgacaaggtgttcttcgccagcgtgagaagcggcggcagcagccaggtgtacttcatgaccctgggcagaaccagcctgctgagctggtag

SEQ ID NO: 12024 - DNA, 363 bp, synthetic construct
  source 1..363: mol_type = other DNA; note = Synthetic coding sequence
gccctgcagatcagcgagaacctgttcagcaacaaggtgctgaacgccctgaagcccgagaaggacgtggacggcgtgaccgacatcaacctgggcaagctggtgagaggcgacgcccacgagtgcttcgtgagccccgtggccaaggccgtgatcgagctgctggagaagagcgtgggcgtgaacctggacggcaagaagatcctggtggtgggcgcccacggcagcctggaggccgccctgcagtgcctgttccagagaaagggcagcatgaccatgagcatccagtggaagaccagacagctgcagagcaagaccgagagcagaagcgtgaccagactggagtgcagaagagtgatctag

SEQ ID NO: 12025 - DNA, 1866 bp, synthetic construct
  source 1..1866: mol_type = other DNA; note = Synthetic coding sequence
atggtgagcatcctgagcagcttcgagagcagactgatgaagctggagaacagcatcatccccgtgcacaagcagaccgagaacctgcagagactgcaggagaacgtggagaagaccctgagctgcctggaccacgtgatcagctactaccacgtggccagcgacaccgagaagatcatcagagagggccccaccggcagactggaggagtacctgggcagcatggccaagatccagaaggccgtggagtacttccaggacaacagccccgacagccccgagctgaacaaggtgaagctgctgttcgagagaggcaaggaggccctggagagcgagttcagaagcctgatgaccagacacagcaaggtggtgagccccgtgctgatcctggacctgatcagcggcgacgacgacctggaggcccaggaggacgtgaccctggagcacctgcccgagagcgtgctgcaggacgtgatcagaatcagcagatggctggtggagtacggcagaaaccaggacttcatgaacgtgtactaccagatcagaagcagccagctggacagaagcatcaagggcctgaaggagcacttccacaagagcagcagcagcagcggcgtgccctacagccccgccatccccaacaagagaaaggacacccccaccaagaagcccgtgaagagacccggcaccatcagaaaggcccagaacctgctgaagcagtacagccagcacggcctggacggcaagaagggcggcagcaacctgatccccctggagggcagagacgacatgctggacgtggagaccgacgcctacatccactgcgtgagcgccttcgtgaagctggcccagagcgagtaccagctgctggccgacatcatccccgagcaccaccagaagaagaccttcgacagcctgatccaggacgccctggacggcctgatgctggagggcgagaacatcgtgagcgccgccagaaaggccatcgtgagacacgacttcagcaccgtgctgaccgtgttccccatcctgagacacctgaagcagaccaagcccgagttcgaccaggtgctgcagggcaccgccgccagcaccaagaacaagctgcccggcctgatcaccagcatggagaccatcggcgccaaggccctggaggacttcgccgacaacatcaagaacgaccccgacaaggagtacaacatgcccaaggacggcaccgtgcacgagctgaccagcaacgccatcctgttcctgcagcagctgctggacttccaggagaccgccggcgccatgctggccagccagggcaaggtgctgggcaacctgcagctgaacctgctgagcaagagcaaggtgtacgaggaccccgccctgagcgccatcttcctgcacaacaactacaactacatcctgaagagcctggagaagagcgagctgatccagctggtggccgtgacccagaagaccgccgagagaagctacagagagcacatcgagcagcagatccagacctaccagagaagctggctgaaggtgaccgactacatcgccgagaagaacctgcccgtgttccagcccggcgtgaagctgagagacaaggagagacagatcatcaaggagagattcaagggcttcaacgacggcctggaggagctgtgcaagatccagaaggcctgggccatccccgacaccgagcagagagacagaatcagacaggcccagaagaccatcgtgaaggagacctacggcgccttcctgcagaagttcggcagcgtgcccttcaccaagaaccccgagaagtacatcaagtacggcgtggagcaggtgggcgacatgatcgacagactgttcgacaccagcgcctag

SEQ ID NO: 12026 - DNA, 1344 bp, synthetic construct
  source 1..1344: mol_type = other DNA; note = Synthetic coding sequence
atggacttcctgctgggcaaccccttcagcagccccgtgggccagagaatcgagaaggccaccgacggcagcctgcagagcgaggactgggccctgaacatggagatctgcgacatcatcaacgagaccgaggagggccccaaggacgccctgagagccgtgaagaagagaatcgtgggcaacaagaacttccacgaggtgatgctggccctgaccgtgctggagacctgcgtgaagaactgcggccacagattccacgtgctggtggccagccaggacttcgtggagagcgtgctggtgagaaccatcctgcccaagaacaacccccccaccatcgtgcacgacaaggtgctgaacctgatccagaccgtgttcaacagcgagacccagagcggccaggacagcgtgggcaccgacagcagccagcaggaggacagcggccagcacgccgcccccctgcccgccccccccatcctgagcggcgacacccccatcgcccccacccccgagcagatcggcaagctgagaagcgagctggagatggtgagcggcaacgtgagagtgatgagcgagatgctgaccgagctggtgcccacccaggccgagcccgccgacctggagctgctgcaggagctgaacagaacctgcagagccatgcagcagagagtgctggagctgatcccccagatcgccaacgagcagctgaccgaggagctgctgatcgtgaacgacaacctgaacaacgtgttcctgagacacgagagattcgagagattcagaaccggccagaccaccaaggcccccagcgaggccgagcccgccgccgacctgatcgacatgggccccgaccccgccgccaccggcaacctgagcagccagctggccggcatgaacctgggcagcagcagcgtgagagccggcctgcagagcctggaggccagcggcagactggaggacgagttcgacatgttcgccctgaccagaggcagcagcctggccgaccagagaaaggaggtgaagtacgaggccccccaggccaccgacggcctggccggcgccctggacgccagacagcagagcaccggcgccatccccgtgacccaggcctgcctgatggaggacatcgagcagtggctgagcaccgacgtgggcaacgacgccgaggagcccaagggcgtgaccagcgaggagttcgacaagttcctggaggagagagccaaggccgccgacagactgcccaacctgagcagccccagcgccgagggcccccccggcccccccagcggccccgcccccagaaagaagacccaggagaaggacgacgacatgctgttcgccctgtag

SEQ ID NO: 12027 - DNA, 2103 bp, synthetic construct
  source 1..2103: mol_type = other DNA; note = Synthetic coding sequence
atggccaccatgatcccccccgtgaagctgaagtggctggagcacctgaacagcagctggatcaccgaggacagcgagagcatcgccaccagagagggcgtggccgtgctgtacagcaagctggtgagcaacaaggaggtggtgcccctgccccagcaggtgctgtgcctgaagggcccccagctgcccgacttcgagagagagagcctgagcagcgacgagcaggaccactacctggacgccctgctgagcagccagctggccctggccaagatggtgtgcagcgacagccccttcgccggcgccctgagaaagagactgctggtgctgcagagagtgttctacgccctgagcaacaagtaccacgacaagggcaaggtgaagcagcagcagcacagccccgagagcagcagcggcagcgccgacgtgcacagcgtgagcgagagacccagaagcagcaccgacgccctgatcgagatgggcgtgagaaccggcctgagcctgctgttcgccctgctgagacagagctggatgatgcccgtgagcggccccggcctgagcctgtgcaacgacgtgatccacaccgccatcgaggtggtgagcagcctgccccccctgagcctggccaacgagagcaagatcccccccatgggcctggactgcctgagccaggtgaccaccttcctgaagggcgtgaccatccccaacagcggcgccgacaccctgggcagaagactggccagcgagctgctgctgggcctggccgcccagagaggcagcctgagatacctgctggagtggatcgagatggccctgggcgccagcgccgtggtgcacaccatggagaagggcaagctgctgagcagccaggagggcatgatcagcttcgactgcttcatgaccatcctgatgcagatgagaagaagcctgatcagcgagaaccaggacagcgccgacgtggacccccaggagcacagcttcaccagaaccatcgacgaggaggccgagatggaggagcaggccgagagagacagagaggagggccaccccgagcccgaggacgaggaggaggagagagagcacgaggtgatgaccgccggcaagatcttccagtgcttcctgagcgccagagaggtggccagaagcagagacagagacagaatgaacagcggcgccggcagcggcgccagagccgacgacccccccccccagagccagcaggagagaagagtgagcaccgacctgcccgagggccaggacgtgtacaccgccgcctgcaacagcgtgatccacagatgcgccctgctgatcctgggcgtgagccccgtgatcgacgagctgcagaagagaagagaggagggccagctgcagcagcccagcaccagcgccagcgagggcggcggcctgatgaccagaagcgagagcctgaccgccgagagcagactggtgcacaccagccccaactacagactgatcaagagcagaagcgagagcgacctgagccagcccgagagcgacgaggagggctacgccctgagcggcagaagaaacgtggacctggacctggccgccagccacagaaagagaggccccatgcacagccagctggagagcctgagcgacagctgggccagactgaagcacagcagagactggctgtgcaacagcagctacagcttcgagagcgacttcgacctgaccaagagcctgggcgtgcacaccctgatcgagaacgtggtgagcttcgtgagcggcgacgtgggcaacgcccccggcttcaaggagcccgaggagagcatgagcaccagcccccaggccagcatcatcgccatggagcagcagcagctgagagccgagctgagactggaggccctgcaccagatcctggtgctgctgagcggcatggaggagaagggcagcatcagcctggccggcagcagactgagcagcggcttccagagcagcaccctgctgaccagcgtgagactgcagttcctggccggctgcttcggcctgggcaccgtgggccacaccggcggcaagggcgagagcggcagactgcaccactaccaggacggcatcagagccgccagaggctactag

SEQ ID NO: 12028 - DNA, 537 bp, synthetic construct
  source 1..537: mol_type = other DNA; note = Synthetic coding sequence
atggccgacagagccgccgccgagagagcctgcaaggaccccaaccccatcatcgacggcagaaaggccaacgtgaacctggcctacctgggcgccaagcccagaatcatgcagcccggcttcgccttcggcgtgcagcagctgcaccccgccctgatccagagacccttcggcatccccgcccactacgtgtacccccaggccttcgtgcagcccggcgtggtgatcccccacgtgcagcccaccgccgccgccgccagcaccaccccctacatcgactacaccggcgccgcctacgcccagtacagcgccgccgccgccgccgccgccgccgccgccgcctacgaccagtacccctacgccgccagccccgccgccgccggctacgtgaccgccggcggctacggctacgccgtgcagcagcccatcaccgccgccgcccccggcaccgccgccgccgccgccgccgccgccgccgccgccgccgccttcggccagtaccagccccagcagctgcagaccgacagaatgcagtag

SEQ ID NO: 12029 - DNA, 579 bp, synthetic construct; identical to SEQ ID NO: 11225
  source 1..579: mol_type = other DNA; note = Synthetic coding sequence

SEQ ID NO: 12030 - DNA, 555 bp, synthetic construct
  source 1..555: mol_type = other DNA; note = Synthetic coding sequence
atgaacagaagccagcccggcctgctgagaaccgaccccgtgcccgaggagggcgaggacgtggccgccaccatcagcgccaccgagaccctgagcgaggaggagcaggaggagctgagaagagagctggccaaggtggaggaggagatccagaccctgagccaggtgctggccgccaaggagaagcacctggccgagatcaagagaaagctgggcatcaacagcctgcaggagctgaagcagaacatcgccaagggctggcaggacgtgaccgccaccagcgcctacaagaagaccagcgagaccctgagccaggccggccagaaggccagcgccgccttcagcagcgtgggcagcgtgatcaccaagaagctggaggacgtgaagaacagccccaccttcaagagcttcgaggagaaggtggagaacctgaagagcaaggtgggcggcaccaagcccgccggcggcgacttcggcgaggtgctgaacagcgccgccaacgccagcgccaccaccaccgagcccctgcccgagaagacccaggagagcctgtag

SEQ ID NO: 12031 - DNA, 1620 bp, synthetic construct; identical to SEQ ID NO: 10018
  source 1..1620: mol_type = other DNA; note = Synthetic coding sequence

SEQ ID NO: 12032 - DNA, 612 bp, synthetic construct
  source 1..612: mol_type = other DNA; note = Synthetic coding sequence
atggagccccccatggagcccagcggcggcgagcaggagcccggcgccgtgagattcctggacctgccctgggaggacgtgctgctgccccacgtgctgaacagagtgcccctgagacagctgctgagactgcagagagtgagcagagccttcagaagcctggtgcagctgcacctggccggcctgagaagattcgacgccgcccaggtgggcccccagatccccagagccgccctggccagactgctgagagacgccgagggcctgcaggagctggccctggccccctgccacgagtggctgagcgacgaggacctggtgcccgtgctggccagaaacccccagctgagaagcgtggccctgggcggctgcggccagctgagcagaagagccctgggcgccctggccgagggctgccccagactgcagagactgagcctggcccactgcgactgggtggacggcctggccctgagaggcctggccgacagatgccccgccctggaggagctggacctgaccgcctgcagacagctgaaggacgaggccatcgtgtacctggcccagagaagaggcgccggcctgagaagcctgagcctggccgtgaactag

SEQ ID NO: 12033 - DNA, 1824 bp, synthetic construct
  source 1..1824: mol_type = other DNA; note = Synthetic coding sequence
atggccagaggcctgggcaaggccagcggcttccccgccggccccagcggcgccgagctgcccgccagcggcagaagaagaggccccctgatcagcctgttccccgccgtgctggccagcgaggccgccatgagctaccccgccgacgactacgagagcgaggccgcctacgacccctacgcctaccccagcgactacgacatgcacaccggcgaccccaagcaggacctggcctacgagagacagtacgagcagcagacctaccaggtgatccccgaggtgatcaagaacttcatccagtacttccacaagaccgtgagcgacctgatcgaccagaaggtgtacgagctgcaggccagcagagtgagcagcgacgtgatcgaccagaaggtgtacgagatccaggacatctacgagaacagctggaccaagctgaccgagagattcttcaagaacaccccctggcccgaggccgaggccatcgccccccaggtgggcaacgacgccgtgttcctgatcctgtacaaggagctgtactacagacacatctacgccaaggtgagcggcggccccagcctggagcagagattcgagagctactacaactactgcaacctgttcaactacatcctgaacgccgacggccccgcccccctggagctgcccaaccagtggctgtgggacatcatcgacgagttcatctaccagttccagagcttcagccagtacagatgcaagaccgccaagaagagcgaggaggagatcgacttcctgagaagcaaccccaagatctggaacgtgcacagcgtgctgaacgtgctgcacagcctggtggacaagagcaacatcaacagacagctggaggtgtacaccagcggcggcgaccccgagagcgtggccggcgagtacggcagacacagcctgtacaagatgctgggctacttcagcctggtgggcctgctgagactgcacagcctgctgggcgactactaccaggccatcaaggtgctggagaacatcgagctgaacaagaagagcatgtacagcagagtgcccgagtgccaggtgaccacctactactacgtgggcttcgcctacctgatgatgagaagataccaggacgccatcagagtgttcgccaacatcctgctgtacatccagagaaccaagagcatgttccagagaaccacctacaagtacgagatgatcaacaagcagaacgagcagatgcacgccctgctggccatcgccctgaccatgtaccccatgagaatcgacgagagcatccacctgcagctgagagagaagtacggcgacaagatgctgagaatgcagaagggcgacccccaggtgtacgaggagctgttcagctacagctgccccaagttcctgagccccgtggtgcccaactacgacaacgtgcaccccaactaccacaaggagcccttcctgcagcagctgaaggtgttcagcgacgaggtgcagcagcaggcccagctgagcaccatcagaagcttcctgaagctgtacaccaccatgcccgtggccaagctggccggcttcctggacctgaccgagcaggagttcagaatccagctgctggtgttcaagcacaagatgaagaacctggtgtggaccagcggcatcagcgccctggacggcgagttccagagcgccagcgaggtggacttctacatcgacaaggacatgatccacatcgccgacaccaaggtggccagaagatacggcgacttcttcatcagacagatccacaagttcgaggagctgaacagaaccctgaagaagatgggccagagaccctag

SEQ ID NO: 12034 - DNA, 1308 bp, synthetic construct
  source 1..1308: mol_type = other DNA; note = Synthetic coding sequence
atggccgccagcagcctggagcagaagctgagcagactggaggccaagctgaagcaggagaacagagaggccagaagaagaatcgacctgaacctggacatcagcccccagagacccagacccatcatcgtgatcaccctgagccccgcccccgcccccagccagagagccgccctgcagctgcccctggccaacgacggcggcagcagaagccccagcagcgagagcagcccccagcaccccaccccccccgccagacccagacacatgctgggcctgcccagcaccctgttcacccccagaagcatggagagcatcgagatcgaccagaagctgcaggagatcatgaagcagaccggctacctgaccatcggcggccagagataccaggccgagatcaacgacctggagaacctgggcgagatgggcagcggcacctgcggccaggtgtggaagatgagattcagaaagaccggccacgtgatcgccgtgaagcagatgagaagaagcggcaacaaggaggagaacaagagaatcctgatggacctggacgtggtgctgaagagccacgactgcccctacatcgtgcagtgcttcggcaccttcatcaccaacaccgacgtgttcatcgccatggagctgatgggcacctgcgccgagaagctgaagaagagaatgcagggccccatccccgagagaatcctgggcaagatgaccgtggccatcgtgaaggccctgtactacctgaaggagaagcacggcgtgatccacagagacgtgaagcccagcaacatcctgctggacgagagaggccagatcaagctgtgcgacttcggcatcagcggcagactggtggacagcaaggccaagaccagaagcgccggctgcgccgcctacatggcccccgagagaatcgacccccccgaccccaccaagcccgactacgacatcagagccgacgtgtggagcctgggcatcagcctggtggagctggccaccggccagttcccctacaagaactgcaagaccgacttcgaggtgctgaccaaggtgctgcaggaggagccccccctgctgcccggccacatgggcttcagcggcgacttccagagcttcgtgaaggactgcctgaccaaggaccacagaaagagacccaagtacaacaagctgctggagcacagcttcatcaagagatacgagaccctggaggtggacgtggccagctggttcaaggacgtgatggccaagaccgagagccccagaaccagcggcgtgctgagccagccccacctgcccttcttcagatag

SEQ ID NO: 12035 - DNA, 3006 bp, synthetic construct
  source 1..3006: mol_type = other DNA; note = Synthetic coding sequence
atggccagcagccccctgcccggccccaacgacatcctgctggccagccccagcagcgccttccagcccgacaccctgagccagcccagacccggccacgccaacctgaagcccaaccaggtgggccaggtgatcctgtacggcatccccatcgtgagcctggtgatcgacggccaggagagactgtgcctggcccagatcagcaacaccctgctgaagaacttcagctacaacgagatccacaacagaagagtggccctgggcatcacctgcgtgcagtgcacccccgtgcagctggagatcctgagaagagccggcgccatgcccatcagcagcagaagatgcggcatgatcaccaagagagaggccgagagactgtgcaagagcttcctgggcgagaacagaccccccaagctgcccgacaacttcgccttcgacgtgagccacgagtgcgcctggggctgcagaggcagcttcatccccgccagatacaacagcagcagagccaagtgcatcaagtgcagctactgcaacatgtacttcagccccaacaagttcatcttccacagccacagaacccccgacgccaagtacacccagcccgacgccgccaacttcaacagctggagaagacacctgaagctgaccgacaagagcccccaggacgagctggtgttcgcctgggaggacgtgaaggccatgttcaacggcggcagcagaaagagagccctgccccagcccggcgcccaccccgcctgccaccccctgagcagcgtgaaggccgccgccgtggccgccgccgccgccgtggccggcggcggcggcctgctgggcccccacctgctgggcgccccccccccccccccccccccccccccccccctggccgagctggccggcgccccccacgcccaccacaagagacccagattcgacgacgacgacgacagcctgcaggaggccgccgtggtggccgccgccagcctgagcgccgccgccgccagcctgagcgtggccgccgccagcggcggcgccggcaccggcggcggcggcgccggcggcggctgcgtggccggcgtgggcgtgggcgccggcgccggcgccggcgccggcgccggcgccaagggccccagaagctaccccgtgatccccgtgcccagcaagggcagcttcggcggcgtgctgcagaagttccccggctgcggcggcctgttcccccacccctacaccttccccgccgccgccgccgccttcagcctgtgccacaagaaggaggacgccggcgccgccgccgaggccctgggcggcgccggcgccggcggcgccggcgccgcccccaaggccggcctgagcggcctgttctggcccgccggcagaaaggacgccttctacccccccttctgcatgttctggccccccagaacccccggcggcctgcccgtgcccacctacctgcagccccccccccagccccccagcgccctgggctgcgccctgggcgagagccccgccctgctgagacaggccttcctggacctggccgagcccggcggcgccgccggcagcgccgaggccgcccccccccccggccagcccccccaggtggtggccaacggccccggcagcggcccccccccccccgccggcggcgccggcagcagagacgccctgttcgagagcccccccggcggcagcggcggcgactgcagcgccggcagcaccccccccgccgacagcgtggccgccgccggcgccggcgccgccgccgccggcagcggccccgccggcagcagagtgcccgccccccaccacccccacctgctggagggcagaaaggccggcggcggcagctaccaccacagcagcgccttcagacccgtgggcggcaaggacgacgccgagagcctggccaagctgcacggcgccagcgccggcgccccccacagcgcccagacccacccccaccaccaccaccacccccaccaccaccaccaccaccaccaccccccccagccccccagccccctgctgctgctgcccccccagcccgacgagcccggcagcgagagacaccaccccgccccccccccccccccccccccccccccccccccccccctggcccagcacccccaccacagaggcctgctgagccccggcggcaccagctgctgctaccccagcgaggacagcagcgaggacgaggacgacgaggaggaggagcaggaggtggacgtggagggccacaagccccccgagggcgaggaggaggaggagggcagagaccccgacgacgacgaggaggaggacgaggagaccgaggtgctgctgggcgaccccctggtgggcggcggcagattcctgcagggcagaggccccagcgagaagggcagcagcagagacagagcccccgccgtggccggcgccttccccctgggcctgaacagcagcagactgctgcaggaggacggcaagctgggcgaccccggcagcgacctgcccccccccccccccccccccctggccccccagaaggccagcggcggcggcagcagcagccccggcagccccgtgcaccaccccagcctggaggagcagcccagctacaaggacagccagaagaccaaggagaacaaccaggtgatcgtgagcaccaaggacgacaacagcttcagcgacaagaacaaggagcacagcttcttcatcaccgacagcgacgccagcggcggcgacttctggagagagagaagcggcgagcacacccaggagaccaacagcccccacagcctgaagaaggacgtggagaacatgggcaaggaggagctgcagaaggtgctgttcgagcagatcgacctgagaagaagactggagcaggagttccaggtgctgaagggcaacaccagcttccccgtgttcaacaacttccaggaccagatgaagagagagctggcctacagagaggagatggtgcagcagctgcagatcgtgagctgcatcagcacctag

SEQ ID NO: 12036 - DNA, 198 bp, synthetic construct
  source 1..198: mol_type = other DNA; note = Synthetic coding sequence
atggccatggcccccagccccagcctggtgcaggtgtacaccagccccgccgccgtggccgtgtgggagtggcaggacggcctgggcacctggcacccctacagcgccaccgtgtgcagcttcatcgagcagcagttcgtgcagcagaagggccagagattcggcctgggcagcctggcccacagcatccccctgtag

SEQ ID NO: 12037 - DNA, 1041 bp, synthetic construct
  source 1..1041: mol_type = other DNA; note = Synthetic coding sequence
atgatcagcagacccgcctggctgtggggcgccgagatgggcgccaacgagcacggcgtgtgcatcgccaacgaggccatcaacaccagagagcccgccgccgagatcgaggccctgctgggcatggacctggtgagactgggcctggagagaggcgagaccgccaaggaggccctggacgtgatcgtgagcctgctggaggagcacggccagggcggcaactacttcgaggacgccaacagctgccacagcttccagagcgcctacctgatcgtggacagagacgaggcctgggtgctggagaccatcggcaagtactgggccgccgagaaggtgaccgagggcgtgagatgcatctgcagccagctgagcctgaccaccaagatggacgccgagcaccccgagctgagaagctacgcccagagccagggctggtggaccggcgagggcgagttcaacttcagcgaggtgttcagccccgtggaggaccacctggactgcggcgccggcaaggacagcctggagaagcaggaggagagcatcaccgtgcagaccatgatgaacaccctgagagacaaggccagcggcgtgtgcatcgacagcgagttcttcctgaccaccgccagcggcgtgagcgtgctgccccagaacagaagcagcccctgcatccactacttcaccggcacccccgaccccagcagaagcatcttcaagcccttcatcttcgtggacgacgtgaagctggtgcccaagacccagagcccctgcttcggcgacgacgaccccgccaagaaggagcccagattccaggagaagcccgacagaagacacgagctgtacaaggcccacgagtgggccagagccatcatcgagagcgaccaggagcagggcagaaagctgagaagcaccatgctggagctggagaagcagggcctggaggccatggaggagatcctgaccagcagcgagcccctggaccccgccgaggtgggcgacctgttctacgactgcgtggacaccgagatcaagttcttcaagtag

SEQ ID NO: 12038 - DNA, 1620 bp, synthetic construct; identical to SEQ ID NO: 10018
  source 1..1620: mol_type = other DNA; note = Synthetic coding sequence

SEQ ID NO: 12039 - DNA, 390 bp, synthetic construct; identical to SEQ ID NO: 10956
  source 1..390: mol_type = other DNA; note = Synthetic coding sequence

SEQ ID NO: 12040 - DNA, 1740 bp, synthetic construct
  source 1..1740: mol_type = other DNA; note = Synthetic coding sequence
atgagcgccgccaaccccgagacccccaacagcaccatcagcagagaggccagcacccagagcagcagcgccgccgccagccagggctgggtgctgcccgagggcaagatcgtgcccaacaccgtgttcgtgggcggcatcgacgccagaatggacgagaccgagatcggcagctgcttcggcagatacggcagcgtgaaggaggtgaagatcatcaccaacagaaccggcgtgagcaagggctacggcttcgtgagcttcgtgaacgacgtggacgtgcagaagatcgtgggcagccagatccacttccacggcaagaagctgaagctgggccccgccatcagaaagcagaagctgtgcgccagacacgtgcagcccagacccctggtggtgaacccccccccccccccccagttccagaacgtgtggagaaaccccaacaccgagacctacctgcagccccagatcacccccaaccccgtgacccagcacgtgcagagcgccgccaaccccgagacccccaacagcaccatcagcagagaggccagcacccagagcagcagcgccgccgccagccagggctgggtgctgcccgagggcaagatcgtgcccaacaccgtgttcgtgggcggcatcgacgccagaatggacgagaccgagatcggcagctgcttcggcagatacggcagcgtgaaggaggtgaagatcatcaccaacagaaccggcgtgagcaagggctacggcttcgtgagcttcgtgaacgacgtggacgtgcagaagatcgtgggcagccagatccacttccacggcaagaagctgaagctgggccccgccatcagaaagcagaagctgtgcgccagacacgtgcagcccagacccctggtggtgaacccccccccccccccccagttccagaacgtgtggagaaaccccaacaccgagacctacctgcagccccagatcacccccaaccccgtgacccagcacgtgcaggcctacagcgcctacccccacagccccggccaggtgatcaccggctgccagctgctggtgtacaactaccaggagtaccccacctaccccgacagcgccttccaggtgaccaccggctaccagctgcccgtgtacaactaccagcccttccccgcctaccccagaagccccttccaggtgaccgccggctaccagctgcccgtgtacaactaccaggccttccccgcctaccccaacagccccttccaggtggccaccggctaccagttccccgtgtacaactaccagcccttccccgcctaccccagcagccccttccaggtgaccgccggctaccagctgcccgtgtacaactaccaggccttccccgcctaccccaacagccccttccaggtggccaccggctaccagttccccgtgtacaactaccaggccttccccgcctaccccaacagccccgtgcaggtgaccaccggctaccagctgcccgtgtacaactaccaggccttccccgcctaccccagcagccccttccaggtgaccaccggctaccagctgcccgtgtacaactaccaggccttccccgcctaccccaacagcgccgtgcaggtgaccaccggctaccagttccacgtgtacaactaccagatgcccccccagtgccccgtgggcgagcagagaagaaacctgtggaccgaggcctacaagtggtggtacctggtgtgcctgatccagagaagagactag

SEQ ID NO: 12041 - DNA, 831 bp, synthetic construct
  source 1..831: mol_type = other DNA; note = Synthetic coding sequence
atgtacgccagctggaccaaggcctgcagaggcctggaggagctgatcaacctgaccagactgaacgtgagctacaaccacatcgacgacctgagcggcctgatccccctgcacggcatcaagcacaagctgagatacatcgacctgcacagcaacagaatcgacagcatccaccacctgctgcagtgcatggtgggcctgcacttcctgaccaacctgatcctggagaaggacggcgacgacaaccccgtgtgcagactgcccggctacagagccgtgatcctgcagaccctgccccagctgagaatcctggactgcaagaacatcttcggcgagcccgtgaacctgaccgagatcaacagcagccagctgcagtgcctggagggcctgctggacaacctggtgagcagcgacagccccctgaacatcagcgaggacgagatcatcgacagaatgcccgtgatcaccgcccccatcgacgagctggtgcccctggagcagttcgccagcacccccagcgacgccgtgctgaccagcttcatgagcgtgtgccagagcagcgagcccgagaagaacaaccacgagaacgacctgcagaacgagatcaagctgcagaagctggacgaccagatcctgcagctgctgaacgagaccagcaacagcatcgacaacgtgctggagaaggaccccagacccaagagagacaccgacatcaccagcgagagcgactacggcaacagcagaaagaacggcgagaccaagaaggccgccgccggcagcaccgacaagaccgaccccagaggcggcacccagagcttcagctgcagatag

SEQ ID NO: 12042 - DNA, 1995 bp, synthetic construct
  source 1..1995: mol_type = other DNA; note = Synthetic coding sequence
atgggcgacgacggcagcccccccgccaagaagatgatcaccgacatccacgccaacggcaagaccatcaacaaggtgcccaccgtgaagaaggagcacctggacgactacggcgaggcccccgtggagaccgacggcgagcacgtgaagagaacctgcaccagcgtgcccgagaccctgcacctgaaccccagcctgaagcacaccctggcccagttccacctgagcagccagagcagcctgggcggccccgccgccttcagcgccagacacagccaggagagcatgagccccaccgtgttcctgcccctgcccagcccccaggtgctgcccggccccctgctgatccccagcgacagcagcaccgagctgacccagaccgtgctggagggcgagagcatcagctgcttccaggtgggcggcgagaagagactgtgcctgccccaggtgctgaacagcgtgctgagagagttcaccctgcagcagatcaacaccgtgtgcgacgagctgtacatctactgcagcagatgcaccagcgaccagctgcacatcctgaaggtgctgggcatcctgcccttcaacgcccccagctgcggcctgatcaccctgaccgacgcccagagactgtgcaacgccctgctgagacccagaaccttcccccagaacggcagcgtgctgcccgccaagagcagcctggcccagctgaaggagaccggcagcgccttcgaggtggagcacgagtgcctgggcaagtgccagggcctgttcgccccccagttctacgtgcagcccgacgccccctgcatccagtgcctggagtgctgcggcatgttcgccccccagaccttcgtgatgcacagccacagaagccccgacaagagaacctgccactggggcttcgagagcgccaagtggcactgctacctgcacgtgaaccagaagtacctgggcacccccgaggagaagaagctgaagatcatcctggaggagatgaaggagaagttcagcatgagaagcggcaagagaaaccagagcaagaccgacgcccccagcggcatggagctgcagagctggtaccccgtgatcaagcaggagggcgaccacgtgagccagacccacagcttcctgcaccccagctactacctgtacatgtgcgacaaggtggtggcccccaacgtgagcctgaccagcgccgtgagccagagcaaggagctgaccaagaccgaggccagcaagagcatcagcagacagagcgagaaggcccacagcagcggcaagctgcagaagaccgtgagctaccccgacgtgagcctggaggagcaggagaagatggacctgaagaccagcagagagctgtgcagcagactggacgccagcatcagcaacaacagcaccagcaagagaaagagcgagagcgccacctgcaacctggtgagagacatcaacaaggtgggcatcggcctggtggccgccgccagcagccccctgctggtgaaggacgtgatctgcgaggacgacaagggcaagatcatggaggaggtgatgagaacctacctgaagcagcaggagaagctgaacctgatcctgcagaagaagcagcagctgcagatggaggtgaagatgctgagcagcagcaagagcatgaaggagctgaccgaggagcagcagaacctgcagaaggagctggagagcctgcagaacgagcacgcccagagaatggaggagttctacgtggagcagaaggacctggagaagaagctggagcagatcatgaagcagaagtgcacctgcgacagcaacctggagaaggacaaggaggccgagtacgccggccagctggccgagctgagacagagactggaccacgccgaggccgacagacaggagctgcaggacgagctgagacaggagagagaggccagacagaagctggagatgatgatcaaggagctgaagctgcagatcctgaagagcagcaagaccgccaaggagtag

SEQ ID NO: 12043 - DNA, 1068 bp, synthetic construct
  source 1..1068: mol_type = other DNA; note = Synthetic coding sequence
atgggcagaagagacctggtgagcggcggcagcaacgagggcaacggcaaggaggactgggccatgaagaccgtgagcctgagatggaccaagctgccccccgtgaagagcgccatcagaggccaggcccccgtggtgccctacatgagatacggccacagcaccgtgctgatcgacgacaccgtgctgctgtggggcggcagaaacgacaccgagggcgcctgcaacgtgctgtacgccttcgacgtgaacacccacaagtggttcacccccagagtgagcggcaccgtgcccggcgccagagacggccacagcgcctgcgtgctgggcaagatcatgtacatcttcggcggctacgagcagcaggccgactgcttcagcaacgacatccacaagctggacaccagcaccatgacctggaccctgatctgcaccaagggcagccccgccagatggagagacttccacagcgccaccatgctgggcagccacatgtacgtgttcggcggcagagccgacagattcggccccttccacagcaacaacgagatctactgcaacagaatcagagtgttcgacaccagaaccgaggcctggctggactgcccccccacccccgtgctgcccgagggcagaagaagccacagcgccttcggctacaacggcgagctgtacatcttcggcggctacaacgccagactgaacagacacttccacgacctgtggaagttcaaccccgtgagcttcacctggaagaagatcgagcccaagggcaagggcccctgccccagaagaagacagtgctgctgcatcgtgggcgacaagatcgtgctgttcggcggcaccagccccagccccgaggagggcctgggcgacgagttcgacctgatcgaccacagcgacctgcacatcctggacttcagccccagcctgaagaccctgtgcaagctggccgtgatccagtacaacctggaccagagctgcctgccccacgacatcagatgggagctgaacgccatgaccaccaacagcaacatcagcagacccatcgtgagcagccacggctag

SEQ ID NO: 12044 - DNA, 1245 bp, synthetic construct; identical to SEQ ID NO: 9295
  source 1..1245: mol_type = other DNA; note = Synthetic coding sequence

SEQ ID NO: 12045 - DNA, 1200 bp, synthetic construct
  source 1..1200: mol_type = other DNA; note = Synthetic coding sequence
atggccaccggcgacctgaagagaagcctgagaaacctggagcaggtgctgagactgctgaactaccccgaggaggtggactgcgtgggcctgatcaagggcgaccccgccgccagcctgcccatcatcagctacagcttcaccagctacagcccctacgtgaccgagctgatcatggagagcaacgtggagctgatcgccaagaacgacctgagattcatcgacgccgtgtacaagctgctgagagaccagttcaactacaagcccatcctgaccaagaagcagttcatccagtgcggcttcgccgagtggaagatccagatcgtgtgcgacatcctgaactgcgtgatgaagaagcacaaggagctgagcagcctgcagaagatccccagccagcagagaaagaagatcagcagcggcaagagcgagccccccctgggcaacgagaagatcagcgccgaggccgtgggcgtggacatcagcggcagattcatgaccagcggcaagaagaaggccgtggtgatcagacacctgtacaacgaggacaacgtggacatcagcgaggacaccctgagccccatcaccgacgtgaacgaggccgtggacgtgagcgacctgaacgccaccgagatcaagatgcccgaggtgaaggtgcccgagatcaaggccgagcagcaggacgtgaacgtgaaccccgagatcaccgccctgcagaccatgctggccgagtgccaggagaacctgaagaagctgaccagcatcgagaagagactggactgcctggagcagaagatgaagggcaaggtgatggtggacgagaacacctggaccaacctgctgagcagagtgaccctgctggagaccgagatgctgctgagcaagaagaacgacgagttcatcgagttcaacgaggtgagcgaggactacgccagctgcagcgacatggacctgctgaacccccacagaaagagcgaggtggagagacccgccagcatccccctgagcagcggctacagcaccgccagcagcgacagcacccccagagccagcaccgtgaactactgcggcctgaacgagatcagcgagaacttccccgcctggagcgccaccagcagctgcagcagcctgagctggctgctgagaggccacaccagctacctgagcagccagagcttcgcctggcccctgagctgcgtgtag

SEQ ID NO: 12046 - DNA, 1317 bp, synthetic construct
  source 1..1317: mol_type = other DNA; note = Synthetic coding sequence
tgatgcgccggcgccgagagacccagaagaagaggcagactgtgggacagcagcggcgtgccccagagacagaagagacccggcccctggagaacccagacccaggagcagatgagcagagacgtgtgcatccacacctggccctgcacctactacctggagcccaagagaagatgggtgaccggccagctgagcctgaccagcctgagcctgagattcatgaccgacagcaccggcgagatcctggtgagcttccccctgagcagcatcgtggagatcaagaaggaggccagccacttcatcttcagcagcatcaccatcctggagaagggccacgccaagcactggttcagcagcctgagacccagcagaaacgtggtgttcagcatcatcgagcacttctggagagagctgctgctgagccagcccggcgccgtggccgacgccagcgtgcccagaaccagaggcgaggagctgaccggcctgatggccggcagccagaagagactggaggacaccgccagagtgctgcaccaccagggccagcagctggacagcgtgatgagaggcctggacaagatggagagcgacctggaggtggccgacagactgctgaccgagctggagagccccgcctggtggcccttcagcagcaagctgtggaagaccccccccgagaccaagcccagagaggacgtgagcatgaccagctgcgagcccttcggcaaggagggcatcctgatcaagatccccgccgtgatcagccacagaaccgagagccacgtgaagcccggcagactgaccgtgctggtgagcggcctggagatccacgacagcagcagcctgctgatgcacagattcgagagagaggacgtggacgacatcaaggtgcacagcccctacgagatcagcatcagacagagattcatcggcaagcccgacatggcctacagactgatcagcgccaagatgcccgaggtgatccccatcctggaggtgcagttcagcaagaagatggagctgctggaggacgccctggtgctgagaagcgccagaaccagcagccccgccgagaagagctgcagcgtgtggcacgccgccagcggcctgatgggcagaaccctgcacagagagccccccgccggcgaccaggagggcaccgccctgcacctgcagaccagcctgcccgccctgagcgaggccgacacccaggagctgacccagggcttcagacccatgagcctgagcacccagaccgtgctggtgatgctgtgcagcgagagcgccggcgccctgtggagacagagactgagctag

SEQ ID NO: 12047 - DNA, 711 bp, synthetic construct
  source 1..711: mol_type = other DNA; note = Synthetic coding sequence
atgaccggctacgaggccagactgatcaccttcggcacctggatgtacagcgtgaacaaggagcagctggccagagccggcttctacgccatcggccaggaggacaaggtgcagtgcttccactgcggcggcggcctggccaactggaagcccaaggaggacccctgggagcagcacgccaagtggtaccccggctgcaagtacctgctggaggagaagggccacgagtacatcaacaacatccacctgaccagaagcctggagggcgccctggtgcagaccaccaagaagacccccagcctgaccaagagaatcagcgacaccatcttccccaaccccatgctgcaggaggccatcagaatgggcttcgacttcaaggacgtgaagaagatcatggaggagagaatccagaccagcggcagcaactacaagaccctggaggtgctggtggccgacctggtgagcgcccagaaggacaccaccgagaacgagctgaaccagaccagcctgcagagagagatcagccccgaggagcccctgagaagactgcaggaggagaagctgtgcaagatctgcatggacagacacatcgccgtggtgttcatcccctgcggccacctggtgacctgcaagcagtgcgccgaggccgtggacagatgccccatgtgcagcgccgtgatcgacttcaagcagagagtgttcatgagctag

SEQ ID NO: 12048 - DNA, 285 bp, synthetic construct
  source 1..285: mol_type = other DNA; note = Synthetic coding sequence
atgaaccccaccaaccccttcagcggccagcagcccagcgccttcagcgccagcagcagcaacgtgggcaccctgcccagcaagccccccttcagattcggccagcccagcctgttcggccagaacagcaccctgagcggcaagagcagcggcttcagccaggtgagcagcttccccgccagcagcggcgtgagccacagcagcagcgtgcagaccctgggcttcacccagaccagcagcgtgggccccttcagcggcctggagcacaccagcaccttcgtgtag

SEQ ID NO: 12049 - DNA, 723 bp, synthetic construct
  source 1..723: mol_type = other DNA; note = Synthetic coding sequence
atggccatcgtgcagaccctgcccgtgcccctggagcccgcccccgaggccgccaccgccccccaggcccccgtgatgggcagcgtgagcagcctgatcagcggcagaccctgccccggcggccccgccccccccagacaccacggcccccccggccccaccttcttcagacagcaggacggcctgctgagaggcggctacgaggcccaggagcccctgtgccccgccgtgccccccagaaaggccgtgcccgtgaccagcttcacctacatcaacgaggacttcagaaccgagagcccccccagccccagcagcgacgtggaggacgccagagagcagagagcccacaacgcccacctgagaggccccccccccaagctgatccccgtgagcggcaagctggagaagaacatggagaagatcctgatcagacccaccgccttcaagcccgtgctgcccaagcccagaggcgcccccagcctgcccagcttcatgggccccagagccaccggcctgagcggcagccagggcagcctgacccagctgttcggcggccccgccagcagcagcagcagcagcagcagcagcagcgccgccgacaagcccctggccttcagcggctgggccagcggctgccccagcggcaccctgagcgacagcggcagaaacagcctgagcagcctgcccacctacagcaccggcggcgccgagcccaccacctag

SEQ ID NO: 12050 - DNA, 1317 bp, synthetic construct; identical to SEQ ID NO: 9899
  source 1..1317: mol_type = other DNA; note = Synthetic coding sequence

SEQ ID NO: 12051 - DNA, 678 bp, synthetic construct
  source 1..678: mol_type = other DNA; note = Synthetic coding sequence
atggaggaggaggagatgaacgacggcagccagatggtgagaagccaggagagcctgaccttccaggacgtggccgtggacttcaccagagaggagtgggaccagctgtaccccgcccagaagaacctgtacagagacgtgatgctggagaactacagaaacctggtggccctgggctaccagctgtgcaagcccgaggtgatcgcccagctggagctggaggaggagtgggtgatcgagagagacagcctgctggacacccaccccggcgaccagagccacgtgatgagcgtggtgagaagcagcgtgcacgccagatggatcgtgggcaaggtgatcggcaccaagatgcagaagaccgccaaggtgagagtgaccagactggtgctggacccctacctgctgaagtacttcaacaagagaaagacctacttcgcccacgacgccctgcagcagtgcaccgtgggcgacatcgtgctgctgagagccctgcccgtgcccagagccaagcacgtgaagcacgagctggccgagatcgtgttcaaggtgggcaaggtgatcgaccccgtgaccggcaagccctgcgccggcaccacctacctggagagccccctgagcagcgagaccacccagctgagcaagaacctggaggagctgaacatcagcagcgcccagtag

SEQ ID NO: 12052 - DNA, 753 bp, synthetic construct
  source 1..753: mol_type = other DNA; note = Synthetic coding sequence
atgaccaccaagaacctggagaccaaggtgaccgtgaccagcagccccatcagaggcgccggcgacggcatggagaccgaggagccccccaagagcgtggaggtgaccagcggcgtgcagagcagaaagcaccacagcctgcagagcccctggaagaaggccgtgcccagcgagagccccggcgtgctgcagctgggcaagatgctgaccgagaaggccatggaggtgaaggccgtgagaatcctggtgcccaaggccgccatcacccacgacatccccaacaagaacaccaaggtgaagagcctgggccaccacaagggcgagttcctgggccagagcgagggcgtgatcgagcccaacaaggagctgagcgaggtgaagaacgtgctggagaagctgaagaacagcgagagaagactgctgcaggacaaggagggcctgagcaaccagctgagagtgcagaccgaggtgaacagagagctgaagaagctgctggtggccagcgtgggcgacgacctgcagtaccacttcgagagactggccagagagaagaaccagctgatcctggagaacgaggccctgggcagaaacaccgcccagctgagcgagcagctggagagaatgagcatccagtgcgacgtgtggagaagcaagttcctggccagcagagtgatggccgacgagctgaccaacagcagagccgccctgcagagacagaacagagacgcccacggcgccatccaggacctgtag

SEQ ID NO: 12053 - DNA, 387 bp, synthetic construct
  source 1..387: mol_type = other DNA; note = Synthetic coding sequence
atgctgtgctggggctactggagcctgggccagcccggcatcagcaccaacctgcagggcatcgtggccgagccccaggtgtgcggcttcatcagcgacagaagcgtgaaggaggtggcctgcggcggcaaccacagcgtgttcctgctggaggacggcgaggtgtacacctgcggcctgaacaccaagggccagctgggccacgagagagagggcaacaagcccgagcagatcggcgccctggccgaccagcacatcatccacgtggcctgcggcgagagccacagcctggccctgagcgacagaggccagctgttcagctggggcgccggcagcgacggccagctgggcctgatgaccaccgaggacagcgtggccgtgccctag

SEQ ID NO: 12054 - DNA, 1617 bp, synthetic construct
  source 1..1617: mol_type = other DNA; note = Synthetic coding sequence
atggacgtggacaaggagctgggcatggagagcgtgaaggccggcgccagcggcaagcccgagatgagactgggcacccaggaggagaccagcgagggcgacgccaacgagagcagcctgctggtgctgagcagcaacgtgcccctgctggccctggagttcctggagatcgcccaggccaaggagaaggccttcctgcccatggtgagccacaccttccacatgagaaccgaggagagcgacgccagccaggagggcgacgacctgcccaagagcagcgccaacaccagccaccccaagcaggacgacagccccaagagcagcgaggagaccatccagcccaaggagggcgacatccccaaggcccccgaggagaccatccagagcaagaaggaggacctgcccaagagcagcgagaaggccatccagcccaaggagagcaacatccccaagagcagcgccaagcccatccagcccaagctgggcaacatccccaaggccagcgtgaagcccagccagcccaaggagggcgacatccccaaggcccccgaggagaccatccagagcaagaaggaggacctgcccaagagcagcgaggaggccatccagcccaaggagggcgacatccccaagagcagcgccaagcccatccagcccaagctgggcaacatcgccaagaccagcgtgaagcccagccagcccaaggagagcgacatccccaagagccccgaggagaccatccagcccaaggagggcgacatccccaagagcagcgccaagcccatccagcccaagctgggcaacatccccaaggccagcgtgaagcccagccagcccaaggagggcgacatcagcaagagccccgaggaggccatccagcccaaggagggcgacctgcccaagagcctggaggaggccatccagcccaaggagggcgacatccccaagagcctggaggaggccatccagcccaaggagggcgacatccccaagagccccgaggagaccatccagcccaagaagggcgacatccccaagagccccgaggaggccatccagcccaaggagggcgacatccccaagagccccaagcaggccatccagcccaaggagggcgacatccccaagagcctggaggaggccatcccccccaaggagatcgacatccccaagagccccgaggagaccatccagcccaaggaggacgacagccccaagagcctggaggaggccacccccagcaaggagggcgacatcctgaagcccgaggaggagaccatggagttccccgagggcgacaaggtgaaggtgatcctgagcaaggaggacttcgaggccagcctgaaggaggccggcgagagactggtggccgtggacttcagcgccacctggtgcggcccctgcagaaccatcagacccttcttccacgccctgagcgtgaagcacgaggacgtggtgttcctggaggtggacgccgacaactgcgaggaggtggtgagagagtgcgccatcatgtgcgtgcccaccttccagttctacaagaaggaggagaaggtggacgagctgtgcggcgccctgaaggagaagctggaggccgtgatcgccgagctgaagtag

SEQ ID NO: 12055 - DNA, 153 bp, synthetic construct
  source 1..153: mol_type = other DNA; note = Synthetic coding sequence
atggccagcgaggagctgcagaaggacctggaggaggtgaaggtgctgctggagaaggccaccagaaagagagtgagagacgccctgaccgccgagaagagcaagatcgagaccgagatcaagaacaagatgcagcagaagagccagaagtag

SEQ ID NO: 12056 - DNA, 1527 bp, synthetic construct; identical to SEQ ID NO: 9879
  source 1..1527: mol_type = other DNA; note = Synthetic coding sequence

SEQ ID NO: 12057 - DNA, 3846 bp, synthetic construct
  source 1..3846: mol_type = other DNA; note = Synthetic coding sequence
atgaccttctacagctggatcccctaccacagacaggcccccctgaaccacagaagagtgtgcagcgccgagggcgccggcagccccggccccgccctggaccccagatggctgcccaccgaggcccacctgctggaggcccacagactgctgctgcagagcgtgctgtgcgacagacccagagagagcatccagctgcacttcagactgagcatggccagccagctgcaggtgttcagcccccccagcgtgagcagcagcgccttctgcagcgccaagaagctgaagatcgagcccagcggctgggacgtgagcggccagagcagcaacgacaagtactacacccacagcaagaccctgcccgccacccagggccaggccaacagcagccaccaggtggccaacttcaacatccccgcctacgaccagggcctgctgctgcccgcccccgccgtggagcacatcgtggtgaccgccgccgacagcagcggcagcgccgccaccagcaccttccagagcagccagaccctgacccacagaagcaacgtgagcctgctggagccctaccagaagtgcggcctgaagagaaagagcgaggaggtggacagcaacggcagcgtgcagatcatcgaggagcacccccccctgatgctgcagaacagaaccgtggtgggcgccgccgccaccaccaccaccgtgaccaccaagagcagcagcagcagcggcgagggcgactaccagctggtgcagcacgagatcctgtgcagcatgaccaacagctacgaggtgctggagttcctgggcagaggcaccttcggccaggtggccaagtgctggaagagaagcaccaaggagatcgtggccatcaagatcctgaagaaccaccccagctacgccagacagggccagatcgaggtgagcatcctgagcagactgagcagcgagaacgccgacgagtacaacttcgtgagaagctacgagtgcttccagcacaagaaccacacctgcctggtgttcgagatgctggagcagaacctgtacgacttcctgaagcagaacaagttcagccccctgcccctgaagtacatcagacccatcctgcagcaggtggccaccgccctgatgaagctgaagagcctgggcctgatccacgccgacctgaagcccgagaacatcatgctggtggaccccgtgagacagccctacagagtgaaggtgatcgacttcggcagcgccagccacgtgagcaaggccgtgtgcagcacctacctgcagagcagatactacagagcccccgagatcatcctgggcctgcccttctgcgaggccatcgacatgtggagcctgggctgcgtgatcgccgagctgttcctgggctggcccctgtaccccggcgccagcgagtacgaccagatcagatacatcagccagacccagggcctgcccgccgagtacctgctgagcgccggcaccaagaccaccagattcttcaacagagaccccaacctgggctaccccctgtggagactgaagacccccgaggagcacgagctggagaccggcatcaagagcaaggaggccagaaagtacatcttcaactgcctggacgacatggcccaggtgaacatgagcaccgacctggagggcaccgacatgctggccgagaaggccgacagaagagagtacatcgacctgctgaagaagatgctgaccatcgacgccgacaagagaatcacccccctgaagaccctgaaccaccagttcgtgaccatgacccacctgctggacttcccccacagcaaccacgtgaagagctgcttccagaacatggagatctgcaagagaagagtgcacatgtacgacaccgtgagccagatcaagagccccttcaccacccacgtggcccccaacaccagcaccaacctgaccatgagcttcagcaaccagctgaacaccgtgcacaaccaggccagcgtgctggccagcagcagcaccgccgccgccgccaccctgagcctggccaacagcgacgtgagcctgctgaactaccagagcgccctgtaccccagcagcgccgcccccgtgcccggcgtggcccagcagggcgtgagcctgcagcccggcaccacccagatctgcacccagaccgaccccttccagcagaccttcatcgtgtgcccccccgccttccagaccggcctgcaggccaccaccaagcacagcggcttccccgtgagaatggacaacgccgtgcccatcgtgccccaggcccccgccgcccagcccctgcagatccagagcggcgtgctgacccagggcagctgcacccccctgatggtggccaccctgcacccccaggtggccaccatcaccccccagtacgccgtgcccttcaccctgagctgcgccgccggcagacccgccctggtggagcagaccgccgccgtgctgcaggcctggcccggcggcacccagcagatcctgctgcccagcacctggcagcagctgcccggcgtggccctgcacaacagcgtgcagcccaccgccatgatccccgaggccatgggcagcggccagcagctggccgactggagaaacgcccacagccacggcaaccagtacagcaccatcatgcagcagcccagcctgctgaccaaccacgtgaccctggccaccgcccagcccctgaacgtgggcgtggcccacgtggtgagacagcagcagagcagcagcctgcccagcaagaagaacaagcagagcgcccccgtgagcagcaagagcagcctggacgtgctgcccagccaggtgtacagcctggtgggcagcagccccctgagaaccaccagcagctacaacagcctggtgcccgtgcaggaccagcaccagcccatcatcatccccgacacccccagcccccccgtgagcgtgatcaccatcagaagcgacaccgacgaggaggaggacaacaagtacaagcccagcagcagcggcctgaagcccagaagcaacgtgatcagctacgtgaccgtgaacgacagccccgacagcgacagcagcctgagcagcccctacagcaccgacaccctgagcgccctgagaggcaacagcggcagcgtgctggagggccccggcagagtggtggccgacggcaccggcaccagaaccatcatcgtgccccccctgaagacccagctgggcgactgcaccgtggccacccaggccagcggcctgctgagcaacaagaccaagcccgtggccagcgtgagcggccagagcagcggctgctgcatcacccccaccggctacagagcccagagaggcggcaccagcgccgcccagcccctgaacctgagccagaaccagcagagcagcgccgcccccaccagccaggagagaagcagcaaccccgcccccagaagacagcaggccttcgtggcccccctgagccaggccccctacaccttccagcacggcagccccctgcacagcaccggccacccccacctggcccccgcccccgcccacctgcccagccaggcccacctgtacacctacgccgcccccaccagcgccgccgccctgggcagcaccagcagcatcgcccacctgttcagcccccagggcagcagcagacacgccgccgcctacaccacccaccccagcaccctggtgcaccaggtgcccgtgagcgtgggccccagcctgctgaccagcgccagcgtggcccccgcccagtaccagcaccagttcgccacccagagctacatcggcagcagcagaggcagcaccatctacaccggctaccccctgagccccaccaagatcagccagtacagctacctgtag

SEQ ID NO: 12058 - DNA, 1071 bp, synthetic construct; identical to SEQ ID NO: 10895
  source 1..1071: mol_type = other DNA; note = Synthetic coding sequence

SEQ ID NO: 12059 - DNA, 2748 bp, synthetic construct
  source 1..2748: mol_type = other DNA; note = Synthetic coding sequence
atgcagggccccgacgcccccctgctgctgagcgccagagagctgggccccggcagaagaggcagcgccagctggtacagacaggagggcggcgccgtgtgcaactggctgagaaagccccagcccctggagcccagaaccagcttccccagcgccagaagaagcgagttcagaccccccagaagactgccctgggccggccccgccagcgcccagagcgaggagggccacgccggcggcagatgccaggccggcagccccgcccccgccagaagactgagcggcgccttcaagaccctggtgcccggcacccacgcccagggcgccagcgacacccaccccctgggccccccccacacccccgtgctggaccccagcccccaggacggcttccccgtgctgtggagaggcagcagcaaggccagccacatgaacagactgagaaacgccaagatctacgtggagagagccgtgaagcagaagaagatcttcaccatccagggctgctaccccgtgatcagatgcctgctgagaagaagaggctgggtggagaagaagatggtgcacagaagcggccccaccctgctgcccccccagaaggacctggacagcagcgccatgggcgacagcgacaccaccgaggacgaggacgaggacgaggacgaggagttccagcccagccagctgttcgacttcgacgacctgctgaagttcgacgacctggacggcacccacgccctgatggtgggcctgtgcctgaacctgagaaacctgccctggttcgacgaggtggacgccaacagcttcttccccagatgctactgcctgggcgccgaggacgacaagaaggccttcatcgaggacttctggctgaccgccgccagaaacgtgctgaagctggtggtgaagagcgagtggaagagctaccccatccaggccgtggaggaggaggccagcggcgacaagcagcccaagaagcaggagaagaaccccgtgctggtgagccccgagttcgtggacgaggccctgtgcgcctgcgaggagtacctgagcaacctggcccacatggacatcgacaaggacctggaggcccccctgtacctgacccccgagggctggagcctgttcctgcagagatactaccaggtggtgcacgagggcgccgagctgagacacctggacacccaggtgcagagatgcgaggacatcctgcagcagctgcaggccgtggtgccccagatcgacatggagggcgacagaaacatctggatcgtgaagcccggcgccaagagcagaggcagaggcatcatgtgcatggaccacctggaggagatgctgaagctggtgaacggcaaccccgtggtgatgaaggacggcaagtgggtggtgcagaagtacatcgagagacccctgctgatcttcggcaccaagttcgacctgagacagtggttcctggtgaccgactggaaccccctgaccgtgtggttctacagagacagctacatcagattcagcacccagcccttcagcctgaagaacctggacaacagcgtgcacctgtgcaacaacagcatccagaagcacctggagaacagctgccacagacaccccctgctgccccccgacaacatgtggagcagccagagattccaggcccacctgcaggagatgggcgcccccaacgcctggagcaccatcatcgtgcccggcatgaaggacgccgtgatccacgccctgcagaccagccaggacaccgtgcagtgcagaaaggccagcttcgagctgtacggcgccgacttcgtgttcggcgaggacttccagccctggctgatcgagatcaacgccagccccaccatggcccccagcaccgccgtgaccgccagactgtgcgccggcgtgcaggccgacaccctgagagtggtgatcgacagaatgctggacagaaactgcgacaccggcgccttcgagctgatctacaagcagcccgccgtggaggtgccccagtacgtgggcatcagactgctggtggagggcttcaccatcaagaagcccatggccatgtgccacagaagaatgggcgtgagacccgccgtgcccctgctgacccagagaggcagcggcgaggccagacaccacttccccagcctgcacaccaaggcccagctgcccagcccccacgtgctgagacaccagggccaggtgctgagaagacagcacagcaagctggtgggcaccaaggccctgagcaccaccggcaaggccctgagaaccctgcccaccgccaaggtgttcatcagcctgccccccaacctggacttcaaggtggcccccagcatcctgaagcccagaaaggcccccgccctgctgtgcctgagaggcccccagctggaggtgccctgctgcctgtgccccctgaagagcgagcagttcctggcccccgtgggcagaagcagacccaaggccaacagcagacccgactgcgacaagcccagagccgaggcctgccccatgaagagactgagccccctgaagcccctgcccctggtgggcaccttccagagaagaagaggcctgggcgacatgaagctgggcaagcccctgctgagattccccaccgccctggtgctggaccccacccccaacaagaagaagcaggtgaagtacctgggcctggacagcatcgccgtgggcggcagcagagtggacggcgccagaccctgcacccccggcagcaccgccagagcctag

SEQ ID NO: 12060 - DNA, 2463 bp, synthetic construct
  source 1..2463: mol_type = other DNA; note = Synthetic coding sequence
atgagaatcagcagctgcagcgacgagagcagcaacagcaacagcagcagaaagagcgacaaccacagccccgccgtggtgaccaccaccgtgagcagcaagaagcagcccagcgtgctggtgaccttccccaaggaggagagaaagagcgtgagcggcaaggccagcatcaagctgagcgagaccatcagcgagggcaccagcaacagcctgagcacctgcaccaagagcggccccagccccctgagcagccccaacggcaagctgaccgtggccagccccaagagaggccagaagagagaggagggctggaaggaggtggtgagaagaagcaagaaggtgagcgtgcccagcaccgtgatcagcagagtgatcggcagaggcggctgcaacatcaacgccatcagagagttcaccggcgcccacatcgacatcgacaagcagaaggacaagaccggcgacagaatcatcaccatcagaggcggcaccgagagcaccagacaggccacccagctgatcaacgccctgatcaaggaccccgacaaggagatcgacgagctgatccccaagaacagactgaagagcagcagcgccaacagcaagatcggcagcagcgcccccaccaccaccgccgccaacaccagcctgatgggcatcaagatgaccaccgtggccctgagcagcaccagccagaccgccaccgccctgaccgtgcccgccatcagcagcgccagcacccacaagaccatcaagaaccccgtgaacaacgtgagacccggcttccccgtgagcctgcccctggcctacccccccccccagttcgcccacgccctgctggccgcccagaccttccagcagatcagaccccccagactgcccatgacccacttcggcggcaccttcccccccgcccagagcacctggggccccttccccgtgagacccctgagccccgccagagccaccaacagccccaagccccacatggtgcccagacacagcaaccagaacagcagcggcagccaggtgaacagcgccggcagcctgaccagcagccccaccaccaccaccagcagcagcgccagcaccgtgcccggcaccagcaccaacggcagccccagcagccccagcgtgagaagacagctgttcgtgaccgtggtgaagaccagcaacgccaccaccaccaccgtgaccaccaccgccagcaacaacaacaccgcccccaccaacgccacctaccccatgcccaccgccaaggagcactaccccgtgagcagccccagcagccccagcccccccgcccagcccggcggcgtgagcagaaacagccccctggactgcggcagcgccagccccaacaaggtggccagcagcagcgagcaggaggccggcagcccccccgtggtggagaccaccaacaccagaccccccaacagcagcagcagcagcggcagcagcagcgcccacagcaaccagcagcagccccccggcagcgtgagccaggagcccagaccccccctgcagcagagccaggtgcccccccccgaggtgagaatgaccgtgccccccctggccaccagcagcgcccccgtggccgtgcccagcaccgcccccgtgacctaccccatgccccagacccccatgggctgcccccagcccacccccaagatggagacccccgccatcagaccccccccccacggcaccaccgccccccacaagaacagcgccagcgtgcagaacagcagcgtggccgtgctgagcgtgaaccacatcaagagaccccacagcgtgcccagcagcgtgcagctgcccagcaccctgagcacccagagcgcctgccagaacagcgtgcaccccgccaacaagcccatcgcccccaacttcagcgcccccctgcccttcggccccttcagcaccctgttcgagaacagccccaccagcgcccacgccttctggggcggcagcgtggtgagcagccagagcacccccgagagcatgctgagcggcaagagcagctacctgcccaacagcgaccccctgcaccagagcgacaccagcaaggcccccggcttcagaccccccctgcagagacccgcccccagccccagcggcatcgtgaacatggacagcccctacggcagcgtgacccccagcagcacccacctgggcaacttcgccagcaacatcagcggcggccagatgtacggccccggcgcccccctgggcggcgcccccgccgccgccaacttcaacagacagcacttcagccccctgagcctgctgaccccctgcagcagcgccagcaacgacagcagcgcccagagcgtgagcagcggcgtgagagcccccagccccgcccccagcagcgtgcccctgggcagcgagaagcccagcaacgtgagccaggacatcgtggccagcggccccctgaagggcctggtggccatcaagaccaagtag

SEQ ID NO: 12061 - DNA, 6033 bp, synthetic construct
  source 1..6033: mol_type = other DNA; note = Synthetic coding sequence
atggagaaggccaccgtgcccgtggccgccgccaccgccgccgagggcgagggcagcccccccgccgtggccgccgtggccggcccccccgccgccgccgaggtgggcggcggcgtgggcggcagcagcagagccagaagcgccagcagccccagaggcatggtgagagtgtgcgacctgctgctgaagaagaagcccccccagcagcagcaccacaaggccaagagaaacagaacctgcagaccccccagcagcagcgagagcagcagcgacagcgacaacagcggcggcggcggcggcggcggcggcggcggcggcggcggcggcggcaccagcagcaacaacagcgaggaggaggaggacgacgacgacgaggaggaggaggtgagcgaggtggagagcttcatcctggaccaggacgacctggagaaccccatgctggagaccgccagcaagctgctgctgagcggcaccgccgacggcgccgacctgagaaccgtggaccccgagacccaggccagactggaggccctgctggaggccgccggcatcggcaagctgagcaccgccgacggcaaggccttcgccgaccccgaggtgctgagaagactgaccagcagcgtgagctgcgccctggacgaggccgccgccgccctgaccagaatgagagccgagagcaccgccaacgccggccagagcgacaacagaagcctggccgaggcctgcagcgagggcgacgtgaacgccgtgagaaagctgctgatcgagggcagaagcgtgaacgagcacaccgaggagggcgagagcctgctgtgcctggcctgcagcgccggctactacgagctggcccaggtgctgctggccatgcacgccaacgtggaggacagaggcatcaagggcgacatcacccccctgatggccgccgccaacggcggccacgtgaagatcgtgaagctgctgctggcccacaaggccgacgtgaacgcccagagcagcaccggcaacaccgccctgacctacgcctgcgccggcggctacgtggacgtggtgaaggtgctgctggagagcggcgccagcatcgaggaccacaacgagaacggccacacccccctgatggaggccggcagcgccggccacgtggaggtggccagactgctgctggagaacggcgccggcatcaacacccacagcaacgagttcaaggagagcgccctgaccctggcctgctacaagggccacctggagatggtgagattcctgctggaggccggcgccgaccaggagcacaagaccgacgagatgcacaccgccctgatggaggcctgcatggacggccacgtggaggtggccagactgctgctggacagcggcgcccaggtgaacatgcccgccgacagcttcgagagccccctgaccctggccgcctgcggcggccacgtggagctggccgccctgctgatcgagagaggcgccagcctggaggaggtgaacgacgagggctacacccccctgatggaggccgccagagagggccacgaggagatggtggccctgctgctgggccagggcgccaacatcaacgcccagaccgaggagacccaggagaccgccctgaccctggcctgctgcggcggcttcctggaggtggccgacttcctgatcaaggccggcgccgacatcgagctgggctgcagcacccccctgatggaggccgcccaggagggccacctggagctggtgaagtacctgctggccgccggcgccaacgtgcacgccaccaccgccaccggcgacaccgccctgacctacgcctgcgagaacggccacaccgacgtggccgacgtgctgctgcaggccggcgccgacctggagcacgagagcgagggcggcagaacccccctgatgaaggccgccagagccggccacgtgtgcaccgtgcagttcctgatcagcaagggcgccaacgtgaacagaaccaccgccaacaacgaccacaccgtgctgagcctggcctgcgccggcggccacctggccgtggtggagctgctgctggcccacggcgccgaccccacccacagactgaaggacggcagcaccatgctgatcgaggccgccaagggcggccacaccagcgtggtgtgctacctgctggactaccccaacaacctgctgagcgcccccccccccgacgtgacccagctgaccccccccagccacgacctgaacagagcccccagagtgcccgtgcaggccctgcccatggtggtgcccccccaggagcccgacaagccccccgccaacgtggccaccaccctgcccatcagaaacaaggccgccagcaagcagaagagcagcagccacctgcccgccaacagccaggacgtgcagggctacatcaccaaccagagccccgagagcatcgtggaggaggcccagggcaagctgaccgagctggagcagagaatcaaggaggccatcgagaagaacgcccagctgcagagcctggagctggcccacgccgaccagctgaccaaggagaagatcgaggagctgaacaagaccagagaggagcagatccagaagaagcagaagatcctggaggagctgcagaaggtggagagagagctgcagctgaagacccagcagcagctgaagaagcagtacctggaggtgaaggcccagagaatccagctgcagcagcagcagcagcagagctgccagcacctgggcctgctgacccccgtgggcgtgggcgagcagctgagcgagggcgactacgccagactgcagcaggtggaccccgtgctgctgaaggacgagccccagcagaccgccgcccagatgggcttcgcccccatccagcccctggccatgccccaggccctgcccctggccgccggccccctgccccccggcagcatcgccaacctgaccgagctgcaggtgctgagcagcctgctgcagccctgcttcctgagcaccctgcccctgatcctgatgcacagactgagagtgatcatgaccagacccaagagcagcagcaccagcgagagcggcgacagcgacaacatgagaatcagcagctgcagcgacgagagcagcaacagcaacagcagcagaaagagcgacaaccacagccccgccgtggtgaccaccaccgtgagcagcaagaagcagcccagcgtgctggtgaccttccccaaggaggagagaaagagcgtgagcggcaaggccagcatcaagctgagcgagaccatcagcgagggcaccagcaacagcctgagcacctgcaccaagagcggccccagccccctgagcagccccaacggcaagctgaccgtggccagccccaagagaggccagaagagagaggagggctggaaggaggtggtgagaagaagcaagaaggtgagcgtgcccagcaccgtgatcagcagagtgatcggcagaggcggctgcaacatcaacgccatcagagagttcaccggcgcccacatcgacatcgacaagcagaaggacaagaccggcgacagaatcatcaccatcagaggcggcaccgagagcaccagacaggccacccagctgatcaacgccctgatcaaggaccccgacaaggagatcgacgagctgatccccaagaacagactgaagagcagcagcgccaacagcaagatcggcagcagcgcccccaccaccaccgccgccaacaccagcctgatgggcatcaagatgaccaccgtggccctgagcagcaccagccagaccgccaccgccctgaccgtgcccgccatcagcagcgccagcacccacaagaccatcaagaaccccgtgaacaacgtgagacccggcttccccgtgagcctgcccctggcctacccccccccccagttcgcccacgccctgctggccgcccagaccttccagcagatcagaccccccagactgcccatgacccacttcggcggcaccttcccccccgcccagagcacctggggccccttccccgtgagacccctgagccccgccagagccaccaacagccccaagccccacatggtgcccagacacagcaaccagaacagcagcggcagccaggtgaacagcgccggcagcctgaccagcagccccaccaccaccaccagcagcagcgccagcaccgtgcccggcaccagcaccaacggcagccccagcagccccagcgtgagaagacagctgttcgtgaccgtggtgaagaccagcaacgccaccaccaccaccgtgaccaccaccgccagcaacaacaacaccgcccccaccaacgccacctaccccatgcccaccgccaaggagcactaccccgtgagcagccccagcagccccagcccccccgcccagcccggcggcgtgagcagaaacagccccctggactgcggcagcgccagccccaacaaggtggccagcagcagcgagcaggaggccggcagcccccccgtggtggagaccaccaacaccagaccccccaacagcagcagcagcagcggcagcagcagcgcccacagcaaccagcagcagccccccggcagcgtgagccaggagcccagaccccccctgcagcagagccaggtgcccccccccgaggtgagaatgaccgtgccccccctggccaccagcagcgcccccgtggccgtgcccagcaccgcccccgtgacctaccccatgccccagacccccatgggctgcccccagcccacccccaagatggagacccccgccatcagaccccccccccacggcaccaccgccccccacaagaacagcgccagcgtgcagaacagcagcgtggccgtgctgagcgtgaaccacatcaagagaccccacagcgtgcccagcagcgtgcagctgcccagcaccctgagcacccagagcgcctgccagaacagcgtgcaccccgccaacaagcccatcgcccccaacttcagcgcccccctgcccttcggccccttcagcaccctgttcgagaacagccccaccagcgcccacgccttctggggcggcagcgtggtgagcagccagagcacccccgagagcatgctgagcggcaagagcagctacctgcccaacagcgaccccctgcaccagagcgacaccagcaaggcccccggcttcagaccccccctgcagagacccgcccccagccccagcggcatcgtgaacatggacagcccctacggcagcgtgacccccagcagcacccacctgggcaacttcgccagcaacatcagcggcggccagatgtacggccccggcgcccccctgggcggcgcccccgccgccgccaacttcaacagacagcacttcagccccctgagcctgctgaccccctgcagcagcgccagcaacgacagcagcgcccagagcgtgagcagcggcgtgagagcccccagccccgcccccagcagcgtgcccctgggcagcgagaagcccagcaacgtgagccaggacagaaaggtgcccgtgcccatcggcaccgagagaagcgccagaatcagacagaccggcaccagcgcccccagcgtgatcggcagcaacctgagcaccagcgtgggccacagcggcatctggagcttcgagggcatcggcggcaaccaggacaaggtggactggtgcaaccccggcatgggcaaccccatgatccacagacccatgagcgaccccggcgtgttcagccagcaccaggccatggagagagacagcaccggcatcgtgacccccagcggcaccttccaccagcacgtgcccgccggctacatggacttccccaaggtgggcggcatgcccttcagcgtgtacggcaacgccatgatcccccccgtggcccccatccccgacggcgccggcggccccatcttcaacggcccccacgccgccgaccccagctggaacagcctgatcaagatggtgagcagcagcaccgagaacaacggcccccagaccgtgtggaccggcccctgggccccccacatgaacagcgtgcacatgaaccagctgggctag

SEQ ID NO: 12062 - DNA, 1446 bp, synthetic construct
  source 1..1446: mol_type = other DNA; note = Synthetic coding sequence
atggccagcgccgccagcgtgaccagcctggccgacgaggtgaactgccccatctgccagggcaccctgagagagcccgtgaccatcgactgcggccacaacttctgcagagcctgcctgaccagatactgcgagatccccggccccgacctggaggagagccccacctgccccctgtgcaaggagcccttcagacccggcagcttcagacccaactggcagctggccaacgtggtggagaacatcgagagactgcagctggtgagcaccctgggcctgggcgaggaggacgtgtgccaggagcacggcgagaagatctacttcttctgcgaggacgacgagatgcagctgtgcgtggtgtgcagagaggccggcgagcacgccacccacaccatgagattcctggaggacgccgccgccccctacagagagcagatccacaagtgcctgaagtgcctgagaaaggagagagaggagatccaggagatccagagcagagagaacaagagaatgcaggtgctgctgacccaggtgagcaccaagagacagcaggtgatcagcgagttcgcccacctgagaaagttcctggaggagcagcagagcatcctgctggcccagctggagagccaggacggcgacatcctgagacagagagacgagttcgacctgctggtggccggcgagatctgcagattcagcgccctgatcgaggagctggaggagaagaacgagagacccgccagagagctgctgaccgacatcagaagcaccctgatcagatgcgagaccagaaagtgcagaaagcccgtggccgtgagccccgagctgggccagagaatcagagacttcccccagcaggccctgcccctgcagagagagatgaagatgttcctggagaagctgtgcttcgagctggactacgagcccgcccacatcagcctggacccccagaccagccaccccaagctgctgctgagcgaggaccaccagagagcccagttcagctacaagtggcagaacagccccgacaacccccagagattcgacagagccacctgcgtgctggcccacaccggcatcaccggcggcagacacacctgggtggtgagcatcgacctggcccacggcggcagctgcaccgtgggcgtggtgagcgaggacgtgcagagaaagggcgagctgagactgagacccgaggagggcgtgtgggccgtgagactggcctggggcttcgtgagcgccctgggcagcttccccaccagactgaccctgaaggagcagcccagacaggtgagagtgagcctggactacgaggtgggctgggtgaccttcaccaacgccgtgaccagagagcccatctacaccttcaccgccagcttcaccagaaaggtgatccccttcttcggcctgtggggcagaggcagcagcttcagcctgagcagctag

SEQ ID NO: 12063 - DNA, 1566 bp, synthetic construct
  source 1..1566: mol_type = other DNA; note = Synthetic coding sequence
atgcccagcccccagctgctggtgctgttcggcagccagaccggcaccgcccaggacgtgagcgagagactgggcagagaggccagaagaagaagactgggctgcagagtgcaggccctggacagctaccccgtggtgaacctgatcaacgagcccctggtgatcttcgtgtgcgccaccaccggccagggcgacccccccgacaacatgaagaacttctggagattcatcttcagaaagaacctgcccagcaccgccctgtgccagatggacttcgccgtgctgggcctgggcgacagcagctacgccaagttcaacttcgtggccaagaagctgcacagaagactgctgcagctgggcggcagcgccctgctgcccgtgtgcctgggcgacgaccagcacgagctgggcctgcccagcaagttcaccctgctgttcctgcaggaggcccccagcaccggcagcgagggccagagagtggcccaccccggcagccaggagccccccagcgagagcaagcccttcctggcccccatgatcagcaaccagagagtgaccggccccagccacttccaggacgtgagactgatcgagttcgacatcctgggcagcggcatcagcttcgccgccggcgacgtggtgctgatccagcccagcaacagcgccgcccacgtgcagagattctgccaggtgctgggcctggaccccgaccagctgttcatgctgcagcccagagagcccgacgtgagcagccccaccagactgccccagccctgcagcatgagacacctggtgagccactacctggacatcgccagcgtgcccagaagaagcttcttcgagctgctggcctgcctgagcctgcacgagctggagagagagaagctgctggagttcagcagcgcccagggccaggaggagctgttcgagtactgcaacagacccagaagaaccatcctggaggtgctgtgcgacttcccccacaccgccgccgccatcccccccgactacctgctggacctgatccccgtgatcagacccagagccttcagcatcgccagcagcctgctgacccaccccagcagactgcagatcctggtggccgtggtgcagttccagaccagactgaaggagcccagaagaggcctgtgcagcagctggctggccagcctggaccccggccagggccccgtgagagtgcccctgtgggtgagacccggcagcctggccttccccgagacccccgacacccccgtgatcatggtgggccccggcaccggcgtggcccccttcagagccgccatccaggagagagtggcccagggccagaccggcaacttcctgttcttcggctgcagatggagagaccaggacttctactgggaggccgagtggcaggagctggagaagagagactgcctgaccctgatccccgccttcagcagagagcaggagcagaaggtgtacgtgcagcacagactgagagagctgggcagcctggtgtgggagctgctggacagacaggccacccccagcccctgccagagaaccagcagaaagccctag

SEQ ID NO: 12064 - DNA, 753 bp, synthetic construct
  source 1..753: mol_type = other DNA; note = Synthetic coding sequence
tgacagcccagccccgtggagcccagaggccccttctacttctgcagactgctgctggacgacctgggcatgaacagctgggacagaagaaagaacttccacctgctgaagaagaacagcaagctgctgagagagctgaagaacctggacagcagacagtgcagagagacccacaagatcgccgtgttctacatcgccgagggccaggaggacaagtgcagcatcctgagcaacgagagaggcagccaggcctacgaggacttcgtggccggcctgggctgggaggtggacctgagcacccactgcggcttcatgggcggcctgcagagaaacggcagcaccggccagaccgccccctactacgccaccagcaccgtggaggtgatcttccacgtgagcaccagaatgcccagcgacagcgacgacagcctgaccaagaagctgagacacctgggcaacgacgaggtgcacatcgtgtggagcgagcacagcagagactacagaagaggcatcatccccaccgccttcggcgacgtgagcatcatcatctaccccatgaagaaccacatgttcttcatcgccatcaccaagaagcccgaggtgcccttcttcggccccctgttcgacggcgccatcgtgagcggcaagctgctgcccagcctggtgtgcgccacctgcatcaacgccagcagagccgtgaagtgcctgatccccctgtaccagagcctgtacctgttcgccctgaacgtgtag

SEQ ID NO: 12065 - DNA, 345 bp, synthetic construct
  source 1..345: mol_type = other DNA; note = Synthetic coding sequence
atggtgctgatcctgggcagaagactgaacagagaggacctgggcgtgagagacagccccgccaccaagagaaaggtgttcgagatggaccccaagagcctgaccggccacgagttcttcgacttcagcagcggcagcagccacgccgagaacatcctgcagatcttcaacgagttcagagacagcagactgttcaccgacgtgatcatctgcgtggagggcaaggagttcccctgccacagagccgtgctgagcgcctgcagcagctacttcagagccatgttctgcaacgaccacagagagagcagagagatgctggtggagatcaacggcatcctggcctag

SEQ ID NO: 12066 - DNA, 1830 bp, synthetic construct
  source 1..1830: mol_type = other DNA; note = Synthetic coding sequence
atggccagcctgagcagagccctgagagtggccgccgcccaccccagacagagccccaccagaggcatgggcccctgcaacctgagcagcgccgccggccccaccgccgagaagagcgtgccctaccagagaaccctgaaggagggccagggcaccagcgtggtggcccagggccccagcagacccctgcccagcaccgccaacgtggtggtgatcggcggcggcagcctgggctgccagaccctgtaccacctggccaagctgggcatgagcggcgccgtgctgctggagagagagagactgaccagcggcaccacctggcacaccgccggcctgctgtggcagctgagacccagcgacgtggaggtggagctgctggcccacaccagaagagtggtgagcagagagctggaggaggagaccggcctgcacaccggctggatccagaacggcggcctgttcatcgccagcaacagacagagactggacgagtacaagagactgatgagcctgggcaaggcctacggcgtggagagccacgtgctgagccccgccgagaccaagaccctgtaccccctgatgaacgtggacgacctgtacggcaccctgtacgtgccccacgacggcaccatggaccccgccggcacctgcaccaccctggccagagccgccagcgccagaggcgcccaggtgatcgagaactgccccgtgaccggcatcagagtgtggaccgacgacttcggcgtgagaagagtggccggcgtggagacccagcacggcagcatccagaccccctgcgtggtgaactgcgccggcgtgtgggccagcgccgtgggcagaatggccggcgtgaaggtgcccctggtggccatgcaccacgcctacgtggtgaccgagagaatcgagggcatccagaacatgcccaacgtgagagaccacgacgccagcgtgtacctgagactgcagggcgacgccctgagcgtgggcggctacgaggccaaccccatcttctgggaggaggtgagcgacaagttcgccttcggcctgttcgacctggactgggaggtgttcacccagcacatcgagggcgccatcaacagagtgcccgtgctggagaagaccggcatcaagagcaccgtgtgcggccccgagagcttcacccccgaccacaagcccctgatgggcgaggcccccgagctgagaggcttcttcctgggctgcggcttcaacagcgccggcatgatgctgggcggcggctgcggccaggagctggcccactggatcatccacggcagacccgagaaggacatgcacggctacgacatcagaagattccaccacagcctgaccgaccaccccagatggatcagagagagaagccacgagagctacgccaagaactacagcgtggtgttcccccacgacgagcccctggccggcagaaacatgagaagagaccccctgcacgaggagctgctgggccagggctgcgtgttccaggagagacacggctgggagagacccggctggttccaccccagaggccccgcccccgtgctggagtacgactactacggcgcctacggcagcagagcccacgaggactacgcctacagaagactgctggccgacgagtacaccttcgccttccccccccaccacgacaccatcaagaaggagtgcctggcctgcagaggcgccgccgccgtgttcgacatgagctacttcggcaagttctacctggtgggcctggacgccagaaaggccgccgactggctgttcagcgccgacgtgagcagaccccccggcctgcacagagtgcacgtgtag

SEQ ID NO: 12067 - DNA, 129 bp, synthetic construct
  source 1..129: mol_type = other DNA; note = Synthetic coding sequence
atggacaacatgagccccagactgagagccttcctgagcgagcccatcggcgagaaggacgtgtgctgggtggacggcatcagccacgagctggccatcaacctggtgaccaagggcatcaacaagtag

SEQ ID NO: 12068 - DNA, 3120 bp, synthetic construct
  source 1..3120: mol_type = other DNA; note = Synthetic coding sequence
atggtgagcagcgcccagatgggcttcaacctgcaggccctgctggagcagctgagccaggacgagctgagcaagttcaagtacctgatcaccaccttcagcctggcccacgagctgcagaagatcccccacaaggagatggccagcctgcaggtgttcgagaagatgcacagaatggacctgagcgagagagccaaggacgaggtgagagaggccgccctgaagagcttcaacaagagaaagcccctgagcctgggcatcaccagaaaggagagaccccccctggacgtggacgagatgctggagagattcaagaccgaggcccaggccttcaccgagaccaagggcaacgtgatctgcctgggcaaggaggtgttcaagggcaagaagcccgacaaggacaacagatgcagatacatcctgaagaccaagttcagagagatgtggaagagctggcccggcgacagcaaggaggtgcaggtgatggccgagagatacaagatgctgatccccttcagcaaccccagagtgctgcccggccccttcagctacaccgtggtgctgtacggccccgccggcctgggcaagaccaccctggcccagaagctgatgctggactgggccgaggacaacctgatccacaagttcaagtacgccttctacctgagctgcagagagctgagcagactgggcccctgcagcttcgccgagctggtgttcagagactggcccgagctgcaggacgacatcccccacatcctggcccaggccagaaagatcctgttcgtgatcgacggcttcgacgagctgggcgccgcccccggcgccctgatcgaggacatctgcggcgactgggagaagaagaagcccgtgcccgtgctgctgggcagcctgctgaacagagtgatgctgcccaaggccgccctgctggtgaccaccagacccagagccctgagagacctgagaatcctggccgaggagcccatctacatcagagtggagggcttcctggaggaggacagaagagcctacttcctgagacacttcggcgacgaggaccaggccatgagagccttcgagctgatgagaagcaacgccgccctgttccagctgggcagcgcccccgccgtgtgctggatcgtgtgcaccaccctgaagctgcagatggagaagggcgaggaccccgtgcccacctgcctgaccagaaccggcctgttcctgagattcctgtgcagcagattcccccagggcgcccagctgagaggcgccctgagaaccctgagcctgctggccgcccagggcctgtgggcccagaccagcgtgctgcacagagaggacctggagagactgggcgtgcaggagagcgacctgagactgttcctggacggcgacatcctgagacaggacagagtgagcaagggctgctacagcttcatccacctgagcttccagcagttcctgaccgccctgttctacaccctggagaaggaggaggaggaggacagagacggccacacctgggacatcggcgacgtgcagaagctgctgagcggcgtggagagactgagaaaccccgacctgatccaggccggctactacagcttcggcctggccaacgagaagagagccaaggagctggaggccaccttcggctgcagaatgagccccgacatcaagcaggagctgctgagatgcgacatcagctgcaagggcggccacagcaccgtgaccgacctgcaggagctgctgggctgcctgtacgagagccaggaggaggagctggtgaaggaggtgatggcccagttcaaggagatcagcctgcacctgaacgccgtggacgtggtgcccagcagcttctgcgtgaagcactgcagaaacctgcagaagatgagcctgcaggtgatcaaggagaacctgcccgagaacgtgaccgccagcgagagcgacgccgaggtggagagaagccaggacgaccagcacatgctgcccttctggaccgacctgtgcagcatcttcggcagcaacaaggacctgatgggcctggccatcaacgacagcttcctgagcgccagcctggtgagaatcctgtgcgagcagatcgccagcgacacctgccacctgcagagagtggtgttcaagaacatcagccccgccgacgcccacagaaacctgtgcctggccctgagaggccacaagaccgtgacctacctgaccctgcagggcaacgaccaggacgacatgttccccgccctgtgcgaggtgctgagacaccccgagtgcaacctgagatacctgggcctggtgagctgcagcgccaccacccagcagtgggccgacctgagcctggccctggaggtgaaccagagcctgacctgcgtgaacctgagcgacaacgagctgctggacgagggcgccaagctgctgtacaccaccctgagacaccccaagtgcttcctgcagagactgagcctggagaactgccacctgaccgaggccaactgcaaggacctggccgccgtgctggtggtgagcagagagctgacccacctgtgcctggccaagaaccccatcggcaacaccggcgtgaagttcctgtgcgagggcctgagataccccgagtgcaagctgcagaccctggtgctgtggaactgcgacatcaccagcgacggctgctgcgacctgaccaagctgctgcaggagaagagcagcctgctgtgcctggacctgggcctgaaccacatcggcgtgaagggcatgaagttcctgtgcgaggccctgagaaagcccctgtgcaacctgagatgcctgtggctgtggggctgcagcatcccccccttcagctgcgaggacctgtgcagcgccctgagctgcaaccagagcctggtgaccctggacctgggccagaaccccctgggcagcagcggcgtgaagatgctgttcgagaccctgacctgcagcagcggcaccctgagaaccctgagactgaagatcgacgacttcaacgacgagctgaacaagctgctggaggagatcgaggagaagaacccccagctgatcatcgacaccgagaagcaccacccctgggccgagagacccagcagccacgacttcatgatctag

SEQ ID NO: 12069 - DNA, 1899 bp, synthetic construct; identical to SEQ ID NO: 9855
  source 1..1899: mol_type = other DNA; note = Synthetic coding sequence

SEQ ID NO: 12070 - DNA, 189 bp, synthetic construct
  source 1..189: mol_type = other DNA; note = Synthetic coding sequence
atgagcatcagcagcgacgaggtgaacttcctggtgtacagatacctgcaggagagcggcttcagccacagcgccttcaccttcggcatcgagagccacatcagccagagcaacatcaacggcgccctggtgccccccgccgccctgatcagcatcatccagaagggcctgcagtacgtggaggcctag

SEQ ID NO: 12071 - DNA, 417 bp, synthetic construct
  source 1..417: mol_type = other DNA; note = Synthetic coding sequence
atggagcccagcgcccagcagctgcagctggccgccagcctgcccgccaacctgagcaacttctgccagggcagcgagatgcccaccaccagcagacccgccctggacgtgaagggcggcaccagccccgccaaggaggacgccaaccaggagatgagcagcgtggcctacagcaacctggccgtgaaggacagaaaggccgtggccatcctgcactaccccggcgtggccagcaacggcaccaaggccagcggcgcccccaccagcagcagcggcagccccatcggcagccccaccaccaccccccccaccaagccccccagcttcaacctgcaccccgccccccacctgctggccagcatgcacctgcagaagctgaacagccagtaccagggcatggccgccgccaccccctag

SEQ ID NO: 12072 - DNA, 1473 bp, synthetic construct; identical to SEQ ID NO: 9885
  source 1..1473: mol_type = other DNA; note = Synthetic coding sequence

SEQ ID NO: 12073 - DNA, 357 bp, synthetic construct
  source 1..357: mol_type = other DNA; note = Synthetic coding sequence
atggccagcagcgccagagagcacctgctgttcgtgagaagaagaaacccccagatgagatacaccctgagccccgagaacctgcagagcctggccgcccagagcagcatgcccgagaacatgaccctgcagagagccaacagcgacaccgacctggtgaccagcgagagcagaagcagcctgaccgccagcatgtacgagtacaccctgggccaggcccagaacctgatcatcttctgggacatcaaggaggaggtggaccccagcgactggatcggcctgtaccacatcgacgagaacagccccgccaacttctgggacagcaagaacagaggcgtgaccggcacccagaagtag

SEQ ID NO: 12074 - DNA, 1620 bp, synthetic construct; identical to SEQ ID NO: 10018
  source 1..1620: mol_type = other DNA; note = Synthetic coding sequence

SEQ ID NO: 12075 - DNA, 270 bp, synthetic construct; identical to SEQ ID NO: 11466
  source 1..270: mol_type = other DNA; note = Synthetic coding sequence

SEQ ID NO: 12076 - DNA, 909 bp, synthetic construct; identical to SEQ ID NO: 9334
  source 1..909: mol_type = other DNA; note = Synthetic coding sequence

SEQ ID NO: 12077 - DNA, 1521 bp, synthetic construct
  source 1..1521: mol_type = other DNA; note = Synthetic coding sequence
atgagcgtgctgagccccggcgacctgaagcccaagagaggcagcccccacagaggcagcctggacagaaccgacgccagcaccgacctggccatgagaagctggcccagcgagctgggcagcagaacctgcagcaccagcgccaccaccaccgcccccagcaacagcacccccatcgccagacaccccggcagaaccaagggctacaacagcgacgacaacctgtgcgagcccagcctggagttcgaggtgcccaaccacagacagtacgtgagcagacccagcagcctggagagcagcagaaacaccagcagcaacagcagccccctgaacctgaagggcagcagcgagcagctgcacggcagaagcgagagcttcagcagcgaggacctgatccccagcagagacctggccaccctgcccagagaggccagcacccccggcagaaacgccctgggcagacacgagtaccccctgcccagaaacggccccctgccccaggagggcgcccagaagagaggcaccgcccccccctacgtgggcgtgagaccctgcagcgccagccccagcagcgagatggtgaccctggaggagttcctggaggagagcaacagaagcagccccacccacgacacccccagctgcagagacgacctgctgagcgactacttcagaaaggccagcgacccccccgccatcggcggccagcccggcccccccgccaagaaggagggcgccaagatgcccaccaacttcgtggcccccaccgtgaagatggccgcccccaccagcgagggcagacccctgaagcccggccagtacgtgaagcccaacttcagactgaccgaggccgaggccccccccagcgtggcccccagacaggcccagcccccccagagcctgagcctgggcagacccagacaggcccccgaggccctgggcggcagagagaccggcagccacaccctgcagagccccgccccccccagcagccacagcctggccagagagagaacccccctggtgggcaaggccggcagcagctgccagggccccggccccagaagcagacccctggacaccagaagattcagcctggccccccccaaggaggagagactggcccccctgcaccagagcgccaccgcccccgccatcgccaccgccggcgccggcgccgccgccgccggcagcggcagcaacagccagctgctgcacttcagccccgccgccgcccccgccgccagaaccaagcccaaggccccccccagaagcggcgaggtggccaccatcacccccgtgagagccggcctgagcctgagcgagggcgacggcgtgcccggccagggctgcagcgagggcctgcccgccaagagccccggcagaagccccgacctggccccccacctgggcagagccctggaggactgcagcagaggcagcgtgagcaagagcagccccgccagccccgagcccggcggcgacccccagaccgtgtggtacgagtacggctgcgtgtag

SEQ ID NO: 12078 - DNA, 678 bp, synthetic construct
  source 1..678: mol_type = other DNA; note = Synthetic coding sequence
atggcccagaccgtgcccccctgcgagctgccctgcaaggagtacgacgtggccagaaacaccggcgcctacaccagcagcggcctggccaccgccagcttcagaaccagcaagtacctgctggaggagtggttccagaactgctacgccagataccaccaggccttcgccgacagagaccagagcgagagacagagacacgagagccagcagctggccaccgagacccaggccctggcccagagaacccagcaggacagcaccagaaccgtgggcgagagactgcaggacacccacagctggaagagcgagctgcagagagagatggaggccctggccgccgagaccaacctgctgctggcccagaagcagagactggagagagccctggacgccaccgaggtgcccttcagcatcaccaccgacaacctgcagtgcagagagagaagagagcaccccaacctggtgagagaccacgtggagaccgagctgctgaaggccctgccccccgccctgagccagtgcctgaagaacagctgcagcagcagaaagctgagcgccagaaacaagggcacctgccagctgatggagaccctgaccgtgcacggcgaggccaaccccggcatcgagggcagaagaaccagagccctggcccacaaggaggtgcccagcggctag

SEQ ID NO: 12079 - DNA, 309 bp, synthetic construct
  source 1..309: mol_type = other DNA; note = Synthetic coding sequence
atggccaacgacagccccgccaagagcctggtggacatcgacctgagcagcctgagagaccccgccggcatcttcgagctggtggaggtggtgggcaacggcacctacggccaggtgtacaagggcagacacgtgaagaccggccagctggccgccatcaaggtgatggacgtgaccgaggacgaggaggaggagatcaagctggagatcaacatgctgaagaagtacagccaccacagaaacatcgccacctactacggcgccttcatcaagaagagcccccccggccacgacgaccagctgtggtag

SEQ ID NO: 12080 - DNA, 369 bp, synthetic construct
  source 1..369: mol_type = other DNA; note = Synthetic coding sequence
atggccaccagcgcccccctgagaagcctggaggaggaggtgacctgcagcatctgcctggactacctgagagaccccgtgaccatcgactgcggccacgtgttctgcagaagctgcaccaccgacgtgagacccatcagcggcagcagacccgtgtgccccctgtgcaagaagcccttcaagaaggagaacatcagacccgtgtggcagctggccagcctggtggagaacatcgagagactgaaggtggacaagggcagacagcccggcgaggtgaccagagagcagcaggacgccaagctgtgcgagagacacagagagaagctgcactactactgcgaggacgacggcaagctgctgtgcgtgtag

SEQ ID NO: 12081 - DNA, 312 bp, synthetic construct
  source 1..312: mol_type = other DNA; note = Synthetic coding sequence
atgagcggcggcctgctgaaggccctgagaagcgacagctacgtggagctgagccagtacagagaccagcacttcagaggcgacaacgaggagcaggagaagctgctgaagaagagctacgccgagaacgccatgagatacatcaacggcaccagactggacgacagaatcatcagaaccgactgggacgccggcttcaaggagggcagacagtacggcagaggcagaagcggcggccaggtgagagacgagtacagacaggactacgacgccggcagaggcggctacggcaagctggcccagaaccagtag

SEQ ID NO: 12082 - DNA, 894 bp, synthetic construct
  source 1..894: mol_type = other DNA; note = Synthetic coding sequence
atgtggcccttccccagcagaagcctgttccccccccccacccaggcctggctgcagaccgtgagcagcgaccccgaggcccagggctggggcgcctggaacgagaccaaggagatcctgggccccgagggcggcgagggcaaggaggagaaggaggaggaggaggacgccgaggaggaccaggacggcgacgccggcttcctgctgagcctgctggagcaggagaacctggccgagtgccccctgcccgaccaggagctggaggccatcaagatgaaggtgtgcgccatggagcaggccgagggcacccccagaccccccggcgtgcagcagcaggccgaggaggaggagggcaccgccgccggccagctgctgagccccgagaccgtgggctgccccctgagcggcacccccgaggagaaggtggaggccgaccacagaagcgtgtacgtgggcaacctgtgcctgcacagagtgtgccaccagggcctgagagccggcagaagaggcgccggccccgagcccctgcccggccccggccaccagggcgccgccgagaagaaccagctgccctgggaccagctgcacagacccagaggccccagcagaacccccagactgcagggcggcaccctgcccccccagagaccccccggccaggcccccgcccagaccaccagagccgagcccggcccctggaagatcctgaccatggtgttcaccgtgctgaagggcagacccgacttcgagagaggcgccggcgcctggatcagaagcaagcccctggtgctgcaccccggcgccggcgccggcagcggcgccggcgccagacccgaggagagaggcgtgcagagcagccactggccccccctgggcggcggcatggcccagtag

SEQ ID NO: 12083 - DNA, 1059 bp, synthetic construct; identical to SEQ ID NO: 11224
  source 1..1059: mol_type = other DNA; note = Synthetic coding sequence

SEQ ID NO: 12084 - DNA, 363 bp, synthetic construct
  source 1..363: mol_type = other DNA; note = Synthetic coding sequence
atggagctggacctgttcctgggcctggacgacgtgttccccagactgctgcacggcctgctgcacagagccttcagcgtgttcctgttcaacaccgagaacaagctgctgctgcagcagagaagcgacgccaagatcaccttccccggctgcttcaccaacacctgctgcagccaccccctgagcaaccccgccgagctggaggagagcgacgccctgggcgtgagaagagccgcccagagaagactgaaggccgagctgggcatccccctggaggaggtgaccagcagccccacccagccctacaagctgaagcccaagcacaccatcaagagattcctgatcaagttcctgaacagctag

SEQ ID NO: 12085 - DNA, 339 bp, synthetic construct
  source 1..339: mol_type = other DNA; note = Synthetic coding sequence
atggaggagatccccgcccaggaggccgccggcagccccagagtgcagttccagagcctggagacccagagcgagtgcctgagccccgagccccagttcgtgcaggacaccgacatggagcagggcctgaccggcggcttccccatcagcaagcccgacggcatcagccagctggagcaggacctgcaggtgttcgacctggagaccaagaccagagaggtgctgagagacgactgcagcgacggcgagaccagagaggagaacaagctgctgatccccaagcagaagatcagcgaggaggtgcacagctacaaggtgagagtgggcagactgaagtag

SEQ ID NO: 12086 - DNA, 1818 bp, synthetic construct
  source 1..1818: mol_type = other DNA; note = Synthetic coding sequence
atgagcgagatcctgaagcagaaggacaccgagcccaccaacttcaaggtggccgccggcaccctggacgccagcaccaagatctacgccgtgagagtggacgccgtgcacgccgacgtgtacagagtgctgggcggcctgggcaaggacgcccccagcctggaggaggtggagggccacgtggccgacggcagcgccaccgagatgggcaccaccaagaaggccgtgaagcccaagaagaagcacctgcacagaaccatcgagcagaacatcaacaacctgaacgtgagcgaggccgacagaaagtgcgagatcgaccccatgttccagaagaccgccgccagcttcgacgagtgcagcaccgccggcgtgttcctgagcaccctgcactgccaggactacagaagcgagctgctgttccccagcgacgtgcagaccctgagcaccggcgagcccctggagctgcccgagctgggctgcgtggagatgaccgacctgaaggcccccctgcagcagtgcgccgaggacagacagatctgccccagcctggccggcttccagttcacccagtgggacagcgagacccacaacgagagcgtgagcgccctggtggacaagttcaagaagaacgaccaggtgttcgacatcaacgccgaggtggacgagagcgactgcggcgacttccccgacggcagcctgggcgacgacttcgacgccaacgacgagcccgaccacaccgccgtgggcgaccacgaggagttcagaagctggaaggagccctgccaggtgcagagctgccaggaggagatgatcagcctgggcgacggcgacatcagaaccatgtgccccctgctgagcatgaagcccggcgagtacagctacttcagccccagaaccatgagcatgtgggccggccccgaccactggagattcagacccagaagaaagcaggacgcccccagccagagcgagaacaagaagaagagcaccaagaaggacttcgagatcgacttcgaggacgacatcgacttcgacgtgtacttcagaaagaccaaggccgccaccatcctgaccaagagcaccctggagaaccagaactggagagccaccaccctgcccaccgacttcaactacaacgtggacaccctggtgcagctgcacctgaagcccggcaccagactgctgaagatggcccagggccacagagtggagaccgagcactacgaggagatcgaggactacgactacaacaaccccaacgacaccagcaacttctgccccggcctgcaggccgccgacagcgacgacgaggacctggacgacctgttcgtgggccccgtgggcaacagcgacctgagcccctacccctgccacccccccaagaccgcccagcagaacggcgacacccccgaggcccagggcctggacatcaccacctacggcgagagcaacctggtggccgagccccagaaggtgaacaagatcgagatccactacgccaagaccgccaagaagatggacatgaagaagctgaagcagagcatgtggagcctgctgaccgccctgagcggcaaggaggccgacgccgaggccaaccacagagaggccggcaaggaggccgccctggccgaggtggccgacgagaagatgctgagcggcctgaccaaggacctgcagagaagcctgccccccgtgatggcccagaacctgagcatccccctggccttcgcctgcctgctgcacctggccaacgagaagaacctgaagctggagggcaccgaggacctgagcgacgtgctggtgagacagggcgactag

SEQ ID NO: 12087 - DNA, 2253 bp, synthetic construct
  source 1..2253: mol_type = other DNA; note = Synthetic coding sequence
atgagcagcagccccgtgaacgtgaagaagctgaaggtgagcgagctgaaggaggagctgaagaagagaagactgagcgacaagggcctgaaggccgagctgatggagagactgcaggccgccctggacgacgaggaggccggcggcagacccgccatggagcccggcaacggcgacgaccagggcttccaggagggcgaggacgagctgggcgacgaggaggagggcgccggcgacgagaacggccacggcgagcagcagccccagccccccgccacccagcagcagcagccccagcagcagagaggcgccgccaaggaggccgccggcaagagcagcggccccaccagcctgttcgccgtgaccgtggccccccccggcgccagacagggccagcagcaggccggcggcaagaagaaggccgagggcggcggcggcggcggcagacccggcgcccccgccgccggcgacggcaagaccgagcagaagggcggcgacaagaagagaggcgtgaagagacccagagaggaccacggcagaggctacttcgagtacatcgaggagaacaagtacagcagagccaagagcccccagccccccgtggaggaggaggacgagcacttcgacgacaccgtggtgtgcctggacacctacaactgcgacctgcacttcaagatcagcagagacagactgagcgccagcagcctgaccatggagagcttcgccttcctgtgggccggcggcagagccagctacggcgtgagcaagggcaaggtgtgcttcgagatgaaggtgaccgagaagatccccgtgagacacctgtacaccaaggacatcgacatccacgaggtgagaatcggctggagcctgaccaccagcggcatgctgctgggcgaggaggagttcagctacggctacagcctgaagggcatcaagacctgcaactgcgagaccgaggactacggcgagaagttcgacgagaacgacgtgatcacctgcttcgccaacttcgagagcgacgaggtggagctgagctacgccaagaacggccaggacctgggcgtggccttcaagatcagcaaggaggtgctggccggcagacccctgttcccccacgtgctgtgccacaactgcgccgtggagttcaacttcggccagaaggagaagccctacttccccatccccgaggagtacaccttcatccagaacgtgcccctggaggacagagtgagaggccccaagggccccgaggagaagaaggactgcgaggtggtgatgatgatcggcctgcccggcgccggcaagaccacctgggtgaccaagcacgccgccgagaaccccggcaagtacaacatcctgggcaccaacaccatcatggacaagatgatggtggccggcttcaagaagcagatggccgacaccggcaagctgaacaccctgctgcagagagccccccagtgcctgggcaagttcatcgagatcgccgccagaaagaagagaaacttcatcctggaccagaccaacgtgagcgccgccgcccagagaagaaagatgtgcctgttcgccggcttccagagaaaggccgtggtggtgtgccccaaggacgaggactacaagcagagaacccagaagaaggccgaggtggagggcaaggacctgcccgagcacgccgtgctgaagatgaagggcaacttcaccctgcccgaggtggccgagtgcttcgacgagatcacctacgtggagctgcagaaggaggaggcccagaagctgctggagcagtacaaggaggagagcaagaaggccctgccccccgagaagaagcagaacaccggcagcaagaagagcaacaagaacaagagcggcaagaaccagttcaacagaggcggcggccacagaggcagaggcggcttcaacatgagaggcggcaacttcagaggcggcgcccccggcaacagaggcggctacaacagaagaggcaacatgccccagagaggcggcggcggcggcggcagcggcggcatcggctacccctaccccagagcccccgtgttccccggcagaggcagctacagcaacagaggcaactacaacagaggcggcatgcccaacagaggcaactacaaccagaacttcagaggcagaggcaacaacagaggctacaagaaccagagccagggctacaaccagtggcagcagggccagttctggggccagaagccctggagccagcactaccaccagggctactactag

SEQ ID NO: 12088 - DNA, 804 bp, synthetic construct
  source 1..804: mol_type = other DNA; note = Synthetic coding sequence
atgtgggaccagagactggtgaagctggccctgctgcagcacctgagagccttctacggcatcaaggtgaagggcgtgagaggccagtgcgacagaagaagacacgagaccgccgccaccgagatcggcggcaagatcttcggcgtgcccttcaacgccctgccccacagcgccgtgcccgagtacggccacatccccagcttcctggtggacgcctgcaccagcctggaggagcacatccacaccgagggcctgttcagaaagagcggcagcgtgatcagactgaaggccctgaagaacaaggtggaccacggcgagggctgcctgagcagcgcccccccctgcgacatcgccggcctgctgaagcagttcttcagagagctgcccgagcccatcctgcccgccgacctgcacgaggccctgctgaaggcccagcagctgggcaccgaggagaagaacaaggccatcctgctgctgagctgcctgctggccgaccacaccgtgcacgtgctgagatacttcttcaacttcctgagaaacgtgagcctgagaagcagcgagaacaagatggacagcagcaacctggccgtgatcttcgcccccaacctgctgcagaccagcgagggccacgagaagatgagcagcaacgccgagaagaagggcgtgtaccagaccctgagctggaagagataccagccctgctgggtgctgatggtgagcgtgctgctgcaccactggaaggccctgaagaaggtgaacatgaagctgctggtgaacatcagagagagagaggacaacgtgtag

SEQ ID NO: 12089 - DNA, 600 bp, synthetic construct
  source 1..600: mol_type = other DNA; note = Synthetic coding sequence
atgccccacaagatcggcttcgtggtggtgagcagcagcggccacgaggacggcttcagcgccagagagctgatgatccacgcccccaccgtgagcggctggagaagccccagctacgtgagcctgtgcgacaacgagaagaccggctgcaaggccagagagctgaagagcgtgtacgtggacgccgtgggccagttcctgaagctgatcttccaccagaaccacgtgaacaagtacaacatctacaaccaggtggccctggtggccatcaacatcatcggcgaccccgccgacttcagcgacgagagcaacaccgccagcagagagaagctgatcgaccactacctgggccacaacagcgaggaccccgccctggagggcacctacgccagaaagagcgactacatcagccccctggacgacctggccttcgacatgtaccaggaccccgaggtggcccagatcatcagaaagctggacgagagaaagagagaggccgtgcagaaggagagatacgactacgccaagaagctgaagcaggccatcgccgacctgcagaaggtgggcgagagactgggcagatacgaggtggagaagtag

SEQ ID NO: 12090 - DNA, 471 bp, synthetic construct
  source 1..471: mol_type = other DNA; note = Synthetic coding sequence
atgaccgaggacagccagagaaacttcagaagcgtgtactacgagaaggtgggcttcagaggcgtggaggagaagaagagcctggagatcctgctgaaggacgacagactggacaccgagaagctgtgcaccttcagccagagattccccctgcccagcatgtacagagccctggtgtggaaggtgctgctgggcatcctgcccccccaccacgagagccacgccaaggtgatgatgtacagaaaggagcagtacctggacgtgctgcacgccctgaaggtggtgagattcgtgagcgacgccaccccccaggccgaggtgtacctgagaatgtaccagctggagagcggcaagctgcccagaagccccagcttccccctggagcccgacgacgaggtgttcctggccatcgccaaggccatggaggagatggtggaggacagcgtggactgctactggatcaccagatag

SEQ ID NO: 12091 - DNA, 2730 bp, synthetic construct
  source 1..2730: mol_type = other DNA; note = Synthetic coding sequence
atgatcagacacgccggcgcccccgccagaggcgaccccaccggccccgtgcccgtggtgggcaagggcgaggaggaggaggaggaggacggcatgagactgtgcctgcccgccaaccccaagaactgcctgccccacagaagaggcatcagcatcctggagaagctgatcaagacctgccccgtgtggctgcagctgagcctgggccaggccgaggtggccagaatcctgcacagagtggtggccggcatgttcctggtgagaagagacagcagcagcaagcagctggtgctgtgcgtgcacttccccagcctgaacgagagcagcgccgaggtgctggagtacaccatcaaggaggagaagagcatcctgtacctggagggcagcgccctggtgttcgaggacatcttcagactgatcgccttctactgcgtgagcagagacctgctgcccttcaccctgagactgccccaggccatcctggaggccagcagcttcaccgacctggagaccatcgccaacctgggcctgggcttctgggacagcagcctgaaccccccccaggagagaggcaagcccgccgagccccccagagacagagcccccggcttccccctggtgagcagcctgagacccaccgcccacgacgccaactgcgcctgcgagatcgagctgagcgtgggcaacgacagactgtggttcgtgaaccccatcttcatcgaggactgcagcagcgccctgcccaccgaccagccccccctgggcaactgccccgccagacccctgccccccaccagcgacgccaccagccccaccagcagatgggcccccagaagaccccccccccccccccccgtgctgcccctgcagccctgcagccccgcccagcccccccccctgcccgccaagaagaacctgcccaccgccccccccagaagaagagtgagcgagagagtgagcctggaggaccagagccccggcatggccgccgagggcgaccagctgagcctgcccccccagggcaccagcgacggccccgaggacacccccagagagagcaccgagcagggccaggacaccgaggtgaaggccagcgacccccacagcatgcccgagctgcccagaaccgccaagcagccccccgtgcccccccccagaaagaagagaatcagcagacagctggccagcaccctgcccgcccccctggagaacgccgagctgtgcacccaggccatggccctggagacccccacccccggcccccccagagagggccagagccccgccagccaggccggcacccagcacccccccgcccaggccaccgcccacagccagagcagccccgagttcaagggcagcctggccagcctgagcgacagcctgggcgtgagcgtgatggccaccgaccaggacagctacagcaccagcagcaccgaggaggagctggagcagttcagcagccccagcgtgaagaagaagcccagcatgatcctgggcaaggccagacacagactgagcttcgccagcttcagcagcatgttccacgccttcctgagcaacaacagaaagctgtacaagaaggtggtggagctggcccaggacaagggcagctacttcggcagcctggtgcaggactacaaggtgtacagcctggagatgatggccagacagaccagcagcaccgagatgctgcaggagatcagaaccatgatgacccagctgaagagctacctgctgcagagcaccgagctgaaggccctggtggaccccgccctgcacagcgaggaggagctggaggccatcgtggagagcgccctgtacaagtgcgtgctgaagcccctgaaggaggccatcaacagctgcctgcaccagatccacagcaaggacggcagcctgcagcagctgaaggagaaccagctggtgatcctggccaccaccaccaccgacctgggcgtgaccaccagcgtgcccgaggtgcccatgatggagaagatcctgcagaagttcaccagcatgcacaaggcctacagccccgagaagaagatcagcatcctgctgaagacctgcaagctgatctacgacagcatggccctgggcaaccccggcaagccctacggcgccgacgacttcctgcccgtgctgatgtacgtgctggccagaagcaacctgaccgagatgctgctgaacgtggagtacatgatggagctgatggaccccgccctgcagctgggcgagggcagctactacctgaccaccacctacggcgccctggagcacatcaagagctacgacaagatcaccgtgaccagacagctgagcgtggaggtgcaggacagcatccacagatgggagagaagaagaaccctgaacaaggccagagccagcagaagcagcgtgcaggacttcatctgcgtgagctacctggagcccgagcagcaggccagaaccctggccagcagagccgacacccaggcccaggccctgtgcgcccagtgcgccgagaagttcgccgtggagagaccccaggcccacagactgttcgtgctggtggacggcagatgcttccagctggccgacgacgccctgccccactgcatcaagggctacctgctgagaagcgagcccaagagagacttccacttcgtgtacagacccctggacggcggcggcggcggcggcggcggcagccccccctgcctggtggtgagagagcccaacttcctgtag

SEQ ID NO: 12092 - DNA, 1728 bp, synthetic construct
  source 1..1728: mol_type = other DNA; note = Synthetic coding sequence
atgagcagcgacgaggagaagtacagcctgcccgtggtgcagaacgacagcagcagaggcagcagcgtgagcagcaacctgcaggaggagtacgaggagctgctgcactacgccatcgtgacccccaacatcgagccctgcgccagccagagcagccaccccaagggcgagctggtgcccgacgtgagaatcagcaccatccacgacatcctgcacagccagggcaacaacagcgaggtgagagagaccgccatcgaggtgggcaagggctgcgacttccacatcagcagccacagcaagaccgacgagagcagccccgtgctgagccccagaaagcccagccaccccgtgatggacttcttcagcagccacctgctggccgacagcagcagccccgccaccaacagcagccacaccgacgcccacgagatcctggtgagcgacttcctggtgagcgacgagaacctgcagaagatggagaacgtgctggacctgtggagcagcggcctgaagaccaacatcatcagcgagctgagcaagtggagactgaacttcatcgactggcacagaatggagatgagaaaggagaaggagaagcacgccgcccacctgaagcagctgtgcaaccagatcaacgagctgaaggagctgcagaagaccttcgagatcagcatcggcagaaaggacgaggtgatcagcagcctgagccacgccatcggcaagcagaaggagaagatcgagctgatgagaaccttcttccactggagaatcggccacgtgagagccagacaggacgtgtacgagggcaagctggccgaccagtactaccagagaaccctgctgaagaaggtgtggaaggtgtggagaagcgtggtgcagaagcagtggaaggacgtggtggagagagcctgccaggccagagccgaggaggtgtgcatccagatcagcaacgactacgaggccaaggtggccatgctgagcggcgccctggagaacgccaaggccgagatccagagaatgcagcacgagaaggagcacttcgaggacagcatgaagaaggccttcatgagaggcgtgtgcgccctgaacctggaggccatgaccatcttccagaacagaaacgacgccggcatcgacagcaccaacaacaagaaggaggagtacggccccggcgtgcagggcaaggagcacagcgcccacctggaccccagcgccccccccatgcccctgcccgtgaccagccccctgctgcccagcccccccgccgccgtgggcggcgccagcgccaccgccgtgcccagcgccgccagcatgaccagcaccagagccgccagcgccagcagcgtgcacgtgcccgtgagcgccctgggcgccggcagcgccgccaccgccgccagcgaggagatgtacgtgcccagagtggtgaccagcgcccagcagaaggccggcagaaccatcaccgccagaatcaccggcagatgcgacttcgccagcaagaacagaatcagcagcagcctggccatcatgggcgtgagcccccccatgagcagcgtggtggtggagaagcaccaccccgtgaccgtgcagaccatcccccaggccaccgccgccaagtaccccagaaccatccaccccgagagcagcaccagcgccagcagaagcctgggcaccagaagcgcccacacccagagcctgaccagcgtgcacagcatcaaggtggtggactag

SEQ ID NO: 12093 - DNA, 2091 bp, synthetic construct
  source 1..2091: mol_type = other DNA; note = Synthetic coding sequence
atggccaactacagaaacaccagcgagatccccctggtgctggtgggcacccaggacgccatcagcagcgccaaccccagagtgatcgacgacgccagagccagaaagctgagcaacgacctgaagagatgcacctactacgagacctgcgccacctacggcctgaacgtggagagagtgttccaggacgtggcccagaagatcgtggccaccagaaagaagcagcagctgagcatcggcccctgcaagagcctgcccaacagccccagccacagcagcgtgtgcagcgcccaggtgagcgccgtgcacatcagccagaccagcaacggcggcggcagcctgagcgactacagcagcagcgtgcccagcacccccagcaccagccagaaggagctgagaatcgacgtgccccccaccgccaacacccccacccccgtgagaaagcagagcaagagaagaagcaacctgttcaccagcagaaagggcagcgaccccgacaaggagaagaagggcctggagagcagagccgacagcatcggcagcggcagagccatccccatcaagcagggcatgctgctgaagagaagcggcaagagcctgaacaaggagtggaagaagaagtacgtgaccctgtgcgacaacggcgtgctgacctaccaccccagcctgcacgactacatgcagaacgtgcacggcaaggagatcgacctgctgagaaccaccgtgaaggtgcccggcaagagaccccccagagccaccagcgcctgcgcccccatcagcagccccaagaccaacggcctgagcaaggacatgagcagcctgcacatcagccccaacagcggcaacgtgaccagcgccagcggcagccagatggccagcggcatcagcctggtgagcttcaacagcagacccgacggcatgcaccagagaagctacagcgtgagcagcgccgaccagtggagcgaggccaccgtgatcgccaacagcgccatcagcagcgacaccggcctgggcgacagcgtgtgcagcagccccagcatcagcagcaccaccagccccaagctggaccccccccccagcccccacgccaacagaaagaagcacagaagaaagaagagcaccagcaacttcaaggccgacggcctgagcggcaccgccgaggagcaggaggagaacttcgagttcatcatcgtgagcctgaccggccagacctggcacttcgaggccaccacctacgaggagagagacgcctgggtgcaggccatcgagagccagatcctggccagcctgcagagctgcgagagcagcaagaacaagagcagactgaccagccagagcgaggccatggccctgcagagcatcagaaacatgagaggcaacagccactgcgtggactgcgagacccagaaccccaactgggccagcctgaacctgggcgccctgatgtgcatcgagtgcagcggcatccacagaaacctgggcacccacctgagcagagtgagaagcctggacctggacgactggcccgtggagctgatcaaggtgatgagcagcatcggcaacgagctggccaacagcgtgtgggaggagagcagccagggcagaaccaagcccagcgtggacagcaccagagaggagaaggagagatggatcagagccaagtacgagcagaagctgttcctggcccccctgccctgcaccgagctgagcctgggccagcacctgctgagagccaccgccgacgaggacctgagaaccgccatcctgctgctggcccacggcagcagagacgaggtgaacgagacctgcggcgagggcgacggcagaaccgccctgcacctggcctgcagaaagggcaacgtggtgctggcccagctgctgatctggtacggcgtggacgtgaccgccagagacgcccacggcaacaccgccctggcctacgccagacaggccagcagccaggagtgcatcgacgtgctgctgcagtacggctgccccgacgagagattcgtgctgatggccacccccaacctgagcagaagaaacaacaacagaaacaacagcagcggcagagtgcccaccatcatctag

SEQ ID NO: 12094 - DNA, 270 bp, synthetic construct; identical to SEQ ID NO: 11466
  source 1..270: mol_type = other DNA; note = Synthetic coding sequence

SEQ ID NO: 12095 - DNA, 1785 bp, synthetic construct
  source 1..1785: mol_type = other DNA; note = Synthetic coding sequence
atgaccgacaccagaagaagagtgaaggtgtacaccctgaacgaggacagacagtgggacgacagaggcaccggccacgtgagcagcggctacgtggagagactgaagggcatgagcctgctggtgagagccgagagcgacggcagcctgctgctggagagcaagatcaaccccaacaccgcctaccagaagcagcaggaggacgagaagttcctgaccgacctgttcgcccagctgaccgacgaggccaccgacgaggagaagagacaggagctggtgaacttcctgaaggagttctgcgccttcagccagaccctgcagccccagaacagagacgccttcttcaagaccctgagcaacatgggcatcctgcccgccctggaggtgatcctgggcatggacgacacccaggtgagaagcgccgccaccgacatcttcagctacctggtggagtacaaccccagcatggtgagagagttcgtgatgcaggaggcccagcagaacgacgacgtgagcaagaagctgaccgagcagaagatcaccagcaaggacatcctgctgatcaacctgatcatcgagcacatgatctgcgacaccgaccccgagctgggcggcgccgtgcagctgatgggcctgctgagaaccctggtggaccccgagaacatgctggccaccgccaacaagaccgagaagaccgagttcctgggcttcttctacaagcactgcatgcacgtgctgaccgcccccctgctggccaacaccaccgaggacaagcccagcaaggacgacttccagaccgcccagctgctggccctggtgctggagctgctgaccttctgcgtggagcaccacacctaccacatcaagaactacatcatcaacaaggacatcctgagaagagtgctggtgctgatggccagcaagcacgccttcctggccctgtgcgccctgagattcaagagaaagatcatcggcctgaaggacgagttctacaacagatacatcatgaagagcttcctgttcgagcccgtggtgaaggccttcctgaacaacggcagcagatacaacctgatgaacagcgccatcatcgagatgttcgagttcatcagagtggaggacatcaagagcctgaccgcccacgtgatcgagaactactggaaggccctggaggacgtggactacgtgcagaccttcaagggcctgaagctgagattcgagcagcagagagagagacaggacaaccccaagctggacagcatgagaagcatcctgagaaaccacagatacagaagagacgccagaaccctggaggacgaggaggagatgtggttcaacaccgacgaggacgacatggaggacggcgaggccgtggtgagccccagcgacaagaccaagaacgacgacgacatcatggaccccatcagcaagttcatggagagaaagaagctgaaggagagcgaggagaaggaggtgctgctgaagaccaacctgagcggcagacagagccccagcttcaagctgagcctgagcagcggcaccaagaccaacctgaccagccagagcagcaccaccaacctgcccggcagccccggcagccccggcagccccggcagccccggcagccccggcagcgtgcccaagaacaccagccagaccgccgccatcaccaccaagggcggcctggtgggcctggtggactaccccgacgacgacgaggacgacgacgaggacgaggacaaggaggacaccctgcccctgagcaagaaggccaagttcgacagctag

SEQ ID NO: 12096 - DNA, 522 bp, synthetic construct
  source 1..522: mol_type = other DNA; note = Synthetic coding sequence
atgttcaccgagggcgaggagatgtacctgcagggcagcaccgtgtggcaccccgactgcaagcagagcaccaagaccgaggagaagctgagacccaccagaaccagcagcgagagcatctacagcagacccggcagcagcatccccggcagccccggccacaccatctacgccaaggtggacaacgagatcctggactacaaggacctggccgccatccccaaggtgaaggccatctacgacatcgagagacccgacctgatcacctacgagcccttctacaccagcggctacgacgacaagcaggagagacagagcctgggcgagagccccagaaccctgagccccacccccagcgccgagggctaccaggacgtgagagacagaatgatccacagaagcaccagccagggcagcatcaacagccccgtgtacagcagacacagctacacccccaccaccagcagaagcccccagcacttccacagacccgaccagggcatcaacatctacagaaagtag

SEQ ID NO: 12097 - DNA, 1620 bp, synthetic construct; identical to SEQ ID NO: 10018
  source 1..1620: mol_type = other DNA; note = Synthetic coding sequence

SEQ ID NO: 12098 - DNA, 2112 bp, synthetic construct
  source 1..2112: mol_type = other DNA; note = Synthetic coding sequence
atgttcagatacgagagcctggaggactgccccctggacgaggacgaggacgccttccagggcctgggcgaggaggacgaggagatcgaccagttcaacgacgacaccttcggcagcggcgccgtggacgacgactggcaggaggcccacgagagactggccgagctggaggagaagctgcccgtggccgtgaacgagcagaccggcaacggcgagagagacgagatggacctgctgggcgaccacgaggagaacctggccgagagactgagcaagatggtgatcgagaacgagctggaggaccccgccatcatgagagccgtgcagaccagacccgtgctgcagccccagcccggcagcctgaacagcagcatctgggacggcagcgaggtgctgagaagaatcagaggccccctgctggcccaggagatgcccaccgtgagcgtgctggagtacgccctgccccagagacccccccagggccccgaggacgacagagacctgagcgagagagccctgcccagaagaagcaccagccccatcatcggcagcccccccgtgagagccgtgcccatcggcaccccccccaagcagatggccgtgcccagcttcacccagcagatcctgtgccccaagcccgtgcacgtgagaccccccatgccccccagataccccgccccctacggcgagagaatgagccccaaccagctgtgcagcgtgcccctgcagcccggcagaatgagccccagccagttcgccagagtgcccggcttcgtgggcagccccctggccgccatgaaccccaagctgctgcagggcagagtgggccagatgctgccccccgcccccggcttcagagccttcttcagcgccccccccagcgccaccccccccccccagcagcacccccccggccccggcccccacctgcagaacctgagaagccaggcccccatgttcagacccgacaccacccacctgcacccccagcacagaagactgctgcaccagagacagcagcagaacagaagccagcacagaaacctgaacggcgccggcgacagaggcagccacagaagcagccaccaggaccacctgagaaaggacccctacgccaacctgatgctgcagagagagaaggactgggtgagcaagatccagatgatgcagctgcagagcaccgacccctacctggacgacttctactaccagaactacttcgagaagctggagaagctgagcgccgccgaggagatccagggcgacggccccaagaaggagagaaccaagctgatcaccccccaggtggccaagctggagcacgcctacaagcccgtgcagttcgagggcagcctgggcaagctgaccgtgagcagcgtgaacaaccccagaaagatgatcgacgccgtggtgaccagcagaagcgaggacgacgagaccaaggagaagcaggtgagagacaagagaagaaagaccctggtgatcatcgagaagacctacagcctgctgctggacgtggaggactacgagagaagatacctgctgagcctggaggaggagagacccgccctgatggacgacagaaagcacaagatctgcagcatgtacgacaacctgagaggcaagctgcccggccaggagagacccagcgacgaccacttcgtgcagatcatgtgcatcagaaagggcaagagaatggtggccagaatcctgcccttcctgagcaccgagcaggccgccgacatcctgatgaccaccgccagaaacctgcccttcctgatcaagaaggacgcccaggacgaggtgctgccctgcctgctgagccccttcagcctgctgctgtaccacctgcccagcgtgagcatcaccagcctgctgagacagctgatgaacctgcccagcagcgaccccgccaccgagagcacccagaacaaccagtggaccgaggtgatgttcatggccaccagagagctgctgagaatcccccaggccgccctggccaagcccatcagcatccccaccaacctggtgagcctgttcagcagatacgtggacagacagaagctgaacctgctggagaccaagctgcagctggtgcagggcatcagatag

SEQ ID NO: 12099 - DNA, 957 bp, synthetic construct
  source 1..957: mol_type = other DNA; note = Synthetic coding sequence
atgagcgcccacaacagaggcaccgagctggacctgagctggatcagcaagatccaggtgaaccaccccgccgtgctgagaagagccgagcagatccaggccagaagaaccgtgaagaaggagtggcaggccgcctggctgctgaaggccgtgaccttcatcgacctgaccaccctgagcggcgacgacaccagcagcaacatccagagactgtgctacaaggccaagtaccccatcagagaggacctgctgaaggccctgaacatgcacgacaagggcatcaccaccgccgccgtgtgcgtgtaccccgccagagtgtgcgacgccgtgaaggccctgaaggccgccggctgcaacatccccgtggccagcgtggccgccggcttccccgccggccagacccacctgaagaccagactggaggagatcagactggccgtggaggacggcgccaccgagatcgacgtggtgatcaacagaagcctggtgctgaccggccagtgggaggccctgtacgacgagatcagacagttcagaaaggcctgcggcgaggcccacctgaagaccatcctggccaccggcgagctgggcaccctgaccaacgtgtacaaggccagcatgatcgccatgatggccggcagcgacttcatcaagaccagcaccggcaaggagaccgtgaacgccaccttccccgtggccatcgtgatgctgagagccatcagagacttcttctggaagaccggcaacaagatcggcttcaagcccgccggcggcatcagaagcgccaaggacagcctggcctggctgagcctggtgaaggaggagctgggcgacgagtggctgaagcccgagctgttcagaatcggcgccagcaccctgctgagcgacatcgagagacagatctaccaccacgtgaccggcagatacgccgcctaccacgacctgcccatgagctag

SEQ ID NO: 12100 - DNA, 1188 bp, synthetic construct; identical to SEQ ID NO: 11022
  source 1..1188: mol_type = other DNA; note = Synthetic coding sequence

SEQ ID NO: 12101 - DNA, 3288 bp, synthetic construct
  source 1..3288: mol_type = other DNA; note = Synthetic coding sequence
atggccgagggcgccgccggcagagaggaccccgccccccccgacgccgccggcggcgaggacgaccccagagtgggccccgacgccgccggcgactgcgtgaccgccgccagcggcggcagaatgagagacagaagaagcggcgtggccctgcccggcgccgccggcacccccgccgacagcgaggccggcctgctggaggccgccagagccacccccagaagaagcagcatcatcaaggaccccagcaaccagaagtgcggcggcagaaagaagaccgtgagcttcagcagcatgcccagcgagaagaagatcagcagcgccaacgactgcatcagcttcatgcaggccggctgcgagctgaagaaggtgagacccaacagcagaatctacaacagattcttcaccctggacaccgacctgcaggccctgagatgggagcccagcaagaaggacctggagaaggccaagctggacatcagcgccatcaaggagatcagactgggcaagaacaccgagaccttcagaaacaacggcctggccgaccagatctgcgaggactgcgccttcagcatcctgcacggcgagaactacgagagcctggacctggtggccaacagcgccgacgtggccaacatctgggtgagcggcctgagatacctggtgagcagaagcaagcagcccctggacttcatggagggcaaccagaacacccccagattcatgtggctgaagaccgtgttcgaggccgccgacgtggacggcaacggcatcatgctggaggacaccagcgtggagctgatcaagcagctgaaccccaccctgaaggaggccaagatcagactgaagttcaaggagatccagaagagcaaggagaagctgaccaccagagtgaccgaggaggagttctgcgaggccttctgcgagctgtgcaccagacccgaggtgtacttcctgctggtgcagatcagcaagaacaaggagtacctggacgccaacgacctgatgctgttcctggaggccgagcagggcgtgacccacatcaccgaggacatctgcctggacatcatcagaagatacgagctgagcgaggagggcagacagaagggcttcctggccatcgacggcttcacccagtacctgctgagcagcgagtgcgacatcttcgaccccgagcagaagaaggtggcccaggacatgacccagcccctgagccactactacatcaacgccagccacaacacctacctgatcgaggaccagttcagaggccccgccgacatcaacggctacatcagagccctgaagatgggctgcagaagcgtggagctggacgtgagcgacggcagcgacaacgagcccatcctgtgcaacagaaacaacatgaccacccacgtgagcttcagaagcgtgatcgaggtgatcaacaagttcgccttcgtggccagcgagtaccccctgatcctgtgcctgggcaaccactgcagcctgccccagcagaaggtgatggcccagcagatgaagaaggtgttcggcaacaagctgtacaccgaggcccccctgcccagcgagagctacctgcccagccccgagaagctgaagagaatgatcatcgtgaagggcaagaagctgcccagcgaccccgacgtgctggagggcgaggtgaccgacgaggacgaggaggccgagatgagcagaagaatgagcgtggactacaacggcgagcagaagcagatcagactgtgcagagagctgagcgacctggtgagcatctgcaagagcgtgcagtacagagacttcgagctgagcatgaagagccagaactactgggagatgtgcagcttcagcgagaccgaggccagcagaatcgccaacgagtaccccgaggacttcgtgaactacaacaagaagttcctgagcagaatctaccccagcgccatgagaatcgacagcagcaacctgaacccccaggacttctggaactgcggctgccagatcgtggccatgaacttccagacccccggccccatgatggacctgcacaccggctggttcctgcagaacggcggctgcggctacgtgctgagacccagcatcatgagagacgaggtgagctacttcagcgccaacaccaagggcatcctgcccggcgtgagccccctggccctgcacatcaagatcatcagcggccagaacttccccaagcccaagggcgcctgcgccaagggcgacgtgatcgacccctacgtgtgcatcgagatccacggcatccccgccgactgcagcgagcagagaaccaagaccgtgcagcagaacagcgacaaccccatcttcgacgagaccttcgagttccaggtgaacctgcccgagctggccatgatcagattcgtggtgctggacgacgactacatcggcgacgagttcatcggccagtacaccatccccttcgagtgcctgcagcccggctacagacacgtgcccctgagaagcttcgtgggcgacatcatggagcacgtgaccctgttcgtgcacatcgccatcaccaacagaagcggcggcggcaaggcccagaagagaagcctgagcgtgagaatgggcaagaaggtgagagagtacaccatgctgagaaacatcggcctgaagaccatcgacgacatcttcaagatcgccgtgcaccccctgagagaggccatcgacatgagagagaacatgcagaacgccatcgtgagcatcaaggagctgtgcggcctgccccccatcgccagcctgaagcagtgcctgctgaccctgagcagcagactgatcaccagcgacaacacccccagcgtgagcctggtgatgaaggacagcttcccctacctggagcccctgggcgccatccccgacgtgcagaagaagatgctgaccgcctacgacctgatgatccaggagagcagattcctgatcgagatggccgacaccgtgcaggagaagatcgtgcagtgccagaaggccggcatggagttccacgaggagctgcacaacctgggcgccaaggagggcctgaagggcagaaagctgaacaaggccaccgagagcttcgcctggaacatcaccgtgctgaagggccagggcgacctgctgaagaacgccaagaacgaggccatcgagaacatgaagcagatccagctggcctgcctgagctgcggcctgagcaaggcccccagcagcagcgccgaggccaagagcaagagaagcctggaggccatcgaggagaaggagagcagcgaggagaacggcaagctgtag

SEQ ID NO: 12102 - DNA, 543 bp, synthetic construct
  source 1..543: mol_type = other DNA; note = Synthetic coding sequence
atggagcagcccaagggcgtggactggaccgtgatcatcctgacctgccagtacaaggacagcgtgcaggtgttccagagagagctggaggtgagacagaagagagagcagatccccgccggcaccctgctgctggccgtggaggaccccgagaagagagtgggcagcggcggcgccaccctgaacgccctgctggtggccgccgagcacctgagcgccagagccggcttcaccggcagagacttccccttcgacgactgcggcagagccttcacctgcctgcccgtggagaaccccgaggcccccgtggaggccctggtgtgcaacctggactgcctgctggacatcatgacctacagactgggccccggcagcccccccggcgtgtgggtgtgcagcaccgacatgctgctgagcgtgcccgccaaccccggcgagcccgagaccacctgggactgcctgcccagcagccagccccagcaggaggccagcagcgccctgctggcccaccccgccagcggccccgcccccctgccctactag

SEQ ID NO: 12103 - DNA, 429 bp, synthetic construct
  source 1..429: mol_type = other DNA; note = Synthetic coding sequence
atgaacgaggtggtgcacaccagccccaccatcggcagcaacgtggaggagatcgtgatcaacaacaccagattcctgatgtgggacatcggcggccaggagagcctgagaagcagctggaacacctactacaccaacaccgagttcgtgatcgtggtggtggacagcaccgacagagagagaatcagcgtgaccagagaggagctgtacaagatgctggcccacgaggacctgagaaaggccggcctgctgatcttcgccaacaagcaggacgtgaaggagtgcatgaccgtggccgagatcagccagttcctgaagctgaccagcatcaaggaccaccagtggcacatccaggcctgctgcgccctgaccggcgagggcctgtgccagggcctggagtggatgatgagcagactgaagatcagatag

SEQ ID NO: 12104 - DNA, 342 bp, synthetic construct
  source 1..342: mol_type = other DNA; note = Synthetic coding sequence
atggagggcgtgctgtacaagtggaccaactacctgagcggctggcagcccagatggttcctgctgtgcggcggcatcctgagctactacgacagccccgaggacgcctggaagggctgcaagggcagcatccagatggccgtgtgcgagatccaggtgcacagcgtggacaacaccagaatggacctgatcatccccggcgagcagtacttctacctgaaggccagaagcgtggccgagagacagagatggctggtggccctgggcagcgccaaggcctgcctgaccgacagcagaacccagaaggagaagggcaacctgctgaagaccctgaagacctag

SEQ ID NO: 12105 - DNA, 1119 bp, synthetic construct
  source 1..1119: mol_type = other DNA; note = Synthetic coding sequence
atggccagcaaccacaagagcagcgccgccagacccgtgagcagaggcggcgtgggcctgaccggcagaccccccagcggcatcagacccctgagcggcaacatcagagtggccaccgccatgccccccggcaccgccagacccggcagcagaggctgccccatcggcaccggcggcgtgctgagcagccagatcaaggtggcccacagacccgtgacccagcagggcctgaccggcatgaagaccggcaccaagggcccccagagacagatcctggacaagagctactacctgggcctgctgagaagcaagatcagcgagctgaccaccgaggtgaacaagctgcagaagggcatcgagatgtacaaccaggagaacagcgtgtacctgagctacgagaagagagccgagaccctggccgtggagatcaaggagctgcagggccagctggccgactacaacatgctggtggacaagctgaacaccaacaccgagatggaggaggtgatgaacgactacaacatgctgaaggcccagaacgacagagagacccagagcctggacgtgatcttcaccgagagacaggccaaggagaagcagatcagaagcgtggaggaggagatcgagcaggagaagcaggccaccgacgacatcatcaagaacatgagcttcgagaaccaggtgaagtacctggagatgaagaccaccaacgagaagctgctgcaggagctggacaccctgcagcagcagctggacagccagaacatgaagaaggagagcctggaggccgagatcgcccacagccaggtgaagcaggaggccgtgctgctgcacgagaagctgtacgagctggagagccacagagaccagatgatcgccgaggacaagagcatcggcagccccatggaggagagagagaagctgctgaagcagatcaaggacgacaaccaggagatcgccagcatggagagacagctgaccgacaccaaggagaagatcaaccagttcatcgaggagatcagacagctggacatggacctggaggagcaccaggaccccaccaactacggctggaagatcctggagaagaacaccggcagcttcaagaagcaggtgtag

SEQ ID NO: 12106 - DNA, 345 bp, synthetic construct; identical to SEQ ID NO: 11846
  source 1..345: mol_type = other DNA; note = Synthetic coding sequence

SEQ ID NO: 12107 - DNA, 327 bp, synthetic construct
  source 1..327: mol_type = other DNA; note = Synthetic coding sequence
atggccatggcccccagccccagcctggtgcaggtgtacaccagccccgccgccgtggccgtgtgggagtggcaggacggcctgggcacctggcacccctacagcgccaccgtgtgcagcttcatcgagcagcagttcgtgcagcagaagggccagagattcggcctgggcagcctggcccacagcatccccctgggccaggccgaccccagcctggccccctacatcatcgacctgcccagctggacccagttcagacaggacaccggcaccatgagagccgtgagaagacacctgttcccccagcacagcgcccccggcagatag

SEQ ID NO: 12108 - DNA, 549 bp, synthetic construct
  source 1..549: mol_type = other DNA; note = Synthetic coding sequence
atgagagagtgcatcagcatccacgtgggccaggccggcgtgcagatcggcaacgcctgctgggagctgtactgcctggagcacggcatccagcccgacggccagatgcccagcgacaagaccatcggcggcggcgacgacagcttcaacaccttcttcagcgagaccggcgccggcaagcacgtgcccagagccgtgttcgtggacctggagcccaccgtgatcgactggtgccccaccggcttcaaggtgggcatcaactaccagccccccaccgtggtgcccggcggcgacctggccaaggtgcagagagccgtgtgcatgctgagcaacaccaccgccatcgccgaggcctgggccagactggaccacaagttcgacctgatgtacgccaagagagccttcgtgcactggtacgtgggcgagggcatggaggagggcgagttcagcgaggccagagaggacatggccgccctggagaaggactacgaggaggtgggcgtggacagcgtggagggcgagggcgaggaggagggcgaggagtactag

SEQ ID NO: 12109 - DNA, 483 bp, synthetic construct; identical to SEQ ID NO: 10977
  source 1..483: mol_type = other DNA; note = Synthetic coding sequence

SEQ ID NO: 12110 - DNA, 3483 bp, synthetic construct
  source 1..3483: mol_type = other DNA; note = Synthetic coding sequence
atggcctgcagaagaagatacttcgtggagggcgaggcccccagcagcgagaccggcaccagcctggacagccccagcgcctacccccagggccccctggtgcccggcagcagcctgagccccgaccactacgagcacaccagcgtgggcgcctacggcctgtacagcggcccccccggccagcagcagagaaccagaagacccaagctgcagcacagcaccagcatcctgagaaagcaggccgaggaggaggccatcaagagaagcagaagcctgagcgagagctacgagctgagcagcgacctgcaggacaagcaggtggagatgctggagagaaagtacggcggcagactggtgaccagacacgccgccagaaccatccagaccgccttcagacagtaccagatgaacaagaacttcgagagactgagaagcagcatgagcgagaacagaatgagcagaagaatcgtgctgagcaacatgagaatgcagttcagcttcgagggccccgagaaggtgcacagcagctacttcgagggcaagcaggtgagcgtgaccaacgacggcagccagctgggcgccctggtgagccccgagtgcggcgacctgagcgagcccaccaccctgaagagccccgcccccagcagcgacttcgccgacgccatcaccgagctggaggacgccttcagcagacaggtgaagagcctggccgagagcatcgacgacgccctgaactgcagaagcctgcacaccgaggaggcccccgccctggacgccgccagagccagagacaccgagccccagaccgccctgcacggcatggaccacagaaagctggacgagatgaccgccagctacagcgacgtgaccctgtacatcgacgaggaggagctgagcccccccctgcccctgagccaggccggcgacagacccagcagcaccgagagcgacctgagactgagagccggcggcgccgcccccgactactgggccctggcccacaaggaggacaaggccgacaccgacaccagctgcagaagcacccccagcctggagagacaggagcagagactgagagtggagcacctgcccctgctgaccatcgagccccccagcgacagcagcgtggacctgagcgacagaagcgagagaggcagcctgaagagacagagcgcctacgagagaagcctgggcggccagcagggcagccccaagcacggcccccacagcggcgcccccaagagcctgcccagagaggagcccgagctgagacccagaccccccagacccctggacagccacctggccatcaacggcagcgccaacagacagagcaagagcgagagcgactacagcgacggcgacaacgacagcatcaacagcaccagcaacagcaacgacaccatcaactgcagcagcgagagcagcagcagagacagcctgagagagcagaccctgagcaagcagacctaccacaaggaggccagaaacagctgggacagccccgccttcagcaacgacgtgatcagaaagagacactacagaatcggcctgaacctgttcaacaagaagcccgagaagggcgtgcagtacctgatcgagagaggcttcgtgcccgacacccccgtgggcgtggcccacttcctgctgcagagaaagggcctgagcagacagatgatcggcgagttcctgggcaacagacagaagcagttcaacagagacgtgctggactgcgtggtggacgagatggacttcagcaccatggagctggacgaggccctgagaaagttccaggcccacatcagagtgcagggcgaggcccagaaggtggagagactgatcgaggccttcagccagagatactgcatctgcaaccccggcgtggtgagacagttcagaaaccccgacaccatcttcatcctggccttcgccatcatcctgctgaacaccgacatgtacagccccaacgtgaagcccgagagaaagatgaagctggaggacttcatcaagaacctgagaggcgtggacgacggcgaggacatccccagagagatgctgatgggcatctacgagagaatcagaaagagagagctgaagaccaacgaggaccacgtgagccaggtgcagaaggtggagaagctgatcgtgggcaagaagcccatcggcagcctgcaccccggcctgggctgcgtgctgagcctgccccacagaagactggtgtgctactgcagactgttcgaggtgcccgaccccaacaagccccagaagctgggcctgcaccagagagagatcttcctgttcaacgacctgctggtggtgaccaagatcttccagaagaagaagaacagcgtgacctacagcttcagacagagcttcagcctgtacggcatgcaggtgctgctgttcgagaaccagtactaccccaacggcatcagactgaccagcagcgtgcccggcgccgacatcaaggtgctgatcaacttcaacgcccccaacccccaggacagaaagaagttcaccgacgacctgagagagagcatcgccgaggtgcaggagatggagaagcacagaatcgagagcgagctggagaagcagaagggcgtggtgagacccagcatgagccagtgcagcagcctgaagaaggagagcggcaacggcaccctgagcagagcctgcctggacgacagctacgccagcggcgagggcctgaagagaagcgccctgagcagcagcctgagagacctgagcgaggccggcaagagaggcagaagaagcagcgccggcagcctggagagcaacgtggagggcagcatcatcagcagcccccacatgagaagaagagccaccagcaccagagagtgccccagcagaccccaccagaccatgcccaacagcagcagcctgctgggcagcctgttcggcagcaagagaggcaagccccccccccaggcccacctgcccagcgcccccgccctggccacccccccccccaccggcggccccgccagcctggccgccctgtgcggctggcccccccccggcgcccccagaggcgccgccgccggcagacacgccagagccagccaccccgtgctgccccacgccgagcccagccccgtgccccccagccccccccccccccccacccccgcccaccccgccagaacccccgtgccccccagacccccctggggcccccccagcctgagaggcccctgccccagaccccccgccgccgccctgggccccagaggcgcccacagcgcccccccctgggccgccccctgccccgccgccccccaccagcagcagggccagacccagagacaccagcacaactgcgtggacagcctgggcagaggccccagactgcccgagacccccgcccaccacaccggccacgccagaggcagccccgccgcccaccagaccagaggcaccagcgtggccatcagccccctgtgccccagcagacccaactag

SEQ ID NO: 12111 - DNA, 378 bp, synthetic construct
  source 1..378: mol_type = other DNA; note = Synthetic coding sequence
atgaagaaggagcacgtgctgcactgccagttcagcgcctggtaccccttcttcagaggcgtgaccatcaagagcgtgatcctgcccctgccccagaacgtgaaggactacctgctggacgacggcaccctggtggtgagcggcagagacgacccccccacccacagccagcccgacagcgacgacgaggccgaggagatccagtggagcgacgacgagaacaccgccaccctgaccgacgcctactggatcgccatgaacagcagcctgaagtgcaagaccctgagcgacatcttcctgctgttcaagagcagcgacttcatcaccagagacttcacccagcccttcatccactgcaccgacgacagccccgactag

SEQ ID NO: 12112 - DNA, 414 bp, synthetic construct; identical to SEQ ID NO: 11742
  source 1..414: mol_type = other DNA; note = Synthetic coding sequence

SEQ ID NO: 12113 - DNA, 3222 bp, synthetic construct
  source 1..3222: mol_type = other DNA; note = Synthetic coding sequence
atggaggagagaaagcacgagaccatgaaccccgcccacgtgctgttcgacagattcgtgcaggccaccacctgcaagggcaccctgaaggccttccaggagctgtgcgaccacctggagctgaagcccaaggactacagaagcttctaccacaagctgaagagcaagctgaactactggaaggccaaggccctgtgggccaagctggacaagagaggcagccacaaggactacaagaagggcaaggcctgcaccaacaccaagtgcctgatcatcggcgccggcccctgcggcctgagaaccgccatcgacctgagcctgctgggcgccaaggtggtggtgatcgagaagagagacgccttcagcagaaacaacgtgctgcacctgtggcccttcaccatccacgacctgagaggcctgggcgccaagaagttctacggcaagttctgcgccggcgccatcgaccacatcagcatcagacagctgcagctgatcctgctgaaggtggccctgatcctgggcatcgagatccacgtgaacgtggagttccagggcctgatccagccccccgaggaccaggagaacgagagaatcggctggagagccctggtgcaccccaagacccaccccgtgagcgagtacgagttcgaggtgatcatcggcggcgacggcagaagaaacaccctggagggcttcagaagaaaggagttcagaggcaagctggccatcgccatcaccgccaacttcatcaacagaaacaccaccgccgaggccaaggtggaggagatcagcggcgtggccttcatcttcaaccagaagttcttccaggagctgagagaggccaccggcatcgacctggagaacatcgtgtactacaaggacgacacccactacttcgtgatgaccgccaagaagcagagcctgctggacaagggcgtgatcctgcacgactacgccgacaccgagctgctgctgagcagagagaacgtggaccaggaggccctgctgagctacgccagagaggccgccgacttcagcacccagcagcagctgcccagcctggacttcgccatcaaccactacggccagcccgacgtggccatgttcgacttcacctgcatgtacgccagcgagaacgccgccctggtgagagagcagaacggccaccagctgctggtggccctggtgggcgacagcctgctggagcccttctggcccatgggcaccggcatcgccagaggcttcctggccgccatggacagcgcctggatggtgagaagctggagcctgggcaccagccccctggaggtgctggccgagagagagagcatctacagactgctgccccagaccacccccgagaacgtgagcaagaacttcagccagtacagcatcgaccccgtgaccagataccccaacatcaacgtgaacttcctgagacccagccaggtgagacacctgtacgacaccggcgagaccaaggacatccacctggagatggagagcctggtgaacagcagaaccacccccaagctgaccagaaacgagagcgtggccagaagcagcaagctgctgggctggtgccagagacagaccgacggctacgccggcgtgaacgtgaccgacctgaccatgagctggaagagcggcctggccctgtgcgccatcatccacagatacagacccgacctgatcgacttcgacagcctggacgagcagaacgtggagaagaacaaccagctggccttcgacatcgccgagaaggagctgggcatcagccccatcatgaccggcaaggagatggccagcgtgggcgagcccgacaagctgagcatggtgatgtacctgacccagttctacgagatgttcaaggacagcctgcccagcagcgacaccctggacctgaacgccgaggagaaggccgtgctgatcgccagcaccagaagccccatcagcttcctgagcaagctgggccagaccatcagcagaaagagaagccccaaggacaagaaggagaaggacctggacggcgccggcaagagaagaaagaccagccagagcgaggaggaggaggcccccagaggccacagaggcgagagacccaccctggtgagcaccctgaccgacagaagaatggacgtggccgtgggcaaccagaacaaggtgaagtacatggccacccagctgctggccaagttcgaggagaacgcccccgcccagagcatcggcatcagaagacagcagagagagaaggagtgcagcagaacctgccccaagaaggtgatcaccctgagccccccccccaccccccccccctgcagagcccacggcggccagcagacctacagagacctggacgccgacaacagaggcaagcagagcccccaccacgagagacccgagcccgagccccccagaagattcttcgtggaccagtgggagctgagcctgagcctgagaagcagcgccagacccgccagccccagcagcgacagcctgagacagaagtacatcaagatgtacaccggcggcgtgagcagcctggccgagcagatcgccaaccagctgcagagaaaggagcagcccaaggccctgctggacaagaaggagctgggcagcatgaagaaggagttcccccagaacctgggcggcagcgacacctgctacttctgccagaagagagtgtacgtgatggagagactgagcgccgagggcaagttcttccacagaagctgcttcaagtgcgagtactgcgccaccaccctgagactgagcgcctacgcctacgacatcgaggacggcaagttctactgcaagccccactactgctacagactgagcggctacgcccagagaaagagacccgccgtggcccccctgagcggcaaggaggccaagggccccctgcaggacggcgccaccaccgacgccaacggcagagccaacgccgtggccagcagcaccgagagaacccccggcagcctgaccagcctgttcggctgggtggccagacacagcctgggcctgtgcgacaaggccaagggcatgagccagcacctgcagagcaacatcagcagcttcggccagcaggtggcccagaaccccctggacagcttcttcatgtgccagctgctggccttcggcgtgcccttcctgtacggcctgagcgaggtgctggtgcagatcagaggcgagttccactggcaggccgtggcccagtag

SEQ ID NO: 12114 - DNA, 543 bp, synthetic construct
  source 1..543: mol_type = other DNA; note = Synthetic coding sequence
atgttcctgagctgcggcagcctgcaccagagaggccccgagaccgacggcaccgtgttcagaatccacaccaaggccgagggcttcatggacgtggacatccccctggagctggtgttccacctgcccgtgaactaccccagctgcctgcccggcatcagcatcaacagcgagcagctgaccagagcccagtgcgtgaccgtgaaggagaacctgctggagcaggccgagagcctgctgagcgagcccatggtgcacgagctggtgctgtggatccagcagaacctgagacacatcctgagccagcccgagaccggcagcggcagcgagaagtgcaccttcagcaccagcaccaccatggacgacggcctgtggatcaccctgctgcacctggaccacatgagagccaagaccaagtacgtgaagatcgtggagaagtgggccagcgacctgagactgaccggcagactgatgttcatgggcaagatcatcctgatcctgctgcagggcgacagaaacaacctgaaggtgcccaagagctag

SEQ ID NO: 12115 - DNA, 1521 bp, synthetic construct
  source 1..1521: mol_type = other DNA; note = Synthetic coding sequence
atgaagagaagaagcgtgaccatgaccgacggcctgaccgccgacaaggtgaccagaagcgacggctgccccaccagcaccagcctgcccagacccagagacagcatcagaagctgcgccctgagcatggaccagatccccgacctgcacagccccatgagccccatcagcgagagccccagcagccccgcctacagcaccgtgaccagagtgcacgccgcccccgccgcccccagcgccaccgccctgcccgccagccccgtggccagaagaagcagcgagccccagctgtgccccggcagcgcccccaagacccacggcgagagcgacaagggcccccacaccagccccagccacaccctgggcaaggccagccccagccccagcctgagcagctacagcgaccccgacagcggccactactgccagctgcagccccccgtgagaggcagcagagagtgggccgccaccgagaccagcagccagcaggccagaagctacggcgagagactgaaggagctgagcgagaacggcgcccccgagggcgactggggcaagaccttcaccgtgcccatcgtggaggtgaccagcagcttcaaccccgccaccttccagagcctgctgatccccagagacaacagacccctggaggtgggcctgctgagaaaggtgaaggagctgctggccgaggtggacgccagaaccctggccagacacgtgaccaaggtggactgcctggtggccagaatcctgggcgtgaccaaggagatgcagaccctgatgggcgtgagatggggcatggagctgctgaccctgccccacggcagacagctgagactggacctgctggagagattccacaccatgagcatcatgctggccgtggacatcctgggctgcaccggcagcgccgaggagagagccgccctgctgcacaagaccatccagctggccgccgagctgagaggcaccatgggcaacatgttcagcttcgccgccgtgatgggcgccctggacatggcccagatcagcagactggagcagacctgggtgaccctgagacagagacacaccgagggcgccatcctgtacgagaagaagctgaagcccttcctgaagagcctgaacgagggcaaggagggcccccccctgagcaacaccaccttcccccacgtgctgcccctgatcaccctgctggagtgcgacagcgccccccccgagggccccgagccctggggcagcaccgagcacggcgtggaggtggtgctggcccacctggaggccgccagaaccgtggcccaccacggcggcctgtaccacaccaacgccgaggtgaagctgcagggcttccaggccagacccgagctgctggaggtgttcagcaccgagttccagatgagactgctgtggggcagccagggcgccagcagcagccaggccagaagatacgagaagttcgacaaggtgctgaccgccctgagccacaagctggagcccgccgtgagaagcagcgagctgtag

SEQ ID NO: 12116 - DNA, 369 bp, synthetic construct; identical to SEQ ID NO: 12080
  source 1..369: mol_type = other DNA; note = Synthetic coding sequence

SEQ ID NO: 12117 - DNA, 369 bp, synthetic construct
  source 1..369: mol_type = other DNA; note = Synthetic coding sequence
atgcccgagatcaacaccaaccacctggacaagcagcaggtgcagctgctggccgagatgtgcatcctgatcgacgagaacgacaacaagatcggcgccgagaccaagaagaactgccacctgaacgagaacatcgagaagggcctgctgcacagagccttcagcgtgttcctgttcaacaccgagaacaagctgctgctgcagcagagaagcgacgccaagatcaccttccccggctgcttcaccaacacctgctgcagccaccccctgagcaaccccgccgagctggaggagagcgacgccctgggcgtgagaagagccgcccagagaagactgaaggccgagctgggcatccccctggaggagtag

SEQ ID NO: 12118 - DNA, 408 bp, synthetic construct; identical to SEQ ID NO: 11485
  source 1..408: mol_type = other DNA; note = Synthetic coding sequence

SEQ ID NO: 12119 - DNA, 3282 bp, synthetic construct
  source 1..3282: mol_type = other DNA; note = Synthetic coding sequence
atgggcaccggcgacttcatctgcatcagcatgaccggcggcgccccctggggcttcagactgcagggcggcaaggagcagaagcagcccctgcaggtggccaagatcagaaaccagagcaaggccagcggcagcggcctgtgcgagggcgacgaggtggtgagcatcaacggcaacccctgcgccgacctgacctaccccgaggtgatcaagctgatggagagcatcaccgacagcctgcagatgctgatcaagagacccagcagcggcatcagcgaggccctgatcagcgagaacgagaacaagaacctggagcacctgacccacggcggctacgtggagagcaccaccctgcagatcagacccgccaccaagacccagtgcaccgagttcttcctggcccccgtgaagaccgaggtgcccctggccgagaaccagagaagcggccccgactgcgccggcagcctgaaggaggagaccggccccagctaccagagagccccccagatgcccgacagccagagaggcagagtggccgaggagctgatcctgagagagaaggtggaggccgtgcagcccggccccgtggtggagctgcagctgagcctgagccaggagagacacaagggcgccagcggccccctggtggccctgcccggcgccgagaagagcaagagccccgaccccgaccccaacctgagccacgacagaatcgtgcacatcaacagcatccccaccaacgagaaggccgaccccttcctgagaagcagcaagatcatccagatcagcagcggcagagagctgagagtgatccaggagagcgaggccggcgacgccggcctgcccagagtggaggtgatcctggactgcagcgacagacagaagaccgagggctgcagactgcaggccggcaaggagtgcgtggacagccccgtggagggcggccagagcgaggccccccccagcctggtgagcttcgccgtgagcagcgagggcaccgagcagggcgaggaccccagaagcgagaaggaccacagcagaccccacaagcacagagccagacacgccagactgagaagaagcgagagcctgagcgagaagcaggtgaaggaggccaagagcaagtgcaagagcatcgccctgctgctgaccgacgcccccaaccccaacagcaagggcgtgctgatgttcaagaagagaagaagaagagccagaaagtacaccctggtgagctacggcaccggcgagctggagagagaggccgacgaggaggaggagggcgacaaggaggacacctgcgaggtggccttcctgggcgccagcgagagcgaggtggacgaggagctgctgagcgacgtggacgacaacacccaggtggtgaacttcgactgggacagcggcctggtggacatcgagaagaagctgaacagaggcgacaagatggagatgctgcccgacaccaccggcaagggcgccctgatgttcgccaagagaagagagagaatggaccagatcaccgcccagaaggaggaggacaaggtgggcggcacccccagcagagagcaggacgccgcccagaccgacggcctgagaaccaccaccagctaccagagaaaggaggaggagagcgtgagaacccagagcagcgtgagcaagagctacatcgaggtgagccacggcctgggccacgtgccccagcagaacggcttcagcggcaccagcgagaccgccaacatccagagaatggtgcccatgaacagaaccgccaagcccttccccggcagcgtgaaccagcccgccacccccttcagccccaccagaaacatgaccagccccatcgccgacttccccgccccccccccctacagcgccgtgacccccccccccgacgccttcagcagaggcgtgagcagccccatcgccggccccgcccagccccccccctggccccagcccgccccctggagccagcccgccttctacgacagcagcgagagaatcgccagcagagacgagagaatcagcgtgcccgccaagagaaccggcatcctgcaggaggccaagagaagaagcaccaccaagcccatgttcaccttcaaggagcccaaggtgagccccaaccccgagctgctgagcctgctgcagaacagcgagggcaagagaggcaccggcgccggcggcgacagcggccccgaggaggactacctgagcctgggcgccgaggcctgcaacttcatgcagagcagcagcgccaagcagaagacccccccccccgtggcccccaagcccgccgtgaagagcagcagcagccagcccgtgacccccgtgagccccgtgtggagccccggcgtggcccccacccagccccccgccttccccaccagcaaccccagcaagggcaccgtggtgagcagcatcaagatcgcccagcccagctacccccccgccagacccgccagcaccctgaacgtggccggccccttcaagggcccccaggccgccgtggccagccagaactacacccccaagcccaccgtgagcacccccaccgtgaacgccgtgcagcccggcgccgtgggccccagcaacgagctgcccggcatgagcggcagaggcgcccagctgttcgccaagagacagagcagaatggagaagtacgtggtggacagcgacaccgtgcaggcccacgccgccagagcccagagccccacccccagcctgcccgccagctggaagtacagcagcaacgtgagagcccccccccccgtggcctacaaccccatccacagccccagctaccccctggccgccctgaagagccagcccagcgccgcccagcccagcaagatgggcaagaagaagggcaagaagcccctgaacgccctggacgtgatgaagcaccagccctaccagctgaacgccagcctgttcaccttccagccccccgacgccaaggacggcctgccccagaagagcagcgtgaaggtgaacagcgccctggccatgaagcaggccctgccccccagacccgtgaacgccgccagccccaccaacgtgcaggccagcagcgtgtacagcgtgcccgcctacaccagcccccccagcttcttcgccgaggccagcagccccgtgagcgccagccccgtgcccgtgggcatccccaccagccccaagcaggagagcgccagcagcagctacttcgtggcccccagacccaagttcagcgccaagaagagcggcgtgaccatccaggtgtggaagcccagcgtggtggaggagtag

SEQ ID NO: 12120 - DNA, 600 bp, synthetic construct
  source 1..600: mol_type = other DNA; note = Synthetic coding sequence
atggccatcgtgcagaccctgcccgtgcccctggagcccgcccccgaggccgccaccgccccccaggcccccgtgatgggcagcgtgagcagcctgatcagcggcagaccctgccccggcggccccgccccccccagacaccacggcccccccggccccaccttcttcagacagcaggacggcctgctgagaggcggctacgaggcccaggagcccctgtgccccgccgtgccccccagaaaggccgtgcccgtgaccagcttcacctacatcaacgaggacttcagaaccgagagcccccccagccccagcagcgacgtggaggacgccagagagcagagagcccacaacgcccacctgagaggccccccccccaagctgatccccgtgagcggcaagctggagaagaacatggagaagatcctgatcagacccaccgccttcaagcccgtgctgcccaagcccagaggcgcccccagcctgcccagcttcatgggccccagagccaccggcctgagcggcagccagggcagcctgacccagctgttcggcggccccgccagcagcagcagcagcagcagcagcagcagcgccgcctag

SEQ ID NO: 12121 - DNA, 612 bp, synthetic construct
  source 1..612: mol_type = other DNA; note = Synthetic coding sequence
atgcccagcacccccgccagcaccatcagcgccagagaggagctggtgcagagaatccccgaggccagcctgaacttccagaaggtgccccccggcagcctgaacagcagagacttcgaccagaacatgaacgacagctgcgaggacgccctggccaacaagaccagacccagaaacagagaggaggtgatcttcgacaacctgatgctgaaccccgtgagccagctgagccaggccatcagagagaacaccgagcacctggccgagaagatgaagatcctgttccagaacaccggcagagcctgggaggacctggaggccagaatcaacgccgagaacgaggtgcccatcctgaagaccagcaacaaggagatcagcagcatcctgaaggagctgagaagagtgcagaagcagctggaggtgatcaacgccatcgtggaccccagcggcagcctggacctgctgctgcccaccctgagcagcttcgtgccccccccccccgccttcgcctgggagctggtgctggtgtgcagagccagcagaagagtgcactgcaccttcgtgctgagatggagctgcggctgcctgagcgagaacggctacttcatctag

SEQ ID NO: 12122 - DNA, 321 bp, synthetic construct
  source 1..321: mol_type = other DNA; note = Synthetic coding sequence
tgacccaccaccagcagacccgccctggacgtgaagggcggcaccagccccgccaaggaggacgccaaccaggagatgagcagcgtggcctacagcaacctggccgtgaaggacagaaaggccgtggccatcctgcactaccccggcgtggccagcaacggcaccaagagccccgccatcatcgacagcgaccccgtggacgaggaggtgctgatgagcctggtggtggagctgggcctggacagagccaacgagctgcccgagctgtggctgggccagaacgagttcgacttcaccgccgacttccccagcagctgctag

SEQ ID NO: 12123 - DNA, 456 bp, synthetic construct
  source 1..456: mol_type = other DNA; note = Synthetic coding sequence
atggccgccttcagagacatcgaggaggtgagccagggcctgctgagcctgctgggcgccaacagagccgaggcccagcagagaagactgctgggcagacacgagcaggtggtggagagactgctggagacccaggacggcgccgagaagcagctgagagagatcctgaccatggagaaggaggtggcccagagcctgctgaacgccaaggagcaggagagacaggagaaggaggtggacgaggacaccaccgtgaccatccccagcgccgtgtacgtggcccagctgtaccaccaggtgagcaagatcgagtgggactacgagtgcgagcccggcatggtgaagggcatccaccacggccccagcgtggcccagcccatccacctggacagcacccagctgagcagaaagttcatcagcgactacctgtggagcctggtggacaccgagtggtag

SEQ ID NO: 12124 - DNA, 444 bp, synthetic construct
  source 1..444: mol_type = other DNA; note = Synthetic coding sequence
atgctgagatgcggccagatgatcttcgcccaggccctggtgtgcagacacctgggcagagactggagatggacccagagaaagagacagcccgacagctacttcagcgtgctgaacgccttcatcgacagaaaggacagctactacagcatccaccagatcgcccagatgggcgtgggcgagggcaagagcatcggccagtggtacggccccaacaccgtggcccaggtgctgaagaagctggccgtgttcgacacctggagcagcctggccgtgcacatcgccatggacaacaccgtggtgatggaggagatcagaagactgtgcagaaccagcgtgccctgcgccggcgccaccgccttccccgccgacagcgacagacactgcaacggcttccccgccggcgccgaggtgaccaacagacccagcccctggagaccctag

SEQ ID NO: 12125 - DNA, 1482 bp, synthetic construct
  source 1..1482: mol_type = other DNA; note = Synthetic coding sequence
atggagaagtacgagaacctgggcctggtgggcgagggcagctacggcatggtgatgaagtgcagaaacaaggacaccggcagaatcgtggccatcaagaagttcctggagagcgacgacgacaagatggtgaagaagatcgccatgagagagatcaagctgctgaagcagctgagacacgagaacctggtgaacctgctggaggtgtgcaagaagaagaagagatggtacctggtgttcgagttcgtggaccacaccatcctggacgacctggagctgttccccaacggcctggactaccaggtggtgcagaagtacctgttccagatcatcaacggcatcggcttctgccacagccacaacatcatccacagagacatcaagcccgagaacatcctggtgagccagagcggcgtggtgaagctgtgcgacttcggcttcgccagaaccctggccgcccccggcgaggtgtacaccgactacgtggccaccagatggtacagagcccccgagctgctggtgggcgacgtgaagtacggcaaggccgtggacgtgtgggccatcggctgcctggtgaccgagatgttcatgggcgagcccctgttccccggcgacagcgacatcgaccagctgtaccacatcatgatgtgcctgggcaacctgatccccagacaccaggagctgttcaacaagaaccccgtgttcgccggcgtgagactgcccgagatcaaggagagagagcccctggagagaagataccccaagctgagcgaggtggtgatcgacctggccaagaagtgcctgcacatcgaccccgacaagagacccttctgcgccgagctgctgcaccacgacttcttccagatggacggcttcgccgagagattcagccaggagctgcagctgaaggtgcagaaggacgccagaaacgtgagcctgagcaagaagagccagaacagaaagaaggagaaggagaaggacgacagcctggtggaggagagaaagaccctggtggtgcaggacaccaacgccgaccccaagatcaaggactacaagctgttcaagatcaagggcagcaagatcgacggcgagaaggccgagaagggcaacagagccagcaacgccagctgcctgcacgacagcagaaccagccacaacaagatcgtgcccagcaccagcctgaaggactgcagcaacgtgagcgtggaccacaccagaaaccccagcgtggccatcccccccctgacccacaacctgagcgccgtggcccccagcatcaacagcggcatgggcaccgagaccatccccatccagggctacagagtggacgagaagaccaagaagtgcagcatccccttcgtgaagcccaacagacacagccccagcggcatctacaacatcaacgtgaccaccctggtgagcggcccccccctgagcgacgacagcggcgccgacctgccccagatggagcaccagcactag

SEQ ID NO: 12126 - DNA, 6189 bp, synthetic construct
  source 1..6189: mol_type = other DNA; note = Synthetic coding sequence
atggacggctgcctggacaccgagacccccaccgtgagcatccaggagaacgtggacgtggccagcctgaagcccatcagcgacagcggcatcaacttcaccgacgccatctggagccccacctgcgagagaagaacctgcgagtgccacgagagcatcgagaagaacaaggacaagaccgacctgccccagagcgtggtgtaccagaacgaggagggcagatgggtgaccgacctggcctactacaccagcttcaacagcaagcagaacctgaacgtgagcctgagcgacgagatgaacgaggacttcagaagcggcagcgaggccttcgacctgatcgcccaggacgaggaggagttcaacaaggagcaccagttcatccagcccagcttcggctacttcatcagaagccccgagaagagagagcccatcgccctgatcagaaagagcgacgtgagcagaggcaacctggagaaggagatggcccacctgaaccacgacctgtacagcggcgacctgaacgagcagagccaggcccagctgagcgagggcagcatcaccctgcaggtggaggccgtggagagcaccagccaggtggacgagaacgacgtgaccctgaccgccgacaagggcaagaccgaggacaccttcttcatgagcaacaagccccagagatacaaggacaagctgcccgacagcggcgacagcatgctgagaatcagcaccatcgccagcgccatcgccgaggccagcgtgaacaccgaccccagccagctggccgccatgatcaaggccctgagcaacaagaccagagacaagaccttccaggaggacgagaagcagaaggactacagccacgtgagacacttcctgcccaacgacctggagaagagcaacggcagcaacgccctggacatggagaagtacctgaagaagaccgaggtgagcagatacgagagcgccctggagaacttcagcagagccagcatgagcgacacctgggacctgagcctgcccaaggagcagaccacccaggacatccaccccgtggacctgagcgccaccagcgtgagcgtgagagcccccgaggagaacaccgccgccatcgtgtacgtggagaacggcgagagcgagaaccaggagagcttcagaaccatcaacagcagcaacagcgtgaccaacagagagaacaacagcgccgtggtggacgtgaagacctgcagcatcgacaacaagctgcaggacgtgggcaacgacgagaaggccaccagcatcagcacccccagcgacagctacagcagcgtgagaaaccccagaatcaccagcctgtgcctgctgaaggactgcgaggagatcagagacaacagagagaaccagagacagaacgagtgcgtgagcgagatcagcaacagcgagaagcacgtgaccttcgagaaccacagaatcgtgagccccaagaacagcgacctgaagaacaccagccccgagcacggcggcagaggcagcgaggacgagcaggagagcttcagacccagcaccagccccctgagccacagcagccccagcgagatcagcggcaccagcagcagcggctgcgccctggagagcttcggcagcgccgcccagcagcagcagcccccctgcgagcaggagctgagccccctggtgtgcagccccgccggcgtgagcagactgacctacgtgagcgagcccgagagcagctaccccaccaccgccaccgacgacgccctggaggacagaaagagcgacatcaccagcgagctgagcaccaccatcatccagggcagccccgccgccctggaggagagagccatggagaagctgagagagaaggtgcccttccagaacagaggcaagggcaccctgagcagcatcatccagaacaacagcgacaccagaaaggccaccgagaccaccagcctgagcagcaagcccgagtacgtgaagcccgacttcagatggagcaaggaccccagcagcaagagcggcaacctgctggagaccagcgaggtgggctggaccagcaaccccgaggagctggaccccatcagactggccctgctgggcaagagcggcctgagctgccaggtgggcagcgccaccagccaccccgtgagctgccaggagcccatcgacgaggaccagagaatcagccccaaggacaagagcaccgccggcagagagttcagcggccaggtgagccaccagaccaccagcgagaaccagtgcacccccatccccagcagcaccgtgcacagcagcgtggccgacatgcagaacatgcccgccgccgtgcacgccctgctgacccagcccagcctgagcgccgcccccttcgcccagagatacctgggcaccctgcccagcaccggcagcaccaccctgccccagtgccacgccggcaacgccaccgtgtgcggcttcagcggcggcctgccctaccccgccgtggccggcgagcccgtgcagaacagcgtggccgtgggcatctgcctgggcagcaacatcggcagcggctggatgggcaccagcagcctgtgcaacccctacagcaacaccctgaaccagaacctgctgagcaccaccaagcccttccccgtgcccagcgtgggcaccaactgcggcatcgagccctgggacagcggcgtgaccagcggcctgggcagcgtgagagtgcccgaggagctgaagctgccccacgcctgctgcgtgggcatcgccagccagaccctgctgagcgtgctgaaccccaccgacagatggctgcaggtgagcatcggcgtgctgagcatcagcgtgaacggcgagaaggtggacctgagcacctacagatgcctggtgttcaagaacaaggccatcatcagaccccacgccaccgaggagatcaaggtgctgttcatccccagcagccccggcgtgttcagatgcaccttcagcgtggccagctggccctgcagcaccgacgccgagaccatcgtgcaggccgaggccctggccagcaccgtgaccctgaccgccatcgccgagagccccgtgatcgaggtggagaccgagaagaaggacgtgctggacttcggcgacctgacctacggcggctggaaggccctgcccctgaagctgatcaacagaacccacgccaccgtgcccatcagactgatcatcaacgccaacgccgtggcctggagatgcttcaccttcagcaaggagagcgtgagagcccccgtggaggtggccccctgcgccgacgtggtgaccagactggccggccccagcgtggtgaaccacatgatgcccgccagctacgacggccaggaccccgagttcctgatgatctgggtgctgttccacagccccaagaagcagatcagcagcagcgacatcctggacagcgccgaggagttcagcgccaaggtggacatcgaggtggacagccccaaccccacccccgtgctgagaagcgtgagcctgagagccagagccggcatcgccagaatccacgcccccagagacctgcagaccatgcacttcctggccaaggtggccagcagcagaaagcagcacctgcccctgaagaacgccggcaacatcgaggtgtacctggacatcaaggtgcccgagcagggcagccacttcagcgtggaccccaagaacctgctgctgaagcccggcgaggagcacgaggtgatcgtgagcttcacccccaaggaccccgaggcctgcgaggagagaatcctgaagatcttcgtgcagcccttcggcccccagtacgaggtggtgctgaagggcgaggtgatcagcagcggcagcaagcccctgagccccggcccctgcctggacatccccagcatcctgagcaacaagcagttcctggcctggggcggcgtgcccctgggcagaacccagctgcagaagctggccctgagaaacaacagcgccagcaccacccagcacctgagactgctgatcagaggccaggaccaggactgcttccagctgcagaacaccttcggcagcgagcagagactgaccagcaactgcgagatcagaatccaccccaaggaggacatcttcatcagcgtgctgttcgcccccaccagactgagctgcatgctggccagactggagatcaagcagctgggcaacagaagccagcccggcatcaagttcaccatccccctgagcggctacggcggcaccagcaacctgatcctggagggcgtgaagaagctgagcgacagctacatggtgaccgtgaacggcctggtgcccggcaaggagagcaagatcgtgttcagcgtgagaaacaccggcagcagagccgccttcgtgaaggccgtgggcttcaaggacagccagaagaaggtgctgctggaccccaaggtgctgagaatcttccccgacaagttcgtgctgaaggagagaacccaggagaacgtgaccctgatctacaaccccagcgacagaggcatcaacaacaagaccgccaccgagctgagcaccgtgtacctgttcggcggcgacgagatcagcagacagcagtacagaagagccctgctgcacaagcccgagatgatcaagcagatcctgcccgagcacagcgtgctgcagaacatcaacttcgtggaggccttccaggacgagctgctggtgaccgaggtgtacgacctgccccagagacccaacgacgtgcagctgttctacggcagcatgtgcaagatcatcctgagcgtgatcggcgagttcagagactgcatcagcagcagagagttcctgcagcccagcagcaaggccagcctggagagcaccagcgacctgggcgccagcggcaagcacggcggcaacgtgagcctggacgtgctgcccgtgaagggcccccagggcagccccctgctgagcagagccgccagaccccccctggaccagctggccagcgaggagccctggaccgtgctgcccgagcacctgatcctggtggcccccagcccctgcgacatggccaagaccggcagattccagatcgtgaacaacagcgtgagactgctgagattcgagctgtgctggcccgcccactgcctgaccgtgaccccccagcacggctgcgtggcccccgagagcaagctgcagatcctggtgagccccaacagcagcctgagcaccaagcagagcatgttcccctggagcggcctgatctacatccactgcgacgacggccagaagaagatcgtgaaggtgcagatcagagaggacctgacccaggtggagctgctgaccagactgaccagcaagcccttcggcatcctgagccccgtgagcgagcccagcgtgagccacctggtgaagcccatgaccaagccccccagcaccaaggtggagatcagaaacaagagcatcaccttccccaccaccgagcccggcgagaccagcgagagctgcctggagctggagaaccacggcaccaccgacgtgaagtggcacctgagcagcctggcccccccctacgtgaagggcgtggacgagagcggcgacgtgttcagagccacctacgccgccttcagatgcagccccatcagcggcctgctggagagccacggcatccagaaggtgagcatcaccttcctgcccagaggcagaggcgactacgcccagttctgggacgtggagtgccaccccctgaaggagccccacatgaagcacaccctgagattccagctgagcggccagagcatcgaggccgagaacgagcccgagaacgcctgcctgagcaccgacagcctgatcaagatcgaccacctggtgaagcccagaagacaggccgtgagcgaggccagcgccagaatccccgagcagctggacgtgaccgccagaggcgtgtacgcccccgaggacgtgtacagattcagacccaccagcgtgggcgagagcagaaccctgaaggtgaacctgagaaacaacagcttcatcacccacagcctgaagttcctgagccccagagagcccttctacgtgaagcacagcaagtacagcctgagagcccagcactacatcaacatgcccgtgcagttcaagcccaagagcgccggcaagttcgaggccctgctggtgatccagaccgacgagggcaagagcatcgccatcagactgatcggcgaggccctgggcaagaactag

SEQ ID NO: 12127 - DNA, 1545 bp, synthetic construct
  source 1..1545: mol_type = other DNA; note = Synthetic coding sequence
atgagcatcagcagcgacgaggtgaacttcctggtgtacagatacctgcaggagagcggcttcagccacagcgccttcaccttcggcatcgagagccacatcagccagagcaacatcaacggcgccctggtgccccccgccgccctgatcagcatcatccagaagggcctgcagtacgtggaggccgaggtgagcatcaacgaggacggcaccctgttcgacggcagacccatcgagagcctgagcctgatcgacgccgtgatgcccgacgtggtgcagaccagacagcaggcctacagagacaagctggcccagcagcaggccgccgccgccgccgccgccgccgccgccgccagccagcagggcagcgccaagaacggcgagaacaccgccaacggcgaggagaacggcgcccacaccatcgccaacaaccacaccgacatgatggaggtggacggcgacgtggagatcccccccaacaaggccgtggtgctgagaggccacgagagcgaggtgttcatctgcgcctggaaccccgtgagcgacctgctggccagcggcagcggcgacagcaccgccagaatctggaacctgagcgagaacagcaccagcggcagcacccagctggtgctgagacactgcatcagagagggcggccaggacgtgcccagcaacaaggacgtgaccagcctggactggaacagcgagggcaccctgctggccaccggcagctacgacggcttcgccagaatctggaccaaggacggcaacctggccagcaccctgggccagcacaagggccccatcttcgccctgaagtggaacaagaagggcaacttcatcctgagcgccggcgtggacaagaccaccatcatctgggacgcccacaccggcgaggccaagcagcagttccccttccacagcgcccccgccctggacgtggactggcagagcaacaacaccttcgccagctgcagcaccgacatgtgcatccacgtgtgcaagctgggccaggacagacccatcaagaccttccagggccacaccaacgaggtgaacgccatcaagtgggaccccaccggcaacctgctggccagctgcagcgacgacatgaccctgaagatctggagcatgaagcaggacaactgcgtgcacgacctgcaggcccacaacaaggagatctacaccatcaagtggagccccaccggccccggcaccaacaaccccaacgccaacctgatgctggccagcgccagcttcgacagcaccgtgagactgtgggacgtggacagaggcatctgcatccacaccctgaccaagcaccaggagcccgtgtacagcgtggccttcagccccgacggcagatacctggccagcggcagcttcgacaagtgcgtgcacatctggaacacccagaccggcgccctggtgcacagctacagaggcaccggcggcatcttcgaggtgtgctggaacgccgccggcgacaaggtgggcgccagcgccagcgacggcagcgtgtgcgtgctggacctgagaaagtag

SEQ ID NO: 12128 - DNA, 2034 bp, synthetic construct
  source 1..2034: mol_type = other DNA; note = Synthetic coding sequence
atggaggagaccatgaagctggccaccatggaggacaccgtggagtactgcctgttcctgatccccgacgagagcagagacagcgacaagcacaaggagatcctgcagaagtacatcgagagaatcatcaccagattcgcccccatgctggtgccctacatctggcagaaccagcccttcaacctgaagtacaagcccggcaagggcggcgtgcccgcccacatgttcggcgtgaccaagttcggcgacaacatcgaggacgagtggttcatcgtgtacgtgatcaagcagatcaccaaggagttccccgagctggtggccagaatcgaggacaacgacggcgagttcctgctgatcgaggccgccgacttcctgcccaagtggctggaccccgagaacagcaccaacagagtgttcttctgccacggcgagctgtgcatcatccccgcccccagaaagagcggcgccgagagctggctgcccaccaccccccccaccatcccccaggccctgaacatcatcaccgcccacagcgagaagatcctggccagcgagagcatcagagccgccgtgaacagaagaatcagaggctaccccgagaagatccaggccagcctgcacagagcccactgcttcctgcccgccggcatcgtggccgtgctgaagcagagacccagactggtggccgccgccgtgcaggccttctacctgagagaccccatcgacctgagagcctgcagagtgttcaagaccttcctgcccgagaccagaatcatgaccagcgtgaccttcaccaagtgcctgtacgcccagctggtgcagcagagattcgtgcccgacagaagaagcggctacagactgcccccccccagcgacccccagtacagagcccacgagctgggcatgaagctggcccacggcttcgagatcctgtgcagcaagtgcagcccccacttcagcgactgcaagaagagcctggtgaccgccagccccctgtgggccagcttcctggagagcctgaagaagaacgactacttcaagggcctgatcgagggcagcgcccagtacagagagagactggagatggccgagaactacttccagctgagcgtggactggcccgagagactggaggtgcagtggagagaccccggcctgctgcaggcccccccccccggcttcacccccttcatctgcctgagcctgctgagcacctgggacaacagcagcctggccatgagccccggcgaggagatcctgaccctgctgcagaccatccccttcgacatcgaggacctgaagaaggaggccgccaacctgccccccgaggacgacgaccagtggctggacctgagccccgaccagctggaccagctgctgcaggaggccgtgggcaagaaggagagcgagagcgtgagcaaggaggagaaggagcagaactacgacctgaccgaggtgagcgagagcatgaaggccttcatcagcaaggtgagcacccacaagggcgccgagctgcccagagagcccagcgaggcccccatcaccttcgacgccgacagcttcctgaactacttcgacaagatcctgggccccagacccaacgagagcgacagcgacgacctggacgacgaggacttcgagtgcctggacagcgacgacgacctggacttcgagacccacgagcccggcgaggaggccagcctgaagggcaccctggacaacctgaagagctacatggcccagatggaccaggagctggcccacacctgcatcagcaagagcttcaccaccagaaaccaggtggagcccgtgagccagaccaccgacaacaacagcgacgaggaggacagcggcaccggcgagagcgtgatggcccccgtggacgtggacctgaacctggtgagcaacatcctggagagctacagcagccaggccggcctggccggccccgccagcaacctgctgcagagcatgggcgtgcagctgcccgacaacaccgaccacagacccaccagcaagcccaccaagaactag

SEQ ID NO: 12129 - DNA, 1821 bp, synthetic construct
  source 1..1821: mol_type = other DNA; note = Synthetic coding sequence
atggaggagagccccctgagcagagcccccagcagaggcggcgtgaacttcctgaacgtggccagaacctacatccccaacaccaaggtggagtgccactacaccctgccccccggcaccatgcccagcgccagcgactggatcggcatcttcaaggtggaggccgcctgcgtgagagactaccacaccttcgtgtggagcagcgtgcccgagagcaccaccgacggcagccccatccacaccagcgtgcagttccaggagcccagacccatggacgagctggtgaccctggaggaggccgacggcggcagcgacatcctgctggtggtgcccaaggccaccgtgctgcagaaccagctggacgagagccagcaggagagaaacgacctgatgcagctgaagctgcagctggagggccaggtgaccgagctgagaagcagagtgcaggagctggagagagccctggccaccgccagacaggagcacaccgagctgatggagcagtacaagggcatcagcagaagccacggcgagatcaccgaggagagagacatcctgagcagacagcagggcgaccacgtggccagaatcctggagctggaggacgacatccagaccatcagcgagaaggtgctgaccaaggaggtggagctggacagactgagagacaccgtgaaggccctgaccagagagcaggagaagctgctgggccagctgaaggaggtgcaggccgacaaggagcagagcgaggccgagctggagcccctgaaggagcagctgagaggcgcccaggagctggccgccagcagccagcagaaggccaccctgctgggcgaggagctggccagcgccgccgccgccagagacagaaccatcgccgagctgcacagaagcagactggaggtggccgaggtgaacggcagactggccgagctgggcctgcacctgaaggaggagaagtgccagtggagcaaggagagagccggcctgctgcagagcgtggaggccgagaaggacaagatcctgaagctgagcgccgagatcctgagactggagaaggccgtgcaggaggagagaacccagaaccaggtgttcaagaccgagctggccagagagaaggacagcagcctggtgcagctgagcgagagcaagagagagctgaccgagctgagaagcgccctgagagtgctgcagaaggagaaggagcagctgcaggaggagaagcaggagctgctggagtacatgagaaagctggaggccagactggagaaggtggccgacgagaagtggaacgaggacgccaccaccgaggacgaggaggccgccgtgggcctgagctgccccgccgccctgaccgacagcgaggacgagagccccgaggacatgagactgcccccctacggcctgtgcgagagaggcgaccccggcagcagccccgccggccccagagaggccagccccctggtggtgatcagccagcccgcccccatcagcccccacctgagcggccccgccgaggacagcagcagcgacagcgaggccgaggacgagaagagcgtgctgatggccgccgtgcagagcggcggcgaggaggccaacctgctgctgcccgagctgggcagcgccttctacgacatggccagcggcttcaccgtgggcaccctgagcgagaccagcaccggcggccccgccacccccacctggaaggagtgccccatctgcaaggagagattccccgccgagagcgacaaggacgccctggaggaccacatggacggccacttcttcttcagcacccaggaccccttcaccttcgagtag

SEQ ID NO: 12130 - DNA, 2997 bp, synthetic construct
  source 1..2997: mol_type = other DNA; note = Synthetic coding sequence
atgaacagaagaagaaagttcctgctggccagcgtgctggccctgcagaacagcagcttcatctaccccagctgccagaagtgcttcagcagaatcatcctggtgagcaagagaagcaactgccccaagtgcggcagcaccggcgagagcggcaacgccaactacagatacaagctgagcctgaaggtggccgagagcaacaagctgttcgtgatcaccgtgttcggcagctgcctggacaccttcttcggcctgaccgccaccggcctgcacagatacatccaggaccccaacaagatccccgagaccctggacaacgacaccacccagaacctgctgaccaaggccgtggagacctgcttcgtgggccagagcttcatcttcggcgtgaccaacttcgagaaccagcccggccagggcagcgacgccagcaacttcctgcagcagtgcagcgaccacaagagaaaggccaaggccctggtggcctgccagatcgtgctgcccgaccccggcatcgccggcttcaccgtgatcgactacttccaccagctgctgcagaccttcaacttcagaaagctgcagtgcgacagccaggcccccaacaaccacctgctggccctggaccacagcaacagcgacctgagcagcatctacaccagcgacagcaccagcgacttcttcaagagctgcagcaaggacaccttcagcaagttctggcagcccagcctggagttcacctgcatcgtgagccagctgaccgacaacgacgacttcagcgccagcgagcagagcaaggccttcggcaccctgcagcagaacagaaagagcatcagcatcgccgaggccaccggcagcagcagctgccacgaccccatccaggacagctggagcctggtgagctacatggacaagaagagcaccgccgagaagctgggcaaggagctgggcctgcaggccaaggagctgagcgccgtgcacagcagccaccacgagatcggcgtgaacgacagcaacctgttcagcctggagatgagagagcccctggagagcagcaacaccaagagcttccacagcgccgtggagatcaagaacagaagccagcacgagctgccctgcttccagcaccacggcatcgacacccccaccagcctgcagaagagaagcgcctgctgcccccccagcctgctgagactggaggagaccgccagcagcagccaggacggcgacccccagatctgggacgacctgcccttcagcgagagcctgaacaagttcctggccgtgctggagagcgagatcgccgtgacccaggccgacgtgagcagcagaaagcaccacgtggacaacgacatcgacaagttccacgccgaccacagcagactgagcgtgaccccccagagaaccaccggcgccctgcacaccccccccatcgccctgagaagcagccaggtgatcgtgaaggccaactgcagcaaggacgacttcctgttcaactgcaagggcaacctgagccccagcgtggagaaggagagccagcccgacaacaaggtggaggccgtgagcgtgaaccacaacggcagagacatgagcgagtacttcctgcccaacccctacctgagcgccctgagcagcagcagcaaggacctggagaccatcgtgaccctgaagaagaccatcagaatcagcccccacagagagagcgaccacagcagcctgaacaacaagtacctgaacggctgcggcgagatcagcgtgagcgagatgaacgagaagctgaccaccctgtgctacagaaagtacaacgacgtgagcgacctgtgcaagctggagaacaagcagtactgcagatggagcaagaaccaggacgacagcttcaccatctgcagaaagctgacctaccccctggagaccctgtgcaacagccccaacagaagcaccaacaccctgaaggagatgccctggggccacatcaacaacaacgtgacccagagctacagcatcggctacgagggcagctacgacgccagcgccgacctgttcgacgacatcgccaaggagatggacatcgccaccgagatcaccaagaagagccaggacatcctgctgaagtggggcaccagcctggccgagagccaccccagcgagagcgacttcagcctgagaagcctgagcgaggacttcatccagcccagccagaagctgagcctgcagagcctgagcgacagcagacacagcagaacctgcagccccaccccccacttccagagcgacagcgagtacaacttcgagaacagccaggacttcgtgccctgcagccagagcacccccatcagcggcttccaccagaccagaatccacggcatcaacagagccttcaagaagcccgtgttctacagcgacctggacggcaactacgagaagatcagaatcttccccgagaacgacaagcagcaggccagccccagctgccccaagaacatcaagacccccagccagaagatcagaagccccatcgtgagcggcgtgagccagcccgacgtgttcaaccactaccccttcgccgagtgccacgagaccgacagcgacgagtgggtgccccccaccacccagaagatcttccccagcgacatgctgggcttccagggcatcggcctgggcaagtgcctggccgcctaccacttccccgaccagcaggagctgcccagaaagaagctgaagcacatcagacagggcaccaacaagggcctgatcaagaagaagctgaagaacatgctggccgccgtggtgaccaagaagaagacccacaagtacaactgcaagagcagcggctggatcagcaagtgccccgacatccaggtgctggccgccccccagctgcaccccatcctgggccccgacagctgcagcgaggtgaagtgctgcctgcccttcagcgagaagggcccccccagcgtgtgcgagaccagaagcgcctggagccccgagctgttcagctag

SEQ ID NO: 12131 - DNA, 471 bp, synthetic construct
  source 1..471: mol_type = other DNA; note = Synthetic coding sequence
atggccgacagccccggcggctacaaggagtgcggcaccaacgagggcccccaggaggacgagaacggcagcagcgccagcggcagcagcaaggtgagacagctgtggagcgaggacagctgcgagagcggcaagctgcccgccaccagaaccgtgtactgcatgaacgaggccgagatcgtggacgtggccctgggcatcctgatcgagagcagaaagcaggagaaggcctgcgagcagcccgccctggccggcgccgacaaccccgagcacagccccccctgcagcgtgagcccccacaccagcagcggcagcagcagcgaggaggaggacagcggcaagcaggccctggcccccggcctgagccccagccagagacccggcggcagcagcagcgcctgcagcagaagccccgaggaggaggaggaggaggacgtgctgaagtacgtgagagagatcttcttcagctag

SEQ ID NO: 12132 - DNA, 1377 bp, synthetic construct
  source 1..1377: mol_type = other DNA; note = Synthetic coding sequence
atggccgagctgcagatgctgctggaggaggagatccccggcggcagaagagccctgttcgacagctacaccaacctggagagagtggccgactactgcgagaacaactacatccagagcgccgacaagcagagagccctggaggagaccaaggcctacaccacccagagcctggccagcgtggcctacctgatcaacaccctggccaacaacgtgctgcagatgctggacatccaggccagccagctgagaagaatggagagcagcatcaaccacatcagccagaccgtggacatccacaaggagaaggtggccagaagagagatcggcatcctgaccaccaacaagaacaccagcagaacccacaagatcatcgcccccgccaacctggagagacccgtgagatacatcagaaagcccatcgactacaccatcctggacgacatcggccacggcgtgaaggtgagcacccagaacatgaagatgggcggcctgcccagaaccaccccccccacccagaagccccccagcccccccatgagcggcaagggcaccctgggcagcagcggcagcagcggcggcagccaccccagcagcagaagcagcagcagagagaacagcggcagcggcagcgtgggcgtgcccatcgccgtgcccacccccagcccccccagcgtgttccccgcccccgccggcagcgccggcaccccccccctgcccgccaccagcgccagcgcccccgcccccctggtgcccgccaccgtgcccagcagcaccgcccccgacgccgccgccggcggcgcccagaccctggccgacggcttcaccagccccaccccccccgtggtgagcagcaccccccccaccggccaccccgtgcagttctacagcatgaacagacccgccagcagacacaccccccccaccatcggcggcagcctgccctacagaagaccccccagcatcaccagccagaccagcctgcagaaccagatgaacggcggccccttctacagccagaaccccgtgagcgacaccccccccccccccccccccgtggaggagcccgtgttcgacgagagccccccccccccccccccccccgaggactacgaggaggaggaggccgccgtggtggagtacagcgacccctacgccgaggaggaccccccctgggcccccagaagctacctggagaaggtggtggccatctacgactacaccaaggacaaggaggacgagctgagcttccaggagggcgccatcatctacgtgatcaagaagaacgacgacggctggtacgagggcgtgatgaacggcgtgaccggcctgttccccggcaactacgtggagagcatcatgcactacagcgagtag

SEQ ID NO: 12133 - DNA, 5223 bp, synthetic construct
  source 1..5223: mol_type = other DNA; note = Synthetic coding sequence
tgaaagatctaccccgaggagatcacccccctgctgcccgccatcagcggcgagaagatcgccgaggaccagacctgcttcttcctgcagatcctgctgaagtacatggtgatccaggccgccagcctggagtggaagaacaaggagaaccaggacaccggcttcaagttcctgttcaccctgttcagaaagtactacctgccccacctgttccccagcttcaccaagctgaccaacatctacaagcccgtgctggacatcccccacctgagacccaagcccgtgtacatcaccaccaccagagacaacgagaacatctacagcaccaagatcccctacatggccgccagagtggtgttcatcaagtggatcgtgaccttcttcctggagaagaagtacctgaccgccacccagaacaccaagaacggcgtggacgtgctgcccaagatcatccagaccgtgggcggcggcgccgtgcaggagagagcccccgagctggacggcggcggccccaccgagcaggacaagagccacagcaacagcagcaccctgagcgacagaagactgagcaacagcagcctgtgcagcatcgaggaggagcacagaatggtgtacgagatggtgcagagaatcctgctgagcaccagaggctacgtgaacttcgtgaacgaggtgttccaccaggccttcctgctgcccagctgcgagatcgccgtgaccagaaaggtggtgcaggtgtacagaaagtggatcctgcaggacaagcccgtgttcatggaggagcccgacagaaaggacgtggcccaggaggacgccgagaagctgggcttcagcgagaccgacagcaaggaggccagcagcgagagcagcggccacaagagaagcagcagctggggcagaacctacagcttcaccagcgccatgagcagaggctgcgtgaccgaggaggagaacaccaacgtgaaggccggcgtgcaggccctgctgcaggtgttcctgaccaacagcgccaacatcttcctgctggagccctgcgccgaggtgcccgtgctgctgaaggagcaggtggacgcctgcaaggccgtgctgatcatcttcagaagaatgatcatggagctgaccatgaacaagaagacctgggagcagatgctgcagatcctgctgagaatcaccgaggccgtgatgcagaagcccaaggacaagcagatcaaggacctgttcgcccagagcctggccggcctgctgttcagaaccctgatggtggcctggatcagagccaacctgtgcgtgtacatcagcagagagctgtgggacgacttcctgggcgtgctgagcagcctgaccgagtgggaggagctgatcaacgagtgggccaacatcatggacagcctgaccgccgtgctggccagaaccgtgtacggcgtggagatgaccaacctgcccctggacaagctgagcgagcagaaggagaagaagcagagaggcaagggctgcgtgctggacccccagaagggcaccaccgtgggcagaagcttcagcctgagctggagaagccaccccgacgtgaccgagcccatgagattcagaagcgccaccaccagcggcgcccccggcgtggagaaggccagaaacatcgtgagacagaaggccaccgaggtggaggagtgccagcagagcgagaacgcccccgccgccggcagcggccacctgaccgtgggccagcagcagcaggtgctgagaagcagcagcaccagcgacatccccgagcccctgtgcagcgacagcagccagggccagaaggccgagaacacccagaacagcagcagcagcgagccccagcccatccaggagaacaagggccacgtgaagagagagcacgagggcatcaccatcctggtgagaagaagcagcagccccgccgagctggacctgaaggacgacctgcagcagacccagggcaagtgcagagagagacagaagagcgagagcaccaacagcgacaccaccctgggctgcaccaacgaggccgagctgagcatgggcccctggcagacctgcgaggaggaccccgagctgaacacccccaccgacgtggtggccgacgccgacgccagacactggctgcagctgagccccaccgacgccagcaacctgaccgacagcagcgagtgcctgaccgacgactgcagcatcatcgccggcggcagcctgaccggctggcaccccgacagcgccgccgtgctgtggagaagagtgctgggcatcctgggcgacgtgaacaacatccagagccccaagatccacgccagagtgttctgctacctgtacgagctgtggtacaagctggccaagatcagagacaacctggccatcagcctggacaaccagagcagccccagcccccccgtgctgatcccccccctgagaatgttcgccagctggctgttcaaggccgccaccctgcccaacgagtacaaggagggcaagctgcaggcctacagactgatctgcgccatgatgaccagaagacaggacgtgctgcccaacagcgacttcctggtgcacttctacctggtgatgcacctgggcctgaccagcgaggaccaggacatcctgaacaccatcatcagacactgcccccccagattcttcagcctgggcttccccggcttcagcatgctggtgggcgacttcatcaccgccgccgccagagtgctgagcaccgacatcctgaccgcccccagaagcgaggccgtgaccgtgctgggcagcctggtgtgcttccccaacacctaccaggagatccccctgctgcagagcgtgcccgaggtgaacgaggccatcaccggcaccgaggacgtgaagcactacctgatcaacatcctgctgaagaacgccaccgaggagcccaacgagtacgccagatgcatcgccgtgtgcagcctgggcgtgtggatctgcgaggagctggcccagtgcaccagccacccccaggtgaaggaggccatcaacgtgatcggcgtgaccctgaagttccccaacaagatcgtggcccaggtggcctgcgacgtgctgcagctgctggtgagctactgggagaagctgcagatgttcgagaccagcctgcccagaaagatggccgagatcctggtggccaccgtggccttcctgctgcccagcgccgagtacagcagcgtggagaccgacaagaagttcatcgtgagcctgctgctgtgcctgctggactggtgcatggccctgcccgtgagcgtgctgctgcaccccgtgagcaccgccgtgctggaggagcagcacagcgccagagcccccctgctggactacatctacagagtgctgcactgctgcgtgtgcggcagcagcacctacacccagcagagccactacatcctgaccctggccgacctgagcagcaccgactacgaccccttcctgcccctggccaacgtgaagagcagcgagcccgtgcagtaccacagcagcgccgagctgggcaacctgctgaccgtggaggaggagaagaagagaagaagcctggagctgatccccctgaccgccagaatggtgatggcccacctggtgaaccacctgggccactaccccctgagcggcggccccgccatcctgcacagcctggtgagcgagaaccacgacaacgcccacgtggagggcagcgagctgagcttcgaggtgttcagaagccccaacctgcagctgttcgtgttcaacgacagcaccctgatcagctacctgcagacccccaccgagggccccgtgggcggcagccccgtgggcagcctgagcgacgtgagagtgatcgtgagagacatcagcggcaagtacagctgggacggcaaggtgctgtacggccccctggagggctgcctggcccccaacggcagaaaccccagcttcctgatcagcagctggcacagagacaccttcggcccccagaaggacagcagccaggtggaggagggcgacgacgtgctggacaagctgctggagaacatcggccacaccagccccgagtgcctgctgcccagccagctgaacctgaacgagcccagcctgaccccctgcggcatgaactacgaccaggagaaggagatcatcgaggtgatcctgagacagaacgcccaggaggacgagtacatccagagccacaacttcgacagcgccatgaaggtgaccagccagggccagcccagccccgtggagcccagaggccccttctacttctgcagactgctgctggacgacctgggcatgaacagctgggacagaagaaagaacttccacctgctgaagaagaacagcaagctgctgagagagctgaagaacctggacagcagacagtgcagagagacccacaagatcgccgtgttctacatcgccgagggccaggaggacaagtgcagcatcctgagcaacgagagaggcagccaggcctacgaggacttcgtggccggcctgggctgggaggtggacctgagcacccactgcggcttcatgggcggcctgcagagaaacggcagcaccggccagaccgccccctactacgccaccagcaccgtggaggtgatcttccacgtgagcaccagaatgcccagcgacagcgacgacagcctgaccaagaagctgagacacctgggcaacgacgaggtgcacatcgtgtggagcgagcacagcagagactacagaagaggcatcatccccaccgccttcggcgacgtgagcatcatcatctaccccatgaagaaccacatgttcttcatcgccatcaccaagaagcccgaggtgcccttcttcggccccctgttcgacggcgccatcgtgagcggcaagctgctgcccagcctggtgtgcgccacctgcatcaacgccagcagagccgtgaagtgcctgatccccctgtaccagagcttctacgaggagagagccctgtacctggaggccatcatccagaaccacagagaggtgatgaccttcgaggacttcgccgcccaggtgttcagccccagccccagctacagcctgagcggcaccggcgccctggccagcagcctgagcgccgacctggaggagcccctgagcgaggaggagaccgagcaccccctgctgcccctgcccagagccaccaagcccagaatcagcagaaagttcagatgctgcaccagcgccctgagcagaagcagccactag

SEQ ID NO: 12134 - DNA, 1836 bp, synthetic construct
  source 1..1836: mol_type = other DNA; note = Synthetic coding sequence
atgccccacctggacatgaagacccacgtgtgccccagcgtggagggccccaagaagaagggcggcatcacctgcttctgctgcggcggccccttcagagccgccgacagaagcaagaccagaagccccaagctgagccacagcccccagccccccagcctgggcgaccccgtggagcacctgagcgagaccagcgccgacagcctggaggccatgagcgagggcgacgcccccacccccttcagcagaggcagcagaaccagagccagcctgcccgtggtgagaagcaccaaccagaccaaggagagaagcctgggcgtgctgtacctgcagtacggcgacgagaccaagcagctgagaatgcccaacgagatcaccagcgccgacaccatcagagccctgttcgtgagcgccttcccccagcagctgaccatgaagatgctggagagccccagcgtggccatctacatcaaggacgagagcagaaacgtgtactacgagctgaacgacgtgagaaacatccaggacagaagcctgctgaaggtgtacaacaaggaccccgcccacgccttcaaccacacccccaagaccatgaacggcgacatgagaatgcagagagagctggtgtacgccagaggcgacggccccggcgcccccagacccggcagcaccgcccaccccccccacgccatccccaacagcccccccagcacccccgtgccccacagcatgccccccagccccagcagaatcccctacggcggcaccagaagcatggtggtgcccggcaacgccaccatccccagagacagaatcagcagcctgcccgtgagcagacccatcagccccagccccagcgccatcctggagagaagagacgtgaagcccgacgaggacatgagcggcaagaacatcgccatgtacagaaacgagggcttctacgccgacccctacctgtaccacgagggcagaatgagcatcgccagcagccacggcggccaccccctggacgtgcccgaccacatcatcgcctaccacagaaccgccatcagaagcgccagcgcctactgcaaccccagcatgcaggccgagatgcacatggagcagagcctgtacagacagaagagcagaaagtaccccgacagccacctgcccaccctgggcagcaagaccccccccgccagcccccacagagtgagcgacctgagaatgatcgacatgcacgcccactacaacgcccacggccccccccacaccatgcagcccgacagagccagccccagcagacaggccttcaagaaggagcccggcaccctggtgtacatcgagaagcccagaagcgccgccggcctgagcagcctggtggacctgggcccccccctgatggagaagcaggtgttcgcctacagcaccgccaccatccccaaggacagagagaccagcgagaagatgatgaagaccaccgccaacagaaaccacaccgacagcgccggcaccccccacgtgagcggcggcaagatgctgagcgccctggagagcaccgtgccccccagccagcccccccccgtgggcaccagcgccatccacatgagcctgctggagatgagaagaagcgtggccgagctgagactgcagctgcagcagatgagacagctgcagctgcagaaccaggagctgctgagagccatgatgaagaaggccgagctggagatcagcggcaaggtgatggagaccatgaagagactggaggaccccgtgcagagacagagagtgctggtggagcaggagagacagaagtacctgcacgaggaggagaagatcgtgaagaagctgtag

SEQ ID NO: 12135 - DNA, 189 bp, synthetic construct
  source 1..189: mol_type = other DNA; note = Synthetic coding sequence
tgagagaaccccctggtgtactgcgacggccacggctgcagcgtggccgtgcaccaggcctgctacggcatcgtgcaggtgcccaccggcccctggttctgcagaaagtgcgagagccaggagagagccgccagagtggtgggccccatgtggttcgtgccctgcatcttccagagatacaacctgtag

SEQ ID NO: 12136 - DNA, 1869 bp, synthetic construct; identical to SEQ ID NO: 9991
  source 1..1869: mol_type = other DNA; note = Synthetic coding sequence

SEQ ID NO: 12137 - DNA, 546 bp, synthetic construct
  source 1..546: mol_type = other DNA; note = Synthetic coding sequence
atgggcggcagaagcgcccaggccggcctgggcaccagaatcacccccatgatggagctgaagcccaacgccggcagcgacagagcctgggtgtggaacacccacgccgacttcgccgacgagtgccccaagcccgagctgctggccatcagattcctgaacgccgagaacgcccagaagttcaagaccaagttcgaggagtgcagaaaggagatcgaggagagagagaagaagggcgacgtggtgccctgggtgggcggcctgctgtgcagactgaccctgcacctgaccatcctgcccggcggctgcttcttctgcctgcccgacaagcacagcagagtgctgtggcccccccacgtgagcagagtgatgcagctgcccggcgacaccggcgccagctggggcgccctgagcacctgccagtgctgctggccccagagcaactgggccggcatcggcgtgagagccctgcccggcgcccaccagaaggtgctgtacgacggccccagattcgtgagccagagagcctggagccccctgccctag

SEQ ID NO: 12138 - DNA, 378 bp, synthetic construct
  source 1..378: mol_type = other DNA; note = Synthetic coding sequence
atgagcagcagcggctacccccccaaccagggcgccttcagcaccgagcagagcagataccccccccacagcgtgcagtacaccttccccaacaccagacaccagcaggagttcgccgtgcccgactacagaagcagccacctggaggtgagccaggccagccagctgctgcagcagcagcagcagcagcagctgagaagaagacccagcctgctgagcgagttccaccccggcagcgacagaccccaggagagaagaaccagctacgagcccttccaccccggccccagccccgtggaccacgacagcctggagagcaagagacccagactggagcaggtgagcgacagccacttccagagagtgagcgccgcctag

SEQ ID NO: 12139 - DNA, 318 bp, synthetic construct
  source 1..318: mol_type = other DNA; note = Synthetic coding sequence
atgctgagatgcggccagatgatcttcgcccaggccctggtgtgcagacacctgggcagagactggagatggacccagagaaagagacagcccgacagctacttcagcgtgctgaacgccttcatcgacagaaaggacagctactacagcatccaccagatcgcccagatgggcgtgggcgagggcaagagcatcggccagtggtacggccccaacaccgtggcccaggtgctgaagaagctggccgtgttcgacacctggagcagcctggccgtgcacatcgccatggacaacaccgtggtgatggaggagatctag

SEQ ID NO: 12140 - DNA, 1305 bp, synthetic construct
  source 1..1305: mol_type = other DNA; note = Synthetic coding sequence
atggacatcgacaaggacctggaggcccccctgtacctgacccccgagggctggagcctgttcctgcagagatactaccaggtggtgcacgagggcgccgagctgagacacctggacacccaggtgcagagatgcgaggacatcctgcagcagctgcaggccgtggtgccccagatcgacatggagggcgacagaaacatctggatcgtgaagcccggcgccaagagcagaggcagaggcatcatgtgcatggaccacctggaggagatgctgaagctggtgaacggcaaccccgtggtgatgaaggacggcaagtgggtggtgcagaagtacatcgagagacccctgctgatcttcggcaccaagttcgacctgagacagtggttcctggtgaccgactggaaccccctgaccgtgtggttctacagagacagctacatcagattcagcacccagcccttcagcctgaagaacctggacaacagcgtgcacctgtgcaacaacagcatccagaagcacctggagaacagctgccacagacaccccctgctgccccccgacaacatgtggagcagccagagattccaggcccacctgcaggagatgggcgcccccaacgcctggagcaccatcatcgtgcccggcatgaaggacgccgtgatccacgccctgcagaccagccaggacaccgtgcagtgcagaaaggccagcttcgagctgtacggcgccgacttcgtgttcggcgaggacttccagccctggctgatcgagatcaacgccagccccaccatggcccccagcaccgccgtgaccgccagactgtgcgccggcgtgcaggccgacaccctgagagtggtgatcgacagaatgctggacagaaactgcgacaccggcgccttcgagctgatctacaagcagcccgccgtggaggtgccccagtacgtgggcatcagactgctggtggagggcttcaccatcaagaagcccatggccatgtgccacagaagaatgggcgtgagacccgccgtgcccctgctgacccagagaggcagcggcgaggccagacaccacttccccagcctgcacaccaaggcccagctgcccagcccccacgtgctgagacaccagggccaggtgctgagaagacagcacagcaagctggtgggcaccaaggccctgagcaccaccggcaaggccctgagaaccctgcccaccgccaaggtgttcatcagcctgccccccaacctggacttcaaggtggcccccagcatcctgaagcccagaaaggtgggcctggacctgtag

SEQ ID NO: 12141 - DNA, 576 bp, synthetic construct
  source 1..576: mol_type = other DNA; note = Synthetic coding sequence
atggccatcggcaagagactggccaccctgcccaccaaggagcagaagacccagagactgatcagcgagctgagcctgctgaaccacaagctgcccgccagagtgtggctgcccaccgccggcttcgaccaccacgtggtgagagtgccccacacccaggccgtggtgctgaacagcaaggacaaggccccctacctgatctacgtggaggtgctggagtgcgagaacttcgacaccaccagcgtgcccgccagaatccccgagaacagaatcagaagcaccagaagcgtggagaacctgcccgagtgcggcatcacccacgagcagagagccggcagcttcagcaccgtgcccaactacgacaacgacgacgaggcctggagcgtggacgacatcggcgagctgcaggtggagctgcccgaggtgcacaccaacagctgcgacaacatcagccagttcagcgtggacagcatcaccagccaggagagcaaggagcccgtgttcatcgccgccggcgacatcagaagaagactgagcgagcagctggcccacacccccaccgccttcaagagatag

SEQ ID NO: 12142 - DNA, 903 bp, synthetic construct
  source 1..903: mol_type = other DNA; note = Synthetic coding sequence
atggccaagtggggccagggcaacccccactggatcgtggaggagagagaggacggcaccaacgtgaacaactggagatggagaaccgagagagacgccaccagcctgagcaagggcaagttccaggagctgctggtgggcatcgtggtggagaacgacgccggcagaggcgagatcaacgagctgaagcaggtggagggcgaggccagctgcagcagcagaaagggcaagctgatcttcttctacgagtggaacatcaagctgggctggaagggcatcgtgaaggagagcggcgtgaagcacaagggcctgatcgagatccccaacctgagcgaggagaacgaggtggacgacaccgaggtgagcctgagcaagaagaagggcgacggcgtgatcctgaaggacctgatgaagaccgccggcaccgccaaggtgagagaggccctgggcgactacctgaaggccctgaagaccgagttcaccaccggcatgatcctgcccaccaaggccatggccacccaggagctgaccgtgaagagaaagctgagcggcaacaccctgcaggtgcaggccagcagccccgtggccctgggcgtgagaatccccaccgtggccctgcacatgatggagctgttcgacaccaccgtggagcagctgtacagcatcttcaccgtgaaggagctgaccaacaagaagatcatcatgaagtggagatgcggcaactggcccgaggagcactacgccatggtggccctgaacttcgtgcccaccctgggccagaccgagctgcagctgaaggagttcctgagcatctgcaaggaggagaacatgaagttctgctggcagaagcagcacttcgaggagatcaagggcagcctgcagctgacccccctgaacggctag

SEQ ID NO: 12143 - DNA, 1137 bp, synthetic construct
  source 1..1137: mol_type = other DNA; note = Synthetic coding sequence
atgaaggacgtgcccggcttcctgcagcagagccagaacagcggccccggccagcccgccgtgtggcacagactggaggagctgtacaccaagaacttcatgaagaccctgagcgtgaacctgaacaccggcaagagcctgagcagcgtgttccacttcgagaacgagtgcatcgacgccagaagatgcagcaaggccggcggcttctacttcagagtgaaccccctgagcctggtggagatcatcctgcacgtggtgagacagatgaccgaccccaacgtggccctgaccttcctggagaagaccagagagaaggtgaagagcagcgacgaggccgtgatcctgtgcaagaccgccatcggcgccctgaagctgaacatcggcgacctgcaggtgaccaaggagaccatcgaggacgtggaggagatgctgaacaacctgcccggcgtgaccagcgtgcacagcagattctacgacctgagcagcaagtactaccagaccatcggcaaccacgccagctactacaaggacgccctgagattcctgggctgcgtggacatcaaggacctgcccgtgagcgagcagcaggagagagccttcaccctgggcctggccggcctgctgggcgagggcgtgttcaacttcggcgagctgctgatgcaccccgtgctggagagcctgagaaacaccgacagacagtggctgatcgacaccctgtacgccttcaacagcggcaacgtggagagattccagaccctgaagaccgcctggggccagcagcccgacctggccgccaacgaggcccagctgctgagaaagatccagctgctgtgcctgatggagatgaccttcaccagacccgccaaccacagacagctgaccttcgaggagatcgccaagagcgccaagatcaccgtgaacgaggtggagctgctggtgatgaaggccctgagcgtgggcctggtgaagggcagcatcgacgaggtggacaagagagtgcacatgacctgggtgcagcccagagtgctggacctgcagcagatcaagggcatgaaggacagactggagttctggtgcaccgacgtgaagagcatggagatgctggtggagcaccaggcccacgacatcctgacctag

SEQ ID NO: 12144 - DNA, 603 bp, synthetic construct
  source 1..603: mol_type = other DNA; note = Synthetic coding sequence
atgctgctggagcagaacctgatcaccgtggacatgcagaagcacagcctgaccttctggtggctggtggagtgctggccccaggtgttcaacaagctgatcagaagatacaagtacctggagaagggcttcgaggacgaggtgaagaagctgctgctgttcctgaagggcttcagcgagagcgagagaaacaagctggccatgctgaccggcgtgctgctggccaacggcaccctgaacgccagcatcctgaacagcctgtacaacgagaacctggtgaaggagggcgtgagcgccgccttcgccgtgaagctgttcaagagctggatcaacgagaaggacatcaacgccgtggccgccagcctgagaaaggtgagcatggacaacagactgatggagctgttccccgccaacaagcagagcgtggagcacttcaccaagtacttcaccgaggccggcctgaaggagctgagcgagtacgtgagaaaccagcagaccatcggcgccagaaaggagctgcagaaggagctgcaggagcagatgagcagaggcgaccccttcaaggacatcatcctgtacgtgaaggaggagatgaagaagtag

SEQ ID NO: 12145 - DNA, 1446 bp, synthetic construct; identical to SEQ ID NO: 12062
  source 1..1446: mol_type = other DNA; note = Synthetic coding sequence

SEQ ID NO: 12146 - DNA, 261 bp, synthetic construct
  source 1..261: mol_type = other DNA; note = Synthetic coding sequence
atgggcaagatggtgagcgtgatcaacaccgtggacaccagccacgaggacatgatccacgacgcccagatggactactacggcaccagactggccacctgcagcagcgacagaagcgtgaagatcttcgacgtgagaaacggcggccagatcctgatcgccgacctgagaggccacgagggccccgtgtggcaggtggcctgggcccaccccatgtacggcaacatcctggccagctgcagctacgacagaaaggtgtag

SEQ ID NO: 12147 - DNA, 660 bp, synthetic construct
  source 1..660: mol_type = other DNA; note = Synthetic coding sequence
atggagcccagcgcccagcagctgcagctggccgccagcctgcccgccaacctgagcaacttctgccagggcagcgagatgcccaccaccagcagacccgccctggacgtgaagggcggcaccagccccgccaaggaggacgccaaccaggagatgagcagcgtggcctacagcaacctggccgtgaaggacagaaaggccgtggccatcctgcactaccccggcgtggccagcaacggcaccaaggccagcggcgcccccaccagcagcagcggcagccccatcggcagccccaccaccaccccccccaccaagccccccagcttcaacctgcaccccgccccccacctgctggccagcatgcacctgcagaagctgaacagccagtaccagggcatggccgccgccacccccggccagcccggcgaggccggccccctgcagaactgggacttcggcgcccaggccggcggcgccgagagcctgagccccagcgccggcgcccagagccccgccatcatcgacagcgaccccgtggacgaggaggtgctgatgagcctggtggtggagctgggcctggacagagccaacgagctgcccgagctgtggctgggccagaacgagttcgacttcaccgccgacttccccagcagctgctag

SEQ ID NO: 12148 - DNA, 396 bp, synthetic construct
  source 1..396: mol_type = other DNA; note = Synthetic coding sequence
atgctgtgctggggctactggagcctgggccagcccggcatcagcaccaacctgcagggcatcgtggccgagccccaggtgtgcggcttcatcagcgacagaagcgtgaaggaggtggcctgcggcggcaaccacagcgtgttcctgctggaggacggcgaggtgtacacctgcggcctgaacaccaagggccagctgggccacgagagagagggcaacaagcccgagcagatcggcgccctggccgaccagcacatcatccacgtggcctgcggcgagagccacagcctggccctgagcgacagaggccagctgttcagctggggcgccggcagcgacggccagctgggcctgatgaccaccgaggacagcgtggccgtgcccagactgatctag

SEQ ID NO: 12149 - DNA, 3099 bp, synthetic construct
  source 1..3099: mol_type = other DNA; note = Synthetic coding sequence
atggagggcgccctgaccgccagagacaaggtgggcgtgcaggacttcgtgctgctggacgcctacaccagcgagagcgccttcgtggacaacctgagaaagagattcagcgagaacctgatctacacctacatcggcaccctgctggtgagcgtgaacccctaccaggagctgggcatctacaccgtgagccagatggagctgtaccagggcgtgaacttcttcgagctgcccccccacgtgtacgccatcgccgacaacgcctacagaatgatgtgcgccgagctgaacaaccacttcatcctgatcagcggcgagagcggcgccggcaagaccgaggccagcaagaagatcctggagtacttcgccgtgacctgccccatgacccagagcctgcagatcgccagagacagactgctgttcagcaaccccgtgctggaggccttcggcaacgccagaaccctgagaaacgacaacagcagcagattcggcaagtacatggacatccagttcgacttccagggcatccccgtgggcggccacatcatcagctacctgatcgagaagagcagagtggtgtaccagaacgagggcgagagaaacttccacatcttctaccagctgctggccggcggcgaggaggagagactgagctacctgggcctggagagagacccccagctgtacaagtacctgagccagggccactgcgccaaggagagcagcatcagcgacaagaacgactggaagaccgtgagcaacgccttcagcgtgatcgacttcaccgaggccgacctggagaacctgttcggcatcatcgccagcgtgctgcacctgggcaacatcggcttcgaggaggacgaccagggctgcgccaccatccccgacacccacgagatcaagtggatcgccaagctgctgggcgtgcaccccagcgtgctgctggaggccctgacccacagaaagatcgaggccaagaccgaggaggtgatctgccccctgaccctggagctgagcgtgtacgccagagacgccatggccaaggccgtgtacggcagaaccttcacctggctggtgaacaagatcaacagcagcctggtgaacaaggtgggccagagaatcctggaccccctgctgctgctgacctggaagaccgtgatcggcctgctggacatctacggcttcgaggtgttcgacaagaacggcttcgagcagttctgcatcaactactgcaacgagaagctgcagcagctgctgatcgagagaaccctgaaggccgagcaggccgagtacgagatggagggcatcgagtgggagcccatcaagtacttcaacaacaagatcatctgcgacctggtggaggagagacacaagggcatcatcagcatcctggacgaggagtgcatcagacccggccccgccaccgacctgagcttcctggagaagctggaggagaaggtgggcaagcacgcccacttcgagaccagaaagctggccggccccaagggcagaaagagaatcggctggatggagttcagactgctgcactacgccggcgaggtgacctactgcaccaagggcttcctggagaagaacaacgacctgctgtacagacacctgaaggaggtgctgtgcaagagcaagaacatcatcctgagagagtgcttcctgctggccgagctggagaacagaagaagaccccccaccgtgggcacccagttcaagaacagcctgagcagcctgctggagaccctgatcagcaaggagcccagctacatcagatgcatcaagcccaacgacagaaaggagcccagcaagttcgacgacttcctgatcagacaccagatcaagtacctgggcctgatggagcacctgagagtgagaagagccggcttcgcctacagaagaaagtacgagcacttcctgcagagatacaagagcctgtgccccgacacctggccccactggcacggcccccccgccgagggcgtggagagactgatcaagtacatcggctacaagcccgaggagtacaagctgggcaagaccaagatcttcatcagattccccagaaccctgttcgccaccgaggacgccttcgagttcagcaagcaccagctggtggccagaatccaggccacctacaagagatgcctgggcagaagagagtacgtgaagaagagacaggccgccatcaagctggaggcccactggagaggcgccctggccagaaaggccatccagagaagaaagtgggccgtgagaatcatcagaaagttcatcaagggcttcatcagcagaaacaagcccctgtgccccgacaacgaggagttcatcgtgttcgtgagaaagaactacatcctgaacctgagataccacctgcccaagaccgtgctggacaagagctggctgagaccccccggcatcctggagaacgccagcgacctgctgagaaagatgtgcgtgagaaacctggtgcagaagtactgcagaggcatcaccgccgagagaaaggccatgatgcagcagaaggtggtgaccagcgagatcttcagaggcagaaaggacggctacaccgagagcctgaaccagcccttcgtgaacagcagaatcgacgagggcgacatcaaccccaaggtgctgcagctgatcagccacgagaagatccagtacggcgtgcccgtgatcaagtacgacagaaagggcttcaaggccagacagagacagctgatcctgacccagaaggccgcctacgtggtggagctggccaagatcaagcagaagatcgagtacagcgccctgaagggcgtgagcaccagcaacctgagcgacggcatcctggtgatccacgtgagccccgaggacagcaagcagaagggcgacgccgtgctgcagtgcggccacgtgttcgaggccgtgaccaagctggtgatgctggtgaagaaggagaacatcgtgaacgtggtgcagggcagcctgcagttcttcatcagccccggcaaggagggcaccatcgtgttcgacaccggcctggaggagcaggtgtacaagaacaagaacggccagctgaccgtggtgagcgtgagaagaaagagctag

SEQ ID NO: 12150 - DNA, 1176 bp, synthetic construct
  source 1..1176: mol_type = other DNA; note = Synthetic coding sequence
atgtgcagccagctgtggttcctgaccgacagaagaatcagagaggactacccccaggtgcagatcctgagagccctgagacagagatgcagcgagcaggacgtgagattcagagccgtgctgatggaccagatcgccgtgaccatcgtgggcggccacctgggcctgcagctgaaccagaaggccctgaccaccttccccgacgtggtgctggtgagagtgcccacccccagcgtgcagagcgacagcgacatcaccgtgctgagacacctggagaagctgggctgcagactggtgaacagaccccagagcatcctgaactgcatcaacaagttctggaccttccaggagctggccggccacggcgtgcccatgcccgacaccttcagctacggcggccacgaggacttcagcaagatgatcgacgaggccgagcccctgggctaccccgtggtggtgaagagcaccagaggccacagaggcaaggccgtgttcctggccagagacaagcaccacctgagcgacatctgccacctgatcagacacgacgtgccctacctgttccagaagtacgtgaaggagagccacggcaaggacatcagagtggtggtggtgggcggccaggtgatcggcagcatgctgagatgcagcaccgacggcagaatgcagagcaactgcagcctgggcggcgtgggcgtgaagtgccccctgaccgagcagggcaagcagctggccatccaggtgagcaacatcctgggcatggacttctgcggcatcgacctgctgatcatggacgacggcagcttcgtggtgtgcgaggccaacgccaacgtgggcttcctggccttcgaccaggcctgcaacctggacgtgggcggcatcatcgccgactacaccatgagcctgctgcccaacagacagaccggcaagatggccgtgctgcccggcctgagcagccccagagagaagaacgagcccgacggctgcgccagcgcccagggcgtggccgagagcgtgtacaccatcaacagcggcagcaccagcagcgagagcgagcccgagctgggcgagatcagagacagcagcgccagcaccatgggcgccccccccagcatgctgcccgagcccggctacaacatcaacaacagaatcgccagcgagctgaagctgaagtag

SEQ ID NO: 12151 - DNA, 1065 bp, synthetic construct
  source 1..1065: mol_type = other DNA; note = Synthetic coding sequence
atggacatggaccacatcatgacctgggccaccgacgtggccaagggcatgcactacctgcacatggaggcccccgtgaaggtgatccacagagacctgaagagcagaaacgtggtgatcgccgccgacggcgtgctgaagatctgcgacttcggcgccagcagattccacaaccacaccacccacatgagcctggtgggcaccttcccctggatggcccccgaggtgatccagagcctgcccgtgagcgagacctgcgacacctacagctacggcgtggtgctgtgggagatgctgaccagagaggtgcccttcaagggcctggagggcctgcaggtggcctggctggtggtggagaagaacgagagactgaccatccccagcagctgccccagaagcttcgccgagctgctgcaccagtgctgggaggccgacgccaagaagagacccagcttcaagcagatcatcagcatcctggagagcatgagcaacgacaccagcctgcccgacaagtgcaacagcttcctgcacaacaaggccgagtggagatgcgagatcgaggccaccctggagagactgaagaagctggagagagacctgagcttcaaggagcaggagctgaaggagagagagagaagactgaagatgtgggagcagaagctgaccgagcagagcaacacccccctgctgctgcccctggccgccagaatgagcgaggagagctacttcgagagcaagaccgaggagagcaacagcgccgagatgagctgccagatcaccgccaccagcaacggcgagggccacggcatgaaccccagcctgcaggccatgatgctgatgggcttcggcgacatcttcagcatgaacaaggccggcgccgtgatgcacagcggcatgcagatcaacatgcaggccaagcagaacagcagcaagaccaccagcaagagaagaggcaagaaggtgaacatggccctgggcttcagcgacttcgacctgagcgagggcgacgacgacgacgacgacgacggcgaggaggaggacaacgacatggacaacagcgagtag

SEQ ID NO: 12152 - DNA, 1707 bp, synthetic construct
  source 1..1707: mol_type = other DNA; note = Synthetic coding sequence
atgctggagagaccccccgccctggccatgcccatgcccaccgagggcacccccccccccctgagcggcacccccatccccgtgcccgcctacttcagacacgccgagcccggcttcagcctgaagagacccagaggcctgagcagaagcctgcccccccccccccccgccaagggcagcatccccatcagcagactgttcccccccagaacccccggctggcaccagctgcagcccagaagagtgagcttcagaggcgaggccagcgagaccctgcagagccccggctacgaccccagcagacccgagagcttcttccagcagagcttccagagactgagcagactgggccacggcagctacggcgaggtgttcaaggtgagaagcaaggaggacggcagactgtacgccgtgaagagaagcatgagccccttcagaggccccaaggacagagccagaaagctggccgaggtgggcagccacgagaaggtgggccagcacccctgctgcgtgagactggagcaggcctgggaggagggcggcatcctgtacctgcagaccgagctgtgcggccccagcctgcagcagcactgcgaggcctggggcgccagcctgcccgaggcccaggtgtggggctacctgagagacaccctgctggccctggcccacctgcacagccagggcctggtgcacctggacgtgaagcccgccaacatcttcctgggccccagaggcagatgcaagctgggcgacttcggcctgctggtggagctgggcaccgccggcgccggcgaggtgcaggagggcgaccccagatacatggcccccgagctgctgcagggcagctacggcaccgccgccgacgtgttcagcctgggcctgaccatcctggaggtggcctgcaacatggagctgccccacggcggcgagggctggcagcagctgagacagggctacctgccccccgagttcaccgccggcctgagcagcgagctgagaagcgtgctggtgatgatgctggagcccgaccccaagctgagagccaccgccgaggccctgctggccctgcccgtgctgagacagcccagagcctggggcgtgctgtggtgcatggccgccgaggccctgagcagaggctgggccctgtggcaggccctgctggccctgctgtgctggctgtggcacggcctggcccaccccgccagctggctgcagcccctgggcccccccgccaccccccccggcagccccccctgcagcctgctgctggacagcagcctgagcagcaactgggacgacgacagcctgggccccagcctgagccccgaggccgtgctggccagaaccgtgggcagcaccagcacccccagaagcagatgcacccccagagtgctgacccccctgagactgagccccgccgccgagcccagcgcccccggcctgggccccgccgccgaggccccctgctgcgtggagcagagaggcttcctgagcagacacatccccagaagcttcagcgccttccaggccgccccccccaagagcgcctgcaacgccctgcacctgcacggccacacccagcccagcgccttcgtgtggagcctgacctgcagcagccaccacggcagaaccttcgaggccagaaccaaggtggaccccctgttcaagatctgcggcggcttcctgaccgtgttcgccgacctgtag

SEQ ID NO: 12153 - DNA, 642 bp, synthetic construct
  source 1..642: mol_type = other DNA; note = Synthetic coding sequence
atggccgagaccgaggagagaagcctggacaacttcttcgccaagagagacaagaagaagaagaaggagagaagcaacagagccgccagcgccgccggcgccgccggcagcgccggcggcagcagcggcgccgccggcgccgccggcggcggcgccggcgccggcaccagacccggcgacggcggcaccgccagcgccggcgccgccggccccggcgccgccaccaaggccgtgaccaaggacgaggacgagtggaaggagctggagcagaaggaggtggactacagcggcctgagagtgcaggccatgcagatcagcagcgagaaggaggaggacgacaacgagaagagacaggaccccggcgacaactgggaggagggcggcggcggcggcggcggcatggagaagagcagcggcccctggaacaagaccgcccccgtgcaggccccccccgcccccgtgatcgtgaccgagacccccgagcccgccatgaccagcggcgtgtacagaccccccggcgccagactgaccaccaccagaaagaccccccagggcccccccgagatctacagcgacacccagttccccagcctgcagagcaccgccaagcacgtggagagcagaaacagatacctgaagtag

SEQ ID NO: 12154 - DNA, 4140 bp, synthetic construct
  source 1..4140: mol_type = other DNA; note = Synthetic coding sequence
atggccagcagccccaccaagggcctgaccatgagcgtgcccgtggcccccaagaagagctgctacacccagctgagagacaacagaaacgccgccagaaacaacaacgagagcatcctgagcctgggcgacaccaacgccaaccagatcatgctggaggtgagcagcagccacgacgagagcaagacctgcgacctgggcgacgagatcggcaacaccaacagcagcgagcccgagaacagaacccacttccacaaggagttccaccagctgcagggcttcggcaagggcagccaggccggcagcgccagcctgaaggacttcagactgagcagcaccatccagagagagctgaacgaggagcacaccgtggagagaggcaccgacagcctgcagaccaccagaagcatccagggccccagcctgagcagctggagaaacgtgatgagcgaggccagcctggacgtgctggccaagagagacgccgagatccccagacacgtgcccaaggacaagctggccaagaccctggacaacgaggagctgagaagacacagcctggagagagccagcagcagcgtggccgccgtgggcagcctgaccccccagcacccccagcccctgagcctggacagcagagaggccagaggccagatccccggcggcggcgagggcccccagaagaccctgcccgaccacgccgtgcccgccgccttccccgccaccgacagcaccagcgagggcaagagcgtgagacaccccaagcccagcaccagcgagagcaagcagagcacccccagcgagacccagaccgtgggcgcccacgtgctgcaggtgtgcagcgagcacaccagccacagcgcccaccccgagcccgccctgaacctgaccctggccagcaaggagatccccagcaagctggaggcccagctgggccagggcaagggcgaggccaagctggacctgaagtacgtgccccccagaagagtggagcaggagggcaaggccgcccaggagggctacctgggctgccacaaggaggagaacctgagcgccctggagggcagagacccctgcggcgaggcccaccccgaggccaccgacgccctgggccacctgctgaacagcgacctgcaccacctgggcgtgggcagaggcaactgcgaggagaagagaggcgtgaaccccggcgagcaggacagcctgcacaccacccccaagcagggcagcgccagcctgggcggcgccgacaaccagcccaccggcaagatcagcccctgcgccggcgagaagctgggcgagagaaccagcagcagcttcagccccggcgacagccacgtggccttcatccccaacaacctgaccgacagcaagcccctggacgtgatcgaggaggagagaagactgggcagcggcaacaaggacagcgtgatggtgctggtgttcaaccccagcgtgggcgagaacaagaccgaggtgcccgagcccctggacccccagagcggcagaagcgaggccagagagagcaaggaggtgaccaccagcgtggccgagaacagaaacctgctggagaacgccgacaagatcgagagcaccagcgccagagccgacagcgtgctgaacatccccgcccccctgcaccccgagaccaccgtgaacatgacctaccagcccaccacccccagcagcagcttccaggacgtgagcgtgttcggcatggacgccggcagccccctggtggtgcccccccccaccgacagcgccagactgctgaacaccagccccaaggtgcccgacaagaacacctgccccagcggcatccccaagcccgtgttcacccacagcaaggacacccccagcagccaggagggcatggagaactaccaggtggagaagaccgaggagagaaccgagaccaagcccatcatcatgcccaagcccaagcacgtgagacccaagatcatcacctacatcagaagaaacccccaggccctgggccaggtggacgccagcctggtgcccgtgggcctgccctacgccccccccacctgcaccatgcccctgccccacgaggagaaggccgccggcggcgacctgaagcccagcgccaacctgtacgagaagttcaagcccgacctgcagaagcccagagtgttcagcagcggcctgatggtgagcggcatcaagccccccggccaccccttcagccagatgagcgagaagttcctgcaggaggtgaccgaccaccccggcaaggaggagttctgcagccccccctacgcccactacgaggtgccccccaccttctacagaagcgccatgctgctgaagccccagctgggcctgggcgccatgagcagactgcccagcgccaagagcagaatcctgatcgccagccagagaagcagcgccagcgccatccacccccccggccccatcaccaccgccaccagcctgtacagcagcgaccccagcgccgacctgaagaaggccagcagcagcaacgccgccaagagcaacctgcccaagagcggcctgagaccccccggctacagcagactgcccgccgccaagctggccgccttcggcttcgtgagaagcagcagcgtgagcagcgtgagcagcacccagagcggcgacagcgcccagcccgagcagggcagacccgccaccagaagcaccttcggcaacgaggagcagcccgtgctgaaggccagcctgcccagcaaggacacccccaagggcgccggcagagtggccccccccgccagcagcagcgtgaccgcccccagaagaagcctgctgcccgcccccaagagcaccagcacccccgccggcaccaagaaggacgcccagaaggaccaggacaccaacaagcccgccgtgagcagccccaagagagtggccgccagcaccaccaagctgcacagccccggctaccccaagcagagaaccgccgccgccagaaacggcttcccccccaagcccgacccccaggccagagaggccgagagacagctggtgctgagactgaaggagagatgcgagcagcagaccagacagctgggcgtggcccagggcgagctgaagagagccatctgcggcttcgacgccctggccgtggccacccagcacttcttcagaaagaacgagagcgccctggtgaaggagaaggagctgagcatcgagctggccaacatcagagacgaggtggccttccacaccgccaagtgcgagaagctgcagaaggagaaggaggagctggagagaagattcgaggacgaggtgaagagactgggctggcagcagcaggccgagctgcaggagctggaggagagactgcagctgcagttcgaggccgagatggccagactgcaggaggagcacggcgaccagctgctgagcatcagatgccagcaccaggagcaggtggaggacctgaccgccagccacgacgccgccctgctggagatggagaacaaccacaccgtggccatcaccatcctgcaggacgaccacgaccacaaggtgcaggagctgatgagcacccacgagctggagaagaaggagctggaggagaacttcgagaagctgagactgagcctgcaggaccaggtggacaccctgaccttccagagccagagcctgagagacagagccagaagattcgaggaggccctgagaaagaacaccgaggagcagctggagatcgccctggccccctaccagcacctggaggaggacatgaagagcctgaagcaggtgctggagatgaagaaccagcagatccacgagcaggagaagaagatcctggagctggagaagctggccgagaagaacatcatcctggaggagaagatccaggtgctgcagcagcagaacgaggacctgaaggccagaatcgaccagaacaccgtggtgaccagacagctgagcgaggagaacgccaacctgcaggagtacgtggagaaggagacccaggagaagaagagactgagcagaaccaacgaggagctgctgtggaagctgcagaccggcgaccccaccagccccatcaagctgagccccaccagccccgtgtacagaggcagcagcagcggccccagcagccccgccagagtgagcaccacccccagatag

SEQ ID NO: 12155 - DNA, 1041 bp, synthetic construct
  source 1..1041: mol_type = other DNA; note = Synthetic coding sequence
atgcagcacctgaagagcaagaagagagaggagagatggatgagagccagcaagagacagagcgagaaggagatggaggagctgcaccacaacatcgacgacctgctgcaggagaagaagagcctggagtgcgaggtggaggagctgcacagaaccgtgcagaagagacagcagcagaaggacttcatcgacggcaacgtggagagcctgatgaccgagctggagatcgagaagagcctgaagcaccacgaggacatcgtggacgagatcgagtgcatcgagaagaccctgctgaagagaagaagcgagctgagagaggccgacagactgctggccgaggccgagagcgagctgagctgcaccaaggagaagaccaagaacgccgtggagaagttcaccgacgccaagagaagcctgctgcagaccgagagcgacgccgaggagctggagagaagagcccaggagaccgccgtgaacctggtgaaggccgaccagcagctgagaagcctgcaggccgacgccaaggacctggagcagcacaagatcaagcaggaggagatcctgaaggagatcaacaagatcgtggccgccaaggacagcgacttccagtgcctgagcaagaagaaggagaagctgaccgaggagctgcagaagctgcagaaggacatcgagatggccgagagaaacgaggaccaccacctgcaggtgctgaaggagagcgaggtgctgctgcaggccaagagagccgagctggagaagctgaagagccaggtgaccagccagcagcaggagatggccgtgctggacagacagctgggccacaagaaggaggagctgcacctgctgcagggcagcatggtgcaggccaaggccgacctgcaggaggccctgagactgggcgagaccgaggtgaccgagaagtgcaaccacatcagagaggtgaagagcctgctggaggagctgagcttccagaagggcgagctgaacgtgcagatcagcgagagaaagacccagctgaccctgatcaagcaggagatctag

SEQ ID NO: 12156 - DNA, 369 bp, synthetic construct; identical to SEQ ID NO: 12080
  source 1..369: mol_type = other DNA; note = Synthetic coding sequence

SEQ ID NO: 12157 - DNA, 291 bp, synthetic construct
  source 1..291: mol_type = other DNA; note = Synthetic coding sequence
atgagcatcagcagcgacgaggtgaacttcctggtgtacagatacctgcaggagagcggcttcagccacagcgccttcaccttcggcatcgagagccacatcagccagagcaacatcaacggcgccctggtgccccccgccgccctgatcagcatcatccagaagggcctgcagtacgtggaggccgaggtgagcatcaacgaggacggcaccctgttcgacggcagacccatcgagagcctgagcctgatcgacgccgtgatgcccgacgtggtgcagaccagacagtag

SEQ ID NO: 12158 - DNA, 2913 bp, synthetic construct
  source 1..2913: mol_type = other DNA; note = Synthetic coding sequence
atgctgcagcaggtgaacggccacaaccccggcagcgacggccaggccagagagtacctgagagaggacctgcaggagttcctgggcggcgaggtgctgctgtacaagctggacgacctgaccagagtgaaccccgtgaccctggagaccgtgctgagatgcctgcaggccagatacatggccgacaccttctacaccaacgccggctgcaccctggtggccctgaaccccttcaagcccgtgccccagctgtacagccccgagctgatgagagagtaccacgccgccccccagccccagaagctgaagccccacgtgttcaccgtgggcgagcagacctacagaaacgtgaagagcctgatcgagcccgtgaaccagagcatcgtggtgagcggcgagagcggcgccggcaagacctggaccagcagatgcctgatgaagttctacgccgtggtggccaccagccccgccagctgggagagccacaagatcgccgagagaatcgagcagagaatcctgaacagcaaccccgtgatggaggccttcggcaacgcctgcaccctgagaaacaacaacagcagcagattcggcaagttcatccagctgcagctgaacagagcccagcagatgaccggcgccgccgtgcagacctacctgctggagaagaccagagtggcctgccaggccagcagcgagagaaacttccacatcttctaccagatctgcaagggcgccagcgaggacgagagactgcagtggcacctgcccgagggcgccgccttcagctggctgcccaaccccgagagaagcctggaggaggactgcttcgaggtgaccagagaggccatgctgcacctgggcatcgacacccccacccagaacaacatcttcaaggtgctggccggcctgctgcacctgggcaacatccagttcgccgccagcgaggacgaggcccagccctgccagcccatggacgacgccaagtacagcgtgagaaccgccgccagcctgctgggcctgcccgaggacgtgctgctggagatggtgcagatcagaaccatcagagccggcagacagcagcaggtgttcagaaagccctgcgccagagccgagtgcgacaccagaagagactgcctggccaagctgatctacgccagactgttcgactggctggtgagcgtgatcaacagcagcatctgcgccgacaccgacagctggaccaccttcatcggcctgctggacgtgtacggcttcgagagcttccccgacaacagcctggagcagctgtgcatcaactacgccaacgagaagctgcagcagcacttcgtggcccactacctgagagcccagcaggaggagtacgccgtggagggcctggagtggagcttcatcaactaccaggacaaccagccctgcctggacctgatcgagggcagccccatcagcatctgcagcctgatcaacgaggagtgcagactgaacagacccagcagcgccgcccagctgcagaccagaatcgagaccgccctggccggcagcccctgcctgggccacaacaagctgagcagagagcccagcttcatcgtggtgcactacgccggccccgtgagataccacaccgccggcctggtggagaagaacaaggaccccatcccccccgagctgaccagactgctgcagcagagccaggaccccctgctgatgggcctgttccccaccaaccccaaggagaagacccaggaggagccccccggccagagcagagcccccgtgctgaccgtggtgagcaagttcaaggccagcctggagcagctgctgcaggtgctgcacagcaccaccccccactacatcagatgcatcaagcccaacagccagggccaggcccagaccttcctgcaggaggaggtgctgagccagctggaggcctgcggcctggtggagaccatccacatcagcgccgccggcttccccatcagagtgagccacagaaacttcgtggagagatacaagctgctgagaagactgcacccctgcaccagcagcggccccgacagcccctaccccgccaagggcctgcccgagtggtgcccccacagcgaggaggccaccctggagcccctgatccaggacatcctgcacaccctgcccgtgctgacccaggccgccgccatcaccggcgacagcgccgaggccatgcccgcccccatgcactgcggcagaaccaaggtgttcatgaccgacagcatgctggagctgctggagtgcggcagagccagagtgctggagcagtgcgccagatgcatccagggcggctggagaagacacagacacagagagcaggagagacagtggagagccgtgatgctgatccaggccgccatcagaagctggctgaccagaaagcacatccagagactgcacgccgccgccaccgtgatcaagagagcctggcagaagtggagaatcagaatggcctgcctggccgccaaggagctggacggcgtggaggagaagcacttcagccaggccccctgcagcctgagcaccagccccctgcagaccagactgctggaggccatcatcagactgtggcccctgggcctggtgctggccaacaccgccatgggcgtgggcagcttccagagaaagctggtggtgtgggcctgcctgcagctgcccagaggcagccccagcagctacaccgtgcagaccgcccaggaccaggccggcgtgaccagcatcagagccctgccccagggcagcatcaagttccactgcagaaagagccccctgagatacgccgacatctgccccgagcccagcccctacagcatcaccggcttcaaccagatcctgctggagagacacagactgatccacgtgaccagcagcgccttcaccggcctgggctag

SEQ ID NO: 12159 - DNA, 3303 bp, synthetic construct; identical to SEQ ID NO: 9603
  source 1..3303: mol_type = other DNA; note = Synthetic coding sequence

SEQ ID NO: 12160 - DNA, 390 bp, synthetic construct; identical to SEQ ID NO: 10956
  source 1..390: mol_type = other DNA; note = Synthetic coding sequence

SEQ ID NO: 12161 - DNA, 498 bp, synthetic construct
  source 1..498: mol_type = other DNA; note = Synthetic coding sequence
atgagcctgcacggcaagagaaaggagatctacaagtacgaggccccctggaccgtgtacgccatgaactggagcgtgagacccgacaagagattcagactggccctgggcagcttcgtggaggagtacaacaacaaggtgcagctggtgggcctggacgaggagagcagcgagttcatctgcagaaacaccttcgaccacccctaccccaccaccaagctgatgtggatccccgacaccaagggcgtgtaccccgacctgctggccaccagcggcgactacctgagagtgtggagagtgggcgagaccgagaccagactggagtgcctgctgaacaacaacaagaacagcgacttctgcgcccccctgaccagcttcgactggaacgaggtggacccctacctgctgggcaccagcagcatcgacaccacctgctgcttccagtggcccgtgtgcctgagcctgctgtgcacccactgctaccagaagctgctgtag

SEQ ID NO: 12162 - DNA, 1044 bp, synthetic construct
  source 1..1044: mol_type = other DNA; note = Synthetic coding sequence
atgagcctggcccagagccccggcatctggggcgaggaccccgtgaagctgaccctggccctgaagatgaccagacaggacctgaccagaacccagatggagctgaacaacatgaaggccaacttcggcgacgtggtgcccagaagagacttcgagatgcaggagaagaccaacaaggacctgcaggagcagctggacaccctgagagccagctacgaggaggtgagaaaggagcacgagatcctgatgcagctgcacatgagcaccctgaaggagagagaccagttcttcagcgagctgcaggagatccagagaaccagcacccccagacccgactggaccaagtgcaaggacgtggtggccggcggccccgagagatggcagatgctggccgagggcaagaacagcgaccagctggtggacgtgctgctggaggagatcggcagcggcctgctgagagagaaggacttcttccccggcctgggctacggcgaggccatccccgccttcctgagattcgacggcctggtggagaacaagaagcccagcaagaaggacgtggtgaacctgctgaaggacgcctggaaggagagactggccgaggagcagaaggagaccttccccgacttcttcttcaacttcctggagcacagattcggccccagcgacgccatggcctgggcctacaccatcttcgagaacatcaagatcttccacagcaacgaggtgatgagccagttctacgccgtgctgatgggcaagagaagcgagaacgtgtacgtgacccagaaggagaccgtggcccagctgctgaaggagatgaccaacgccgacagccagaacgagggcctgctgaccatggagcagttcaacaccgtgctgaagagcaccttccccctgaagaccgaggagcagatccaggagctgatggaggccggcggctggcaccccagcagcagcaacgccgacctgctgaactacagaagcctgttcatggaggacgaggagggccagagcgagcccttcgtgcagaagctgtggtag

SEQ ID NO: 12163 - DNA, 219 bp, synthetic construct
  source 1..219: mol_type = other DNA; note = Synthetic coding sequence
atgtggagcctgaccgccagcgagggcgagagcaccaccgcccacttcttcctgggcgccggcgacgagggcctgggcaccagaggcatcggcatgagacccgaggagagcgacagcgagctgctggaggacgaggaggacgaggtgccccccgagccccagatcatcgtgggcatctgcgccatgaccaagaagagcaagagcaagcccatgacctag

SEQ ID NO: 12164 - DNA, 1149 bp, synthetic construct; identical to SEQ ID NO: 10012
  source 1..1149: mol_type = other DNA; note = Synthetic coding sequence

SEQ ID NO: 12165 - DNA, 1620 bp, synthetic construct; identical to SEQ ID NO: 10018
  source 1..1620: mol_type = other DNA; note = Synthetic coding sequence

SEQ ID NO: 12166 - DNA, 390 bp, synthetic construct; identical to SEQ ID NO: 10956
  source 1..390: mol_type = other DNA; note = Synthetic coding sequence

SEQ ID NO: 12167 - DNA, 1089 bp, synthetic construct; identical to SEQ ID NO: 9912
  source 1..1089: mol_type = other DNA; note = Synthetic coding sequence

SEQ ID NO: 12168 - DNA, 1266 bp, synthetic construct
  source 1..1266: mol_type = other DNA; note = Synthetic coding sequence
atgagcgccctgagaagaagcggctacggccccagcgacggccccagctacggcagatactacggccccggcggcggcgacgtgcccgtgcacccccccccccccctgtaccccctgagacccgagcccccccagccccccatcagctggagagtgagaggcggcggccccgccgagaccacctggctgggcgagggcggcggcggcgacggctactaccccagcggcggcgcctggcccgagcccggcagagccggcggcagccaccagagcctgaacagctacaccaacggcgcctacggccccacctacccccccggccccggcgccaacaccgccagctacagcggcgcctactacgcccccggctacacccagaccagctacagcaccgaggtgcccagcacctacagaagcagcggcaacagccccacccccgtgagcagatggatctacccccagcaggactgccagaccgaggccccccccctgagaggccaggtgcccggctacccccccagccagaaccccggcatgaccctgccccactacccctacggcgacggcaacagaagcgtgccccagagcggccccaccgtgagaccccaggaggacgcctgggccagccccggcgcctacggcatgggcggcagatacccctggcccagcagcgcccccagcgccccccccggcaacctgtacatgaccgagagcaccagcccctggcccagcagcggcagcccccagagcccccccagcccccccgtgcagcagcccaaggacagcagctacccctacagccagagcgaccagagcatgaacagacacaacttcccctgcagcgtgcaccagtacgagagcagcggcaccgtgaacaacgacgacagcgacctgctggacagccaggtgcagtacagcgccgagccccagctgtacggcaacgccaccagcgaccaccccaacaaccaggaccagagcagcagcctgcccgaggagtgcgtgcccagcgacgagagcaccccccccagcatcaagaagatcatccacgtgctggagaaggtgcagtacctggagcaggaggtggaggagttcgtgggcaagaagaccgacaaggcctactggctgctggaggagatgctgaccaaggagctgctggagctggacagcgtggagaccggcggccaggacagcgtgagacaggccagaaaggaggccgtgtgcaagatccaggccatcctggagaagctggagaagaagggcctgtag

SEQ ID NO: 12169 - DNA, 321 bp, synthetic construct
  source 1..321: mol_type = other DNA; note = Synthetic coding sequence
tgaaacctgagagagggcgccgagcagaaggtggtgttcatcaccggcagagtgcaccccggcgagacccccagcagcttcgtgtgccagggcatcatcgacttcctggtgagccagcaccccatcgcctgcgtgctgagagagtacctggtgttcaagatcgcccccatgctgaaccccgacggcgtgtacctgggcaactacagatgcctgagcctgatgagaaacggcagcagaggcagacccttcttccccagcagcagcgccagaatgctgagaaccagccccatccccgcccaccccctgaccggcaccctgtag

SEQ ID NO: 12170 - DNA, 684 bp, synthetic construct
  source 1..684: mol_type = other DNA; note = Synthetic coding sequence
tgactgatcttcgcctgcctggtgcccggcttccccgccgtgatgagcagcagaggcccctgcaccctggagaccctgatcaaccccagccccagcgtggccgacgtgaagatctaccccgaggagatcacccccctgctgcccgccatcagcggcgagaagatcgccgaggaccagacctgcttcttcctgcagatcctgctgaagtacatggtgatccaggccgccagcctggagtggaagaacaaggagaaccaggacaccggcttcaagttcctgttcaccctgttcagaaagtactacctgccccacctgttccccagcttcaccaagctgaccaacatctacaagcccgtgctggacatcccccacctgagacccaagcccgtgtacatcaccaccaccagagacaacgagaacatctacagcaccaagatcccctacatggccgccagagtggtgttcatcaagtggatcgtgaccttcttcctggagaagaagtacctgaccgccacccagaacaccaagaacggcgtggacgtgctgcccaagatcatccagaccgtgggcggcggcgccgtgcaggagagagcccccgagctggacggcggcggccccaccgagcaggacaagagccacagcaacagcagcaccctgagcgacagaagactgagcaacagctag

SEQ ID NO: 12171 - DNA, 573 bp, synthetic construct
  source 1..573: mol_type = other DNA; note = Synthetic coding sequence
atggagccccccatggagcccagcggcggcgagcaggagcccggcgccgtgagattcctggacctgccctgggaggacgtgctgctgccccacgtgctgaacagagtgcccctgagacagctgctgagactgcagagagtgagcagagccttcagaagcctggtgcagctgcacctggccggcctgagaagattcgacgccgcccaggtgggcccccagatccccagagccgccctggccagactgctgagagacgccgagggcctgcaggagctggccctggccccctgccacgagtggctgagcgacgaggacctggtgcccgtgctggccagaaacccccagctgagaagcgtggccctgggcggctgcggccagctgagcagaagagccctgggcgccctggccgagggctgccccagactgcagagactgagcctggcccactgcgactgggtggacggcctggccctgagaggcctggccgacagatgccccgccctggaggagctggacctgaccgcctgcagacagctgaaggacgaggccatcgtgtacctggcccagagatag

SEQ ID NO: 12172 - DNA, 270 bp, synthetic construct; identical to SEQ ID NO: 11466
  source 1..270: mol_type = other DNA; note = Synthetic coding sequence

SEQ ID NO: 12173 - DNA, 381 bp, synthetic construct
  source 1..381: mol_type = other DNA; note = Synthetic coding sequence
atgaccaccagaagcgtgctggacgtggagaccttcgtggccgacatcctgaagggcgagaacctgagcaagaaggccaaggagaagagagagagcctgatcaagaagatcaaggacgtgaagagcatctacctgcaggagttccaggacaagggcgacgccgaggacggcgaggagtacgacgaccccttcgccggcccccccgacaccatcagcctggccagcgagagatacgacaaggacgacgaggcccccagcgacggcgcccagttcccccccatcgccgcccaggacctgcccttcgtgctgaaggccggctacctggagaagagaagaaaggaccacagcttcctgggcttcgagtggcagaagagatggtag

SEQ ID NO: 12174 - DNA, 678 bp, synthetic construct
  source 1..678: mol_type = other DNA; note = Synthetic coding sequence
atgctgagcgccgtggccagaggctaccagggctggttccacccctgcgccagactgagcgtgagaatgagcagcaccggcatcgacagaaagggcgtgctggccaacagagtggccgtggtgaccggcagcaccagcggcatcggcttcgccatcgccagaagactggccagagacggcgcccacgtggtgatcagcagcagaaagcagcagaacgtggacagagccatggccaagctgcagggcgagggcctgagcgtggccggcatcgtgtgccacgtgggcaaggccgaggacagagagcagctggtggccaaggccctggagcactgcggcggcgtggacttcctggtgtgcagcgccggcgtgaaccccctggtgggcagcaccctgggcaccagcgagcagatctgggacaagatcctgagcgtgaacgtgaagagccccgccctgctgctgagccagctgctgccctacatggagaacagaagaggcgccgtgatcctggtgagcagcatcgccgcctacaaccccgtggtggccctgggcgtgtacaacgtgagcaagaccgccctgctgggcctgaccagaaccctggccctggagctggcccccaaggacatcagagtgaactgcgtggtgcccggcatcatcaagaccgacttcagcaaggtgtag

SEQ ID NO: 12175 - DNA, 1080 bp, synthetic construct
  source 1..1080: mol_type = other DNA; note = Synthetic coding sequence
tgagccaccgccatgaccagcgcctggctggcccagggcaccggcgagggcgtgaacgacgtgagaaagggcgcctgcgccagccacgtgagcaccatggccagcttcctgaagggcgcccacgtgaccatcaacgccagagccgaggaggacgtggagcccgagtgcatcatggagaaggtggccaaggccagcggcgccaactacagcttccacaaggagagcggcagattccaggacgtgggcccccaggcccccgtgggcagcgtgtaccagaagaccaacgccgtgagcgagatcaagagagtgggcaaggacagcttctgggccaaggccgagaaggaggaggagaacagaagactggaggagaagagaagagccgaggaggcccagagacagctggagcaggagagaagagagagagagctgagagaggccgccagaagagagcagagataccaggagcagggcggcgaggccagcccccagagaacctgggagcagcagcaggaggtggtgagcagaaacagaaacgagcaggagagcgccgtgcaccccagagagatcttcaagcagaaggagagagccatgagcaccaccagcatcagcagcccccagcccggcaagctgagaagccccttcctgcagaagcagctgacccagcccgagacccacttcggcagagagcccgccgccgccatcagcagacccagagccgacctgcccgccgaggagcccgcccccagcacccccccctgcctggtgcaggccgaggaggaggccgtgtacgaggagccccccgagcaggagaccttctacgagcagccccccctggtgcagcagcagggcgccggcagcgagcacatcgaccaccacatccagggccagggcctgagcggccagggcctgtgcgccagagccctgtacgactaccaggccgccgacgacaccgagatcagcttcgaccccgagaacctgatcaccggcatcgaggtgatcgacgagggctggtggagaggctacggccccgacggccacttcggcatgttccccgccaactacgtggagctgatcgagtag

SEQ ID NO: 12176 - DNA, 483 bp, synthetic construct; identical to SEQ ID NO: 10977
  source 1..483: mol_type = other DNA; note = Synthetic coding sequence

SEQ ID NO: 12177 - DNA, 2616 bp, synthetic construct
  source 1..2616: mol_type = other DNA; note = Synthetic coding sequence
atgggcgacagcgacgacgagtacgacagaagaagaagagacaagttcagaagagagagaagcgactacgacagaagcagagagagagacgagagaagaagaggcgacgactggaacgacagagagtgggacagaggcagagagagaagaagcagaggcgagtacagagactacgacagaaacagaagagagagattcagcccccccagacacgagctgagccccccccagaagagaatgagaagagactgggacgagcacagcagcgacccctaccacagcggctacgagatgccctacgccggcggcggcggcggccccacctacggccccccccagccctggggccaccccgacgtgcacatcatgcagcaccacgtgctgcccatccaggccagactgggcagcatcgccgagatcgacctgggcgtgcccccccccgtgatgaagaccttcaaggagttcctgctgagcctggacgacagcgtggacgagaccgaggccgtgaagagatacaacgactacaagctggacttcagaagacagcagatgcaggacttcttcctggcccacaaggacgaggagtggttcagaagcaagtaccaccccgacgaggtgggcaagagaagacaggaggccagaggcgccctgcagaacagactgagagtgttcctgagcctgatggagaccggctggttcgacaacctgctgctggacatcgacaaggccgacgccatcgtgaagatgctggacgccgccgtgatcaagatggagggcggcaccgagaacgacctgagaatcctggagcaggaggaggaggaggagcaggccggcaagcccggcgagcccagcaagaaggaggagggcagagccggcgccggcctgggcgacggcgagagaaagaccaacgacaaggacgagaagaaggaggacggcaagcaggccgagaacgacagcagcaacgacgacaagaccaagaagagcgagggcgacggcgacaaggaggagaagaaggaggacagcgagaaggaggccaagaagagcagcaagaagagaaacagaaagcacagcggcgacgacagcttcgacgagggcagcgtgagcgagagcgagagcgagagcgagagcggccaggccgaggaggagaaggaggaggccgaggccctgaaggagaaggagaagcccaaggaggaggagtgggagaagcccaaggacgccgccggcctggagtgcaagcccagacccctgcacaagacctgcagcctgttcatgagaaacatcgcccccaacatcagcagagccgagatcatcagcctgtgcaagagataccccggcttcatgagagtggccctgagcgagccccagcccgagagaagattcttcagaagaggctgggtgaccttcgacagaagcgtgaacatcaaggagatctgctggaacctgcagaacatcagactgagagagtgcgagctgagccccggcgtgaacagagacctgaccagaagagtgagaaacatcaacggcatcacccagcacaagcagatcgtgagaaacgacatcaagctggccgccaagctgatccacaccctggacgacagaacccagctgtgggccagcgagcccggcaccccccccctgcccaccagcctgcccagccagaaccccatcctgaagaacatcaccgactacctgatcgaggaggtgagcgccgaggaggaggagctgctgggcagcagcggcggcgccccccccgaggagccccccaaggagggcaaccccgccgagatcaacgtggagagagacgagaagctgatcaaggtgctggacaagctgctgctgtacctgagaatcgtgcacagcctggactactacaacacctgcgagtaccccaacgaggacgagatgcccaacagatgcggcatcatccacgtgagaggccccatgccccccaacagaatcagccacggcgaggtgctggagtggcagaagaccttcgaggagaagctgacccccctgctgagcgtgagagagagcctgagcgaggaggaggcccagaagatgggcagaaaggaccccgagcaggaggtggagaagttcgtgaccagcaacacccaggagctgggcaaggacaagtggctgtgccccctgagcggcaagaagttcaagggccccgagttcgtgagaaagcacatcttcaacaagcacgccgagaagatcgaggaggtgaagaaggaggtggccttcttcaacaacttcctgaccgacgccaagagacccgccctgcccgagatcaagcccgcccagccccccggccccgcccagagcctgacccccggcctgccctacccccaccagaccccccagggcctgatgccctacggccagcccagaccccccatcctgggctacggcgccggcgccgtgagacccgccgtgcccaccggcggccccccctacccccacgccccctacggcgccggcagaggcaactacgacgccttcagaggccagggcggctaccccggcaagcccagaaacagaatggtgagaggcgaccccagagccatcgtggagtacagagacctggacgcccccgacgacgtggacttcttctag

SEQ ID NO: 12178 - DNA, 2025 bp, synthetic construct; identical to SEQ ID NO: 10426
  source 1..2025: mol_type = other DNA; note = Synthetic coding sequence

SEQ ID NO: 12179 - DNA, 1467 bp, synthetic construct
  source 1..1467: mol_type = other DNA; note = Synthetic coding sequence
atgagcgacgaggtgttcagcaccaccctggcctacaccaagagccccaaggtgaccaagagaaccaccttccaggacgagctgatcagagccatcaccgccagaagcgccagacagagaagcagcgagtacagcgacgacttcgacagcgacgagatcgtgagcctgggcgacttcagcgacaccagcgccgacgagaacagcgtgaacaagaagatgaacgacttccacatcagcgacgacgaggagaagaaccccagcaagctgctgttcctgaagaccaacaagagcaacggcaacatcaccaaggacgagcccgtgtgcgccatcaagaacgaggaggagatggcccccgacggctgcgaggacatcgtggtgaagagcttcagcgagagccagaacaaggacgaggagttcgagaaggacaagatcaagatgaagcccaagcccagaatcctgagcatcaagagcaccagcagcgagaacaacagcctggacaccgacgaccacttcaagcccagccccagacccagaagcatgctgaagaagaagagccacatggaggagaaggacggcctggaggacaaggagaccgccctgagcgaggagctggagctgcacagcgcccccagcagcctgcccacccccaacggcatccagctggaggccgagaagaaggccttcagcgagaacctggaccccgaggacagctgcctgaccagcctggccagcagcagcctgaagcagatcctgggcgacagcttcagccccggcagcgagggcaacgccagcggcaaggaccccaacgaggagatcaccgagaaccacaacagcctgaagagcgacgagaacaaggagaacagcttcagcgccgaccacgtgaccaccgccgtggagaagagcaaggagagccaggtgaccgccgacgacctggaggaggagaaggccaaggccgagctgatcatggacgacgacagaaccgtggaccccctgctgagcaagagccagagcatcctgatcagcaccagcgccaccgccagcagcaagaagaccatcgaggacagaaacatcaagaacaagaagagcaccaacaacagagccagcagcgccagcgccagactgatgaccagcgagttcctgaagaagagcagcagcaagagaagaacccccagcaccaccaccagcagccactacctgggcaccctgaaggtgctggaccagaagcccagccagaagcagagcatcgagcccgacagagccgacaacatcagagccgccgtgtaccaggagtggctggagaagaagaacgtgtacctgcacgagatgcacagaatcaagagaatcgagagcgagaacctgagaatccagaacgagcagaagaaggccgccaagagagaggaggccctggccagcttcgaggcctggaaggccatgaaggagaaggaggccaagaagatcgccgcctag

SEQ ID NO: 12180 - DNA, 564 bp, synthetic construct
  source 1..564: mol_type = other DNA; note = Synthetic coding sequence
atggtgagagagcccggccccagacccggcacccccggctgcagcgccagcggccagtggaccgccaccctgagaccctacctgagcgccgtgagagccaccctgcaggccgccctgtgcctggagaacttcagcagccaggtggtggagagacacaacaagcccgaggtggaggtgagaagcagcaaggagctgctgctgcagcccgtgaccatcagcagaaacgagaaggagaaggtgctgatcgagggcagcatcaacagcgtgagagtgagcatcgccgtgaagcaggccgacgagatcgagaagatcctgtgccacaagttcatgagattcatgatgatgagagccgagaacttcttcatcctgagaagaaagcccgtggagggctacgacatcagcttcctgatcaccaacttccacaccgagcagatgtacaagcacaagctggtggacttcgtgatccacttcatggaggagatcgacaaggagatcagcgagatgaagctgagcgtgaacgccagagccagaatcgtggccgaggagttcctgaagaacttctag

SEQ ID NO: 12181 - DNA, 1068 bp, synthetic construct
  source 1..1068: mol_type = other DNA; note = Synthetic coding sequence
tgaagcctggccagcagcctgagaaacaaggagggcaccctgggcagcaaggtgggctacctggacgtggaggccagaggccccggcgagggcagaggcggcggcggcgagagcccccccctgcagccccccccccccgcccccgtgctgctgtacgaccagggcggcggcagaagaagaagaggcgaggccgaggccgaggccgaggagtgggaggccgagagcgtgctgggcaccctgctgcagaagctgagagaggagggctacctggcctactacctgcagggcggcttcagcagattccaggccgagtgcccccacctgtgcgagaccagcctggccggcagagccggcagcagcatggcccccgtgcccggccccgtgcccgtggtgggcctgggcagcctgtgcctgggcagcgactgcagcgacgccgagagcgaggccgacagagacagcatgagctgcggcctggacagcgagggcgccacccccccccccgtgggcctgagagccagcttccccgtgcagatcctgcccaacctgtacctgggcagcgccagagacagcgccaacctggagagcctggccaagctgggcatcagatacatcctgaacgtgacccccaacctgcccaacttcttcgagaagaacggcgacttccactacaagcagatccccatcagcgaccactggagccagaacctgagcagattcttccccgaggccatcgagttcatcgacgaggccctgagccagaactgcggcgtgctggtgcactgcctggccggcgtgagcagaagcgtgaccgtgaccgtggcctacctgatgcagaagctgcacctgagcctgaacgacgcctacgacctggtgaagagaaagaagagcaacatcagccccaacttcaacttcatgggccagctgctggacttcgagagaagcctgagactggaggagagacacagccaggagcagggcagcggcggccaggccagcgccgccagcaacccccccagcttcttcaccacccccaccagcgacggcgccttcgagctggcccccacctag

SEQ ID NO: 12182 - DNA, 51 bp, synthetic construct; identical to SEQ ID NO: 11825
  source 1..51: mol_type = other DNA; note = Synthetic coding sequence

SEQ ID NO: 12183 - DNA, 1620 bp, synthetic construct; identical to SEQ ID NO: 10018
  source 1..1620: mol_type = other DNA; note = Synthetic coding sequence

SEQ ID NO: 12184 - DNA, 474 bp, synthetic construct; identical to SEQ ID NO: 11812
  source 1..474: mol_type = other DNA; note = Synthetic coding sequence

SEQ ID NO: 12185 - DNA, 2553 bp, synthetic construct
  source 1..2553: mol_type = other DNA; note = Synthetic coding sequence
atggagcccgagagaaagggcctgagcctggccagcagcagcgacggcgacggcagagaggagaacaagctgaagcagggcatcagccaggacctggccagcagcagcagactggacagatacaagatcgccagacagctgaccgagaaggccatcaaggagaagaagatcttcagcatctacggccactaccccgtggtgagagccgccctgagaagaaagggctgggtggagaagaagttccacttcctgcccaaggtgatccccgacgtggaggacgagggcgccagagtgaacgacgacacctgcgccaaggtgaaggagaaccaggagatggccctggagaagaccgacaacatccacgacgtgatgagcagactggtgaagaacgagatgccctacctgctgtggaccatcaagagagacatcatcgactaccacagcctgacctacgaccagatgctgaaccactacgccaagaccgccagcttcaccaccaagatcggcctgtgcgtgaacatgagaagcctgccctggtacgtgcccgccaaccccgacagcttcttccccagatgctacagcctgtgcaccgagagcgagcagcaggagttcctggaggacttcagaagaaccatggccagcagcatcctgaagtgggtggtgagccaccagagctgcagcagaagcagcagaagcaagcccagagaccagagagaggaggccggcagcagcgacctgagcagcagacaggacgccgagaacgccgaggccaagctgagaggcctgcccggccagctggtggacatcgcctgcaaggtgtgccaggcctacctgggccagctggagcacgaggacatcgacaccagcgccgacgccgtggaggacctgaccgaggccgagtgggaggacctgacccagcagtactacagcctggtgcacggcgacgccttcatcagcaacagcagaaactacttcagccagtgccaggccctgctgaacagaatcaccagcgtgaacccccagaccgacatcgacggcctgagaaacatctggatcatcaagcccgccgccaagagcagaggcagagacatcgtgtgcatggacagagtggaggagatcctggagctggccgccgccgaccaccccctgagcagagacaacaagtgggtggtgcagaagtacatcgagacccccctgctgatctgcgacaccaagttcgacatcagacagtggttcctggtgaccgactggaaccccctgaccatctggttctacaaggagagctacctgagattcagcacccagagattcagcctggacaagctggacagcgccatccacctgtgcaacaacgccgtgcagaagtacctgaagaacgacgtgggcagaagccccctgctgcccgcccacaacatgtggaccagcaccagattccaggagtacctgcagagacagggcagaggcgccgtgtggggcagcgtgatctaccccagcatgaagaaggccatcgcccacgccatgaaggtggcccaggaccacgtggagcccagaaagaacagcttcgagctgtacggcgccgacttcgtgctgggcagagacttcagaccctggctgatcgagatcaacagcagccccaccatgcaccccagcacccccgtgaccgcccagctgtgcgcccaggtgcaggaggacaccatcaaggtggccgtggacagaagctgcgacatcggcaacttcgagctgctgtggagacagcccgtggtggagcccccccccttcagcggcagcgacctgtgcgtggccggcgtgagcgtgagaagagccagaagacaggtgctgcccgtgtgcaacctgaaggccagcgccagcctgctggacgcccagcccctgaaggccagaggccccagcgccatgcccgaccccgcccagggcccccccagccccgccctgcagagagacctgggcctgaaggaggagaagggcctgcccctggccctgctggcccccctgagaggcgccgccgagagcggcggcgccgcccagcccaccagaaccaaggccgccggcaaggtggagctgcccgcctgcccctgcagacacgtggacagccaggcccccaacaccggcgtgcccgtggcccagcccgccaagagctgggaccccaaccagctgaacgcccaccccctggagcccgtgctgagaggcctgaagaccgccgagggcgccctgagacccccccccggcggcaagggcgagggcaccgtgtgcagcagactgccccaccacggccaccacgtggccgcctgccagaccaccggcaccacctgggacggcggccccggcgtgtgcttcctgagacagctgctggccagcgagctgcccatgggccccggcctgcccagagaccccagagcccccccctgcctggtgtgcagaggcctgctgccccccgccggcccctgcaagagatgcagaagcttctgcgccgccgtgctgcagggcgccagcttcgtgagactgggcggcagaagctgcagccccagaaccccctag

SEQ ID NO: 12186 - DNA, 2739 bp, synthetic construct
  source 1..2739: mol_type = other DNA; note = Synthetic coding sequence
atgaagagaggcatcagaagagaccccttcagaaagagaaagctgggcggcagagccaagaaggtgagagagcccaccgccgtgaacagcttctacagagaggccagcctgcccagcgtgtgggccagcctgagaagaagagagatggtgagaagcggcgccagacccggccaggtgctgagcagcggcagacacaccggccccgccaagctgaccaacggcaagaaggccacctacctgagaaagatccccagattcaacgccgacagcggctacagcatccacagcgacagcgagagccaggccgagaccgtgcacggcctggacggctgcgccagcctgctgagagacatcctgagaaacgaggacagcgccagcagcgacaacaagaagcagatccccaacgaggccagcgccagaagcgagagagacaccagcgacctggagcagaactggagcctgcaggaccactacagaatgtacagccccatcatctaccaggccctgtgcgagcacgtgcagacccagatgagcctgatgaacgacctgaccagcaagaacatccccaacggcatccccgccgtgccctgccacgcccccagccacagcgagagccaggccaccccccacagcagctacggcctgtgcaccagcacccccgtgtggagcctgcagagacccccctgcccccccaaggtgcacagcgaggtgcagaccgacggcaacagccagttcgccagccagggcaagaccgtgagcgccacctgcaccgacgtgctgagaaacagcttcaacaccagccccggcgtgccctgcagcctgcccaagaccgacatcagcgccatccccaccctgcagcagctgggcctggtgaacggcatcctgccccagcagggcatccacaaggagaccgacctgctgaagtgcatccagacctacctgagcctgttcagaagccacggcaaggagacccacctggacagccagacccacagaagccccacccagagccagcccgccttcctggccaccaacgaggagaagtgcgccagagagcagatcagagaggccaccagcgagagaaaggacctgaacatccacgtgagagacaccaagaccgtgaaggacgtgcagaaggccaagaacgtgaacaagaccgccgagaaggtgagaatcatcaagtacctgctgggcgagctgaaggccctggtggccgagcaggaggacagcgagatccagagactgatcaccgagatggaggcctgcatcagcgtgctgcccaccgtgagcggcaacaccgacatccaggtggagatcgccctggccatgcagcccctgagaagcgagaacgcccagctgagaagacagctgagaatcctgaaccagcagctgagagagcagcagaagacccagaagcccagcggcgccgtggactgcaacctggagctgttcagcctgcagagcctgaacatgagcctgcagaaccagctggaggagagcctgaagagccaggagctgctgcagagcaagaacgaggagctgctgaaggtgatcgagaaccagaaggacgagaacaagaagttcagcagcatcttcaaggacaaggaccagaccatcctggagaacaagcagcagtacgacatcgagatcaccagaatcaagatcgagctggaggaggccctggtgaacgtgaagagcagccagttcaagctggagaccgccgagaaggagaaccagatcctgggcatcaccctgagacagagagacgccgaggtgaccagactgagagagctgaccagaaccctgcagaccagcatggccaagctgctgagcgacctgagcgtggacagcgccagatgcaagcccggcaacaacctgaccaagagcctgctgaacatccacgacaagcagctgcagcacgaccccgcccccgcccacaccagcatcatgagctacctgaacaagctggagaccaactacagcttcacccacagcgagcccctgagcaccatcaagaacgaggagaccatcgagcccgacaagacctacgagaacgtgctgagcagcagaggcccccagaacagcaacaccagaggcatggaggaggccagcgcccccggcatcatcagcgccctgagcaagcaggacagcgacgagggcagcgagaccatggccctgatcgaggacgagcacaacctggacaacaccatctacatccccttcgccagaagcacccccgagaagaagagccccctgagcaagagactgagcccccagccccagatcagagccgccaccacccagctggtgagcaacagcggcctggccgtgagcggcaaggagaacaagctgtgcacccccgtgatctgcagcagcagcaccaaggaggccgaggacgcccccgagaagctgagcagagccagcgacatgaaggacacccagctgctgaagaagatcaaggaggccatcggcaagatccccgccgccaccaaggagcccgaggagcagaccgcctgccacggccccagcggctgcctgagcaacagcctgcaggtgaagggcaacaccgtgtgcgacggcagcgtgttcaccagcgacctgatgagcgactggagcatcagcagcttcagcaccttcaccagcagagacgagcaggacttcagaaacggcctggccgccctggacgccaacatcgccagactgcagaagagcctgagaaccggcctgctggagaagtag

SEQ ID NO: 12187 - DNA, 528 bp, synthetic construct
  source 1..528: mol_type = other DNA; note = Synthetic coding sequence
atggagctgaccatcttcatcctgagactggccatctacatcctgaccttccccctgtacctgctgaacttcctgggcctgtggagctggatctgcaagaagtggttcccctacttcctggtgagattcaccgtgatctacaacgagcagatggccagcaagaagagagagctgttcagcaacctgcaggagttcgccggccccagcggcaagctgagcctgctggaggtgggctgcggcaccggcgccaacttcaagttctacccccccggctgcagagtgctgagacccggcggcgccttctacttcatggagcacgtggccgccgagtgcagcacctggaactacttctggcagcaggtgctggaccccgcctggcacctgctgttcgacggctgcaacctgaccagagagagctggaaggccctggagagagccagcttcagcaagctgaagctgcagcacatccaggcccccctgagctgggagctggtgagaccccacatctacggctacgccgtgaagtag

SEQ ID NO: 12188 - DNA, 1392 bp, synthetic construct
  source 1..1392: mol_type = other DNA; note = Synthetic coding sequence
atgagcggcggcaccccctacatcggcagcaagatcagcctgatcagcaaggccgagatcagatacgagggcatcctgtacaccatcgacaccgagaacagcaccgtggccctggccaaggtgagaagcttcggcaccgaggacagacccaccgacagacccatcccccccagagacgaggtgttcgagtacatcatcttcagaggcagcgacatcaaggacctgaccgtgtgcgagccccccaagccccagtgcagcctgccccaggaccccgccatcgtgcagagcagcctgggcagcagcaccagcagcttccagagcatgggcagctacggccccttcggcagaatgcccacctacagccagttcagccccagcagcctggtgggccagcagttcggcgccgtgggcgtggccggcagcagcctgaccagcttcggcaccgagaccagcaacagcggcaccctgccccagagcagcgccgtgggcagcgccttcacccaggacaccagaagcctgaagacccagctgagccagggcagaagcagcccccagctggaccccctgagaaagagccccaccatggagcaggccgtgcagaccgccagcgcccacctgcccgcccccgccgccgtgggcagaagaagccccgtgagcaccagacccctgcccagcgccagccagaaggccggcgagaaccaggagcacagaagagccgaggtgcacaaggtgagcagacccgagaacgagcagctgagaaacgacaacaagagacaggtggcccccggcgcccccagcgcccccagaagaggcagaggcggccacagaggcggcagaggcagattcggcatcagaagagacggccccatgaagttcgagaaggacttcgacttcgagagcgccaacgcccagttcaacaaggaggagatcgacagagagttccacaacaagctgaagctgaaggaggacaagctggagaagcaggagaagcccgtgaacggcgaggacaagggcgacagcggcgtggacacccagaacagcgagggcaacgccgacgaggaggaccccctgggccccaactgctactacgacaagaccaagagcttcttcgacaacatcagctgcgacgacaacagagagagaagacccacctgggccgaggagagaagactgaacgccgagaccttcggcatccccctgagacccaacagaggcagaggcggctacagaggcagaggcggcctgggcttcagaggcggcagaggcagaggcggcggcagaggcggcaccttcaccgcccccagaggcttcagaggcggcttcagaggcggcagaggcggcagagagttcgccgacttcgagtacagaaagaccaccgccttcggcccctag

SEQ ID NO: 12189 - DNA, 2790 bp, synthetic construct
  source 1..2790: mol_type = other DNA; note = Synthetic coding sequence
atggccgaggtggaggccgtgcagctgaaggaggagggcaacagacacttccagctgcaggactacaaggccgccaccaacagctacagccaggccctgaagctgaccaaggacaaggccctgctggccaccctgtacagaaacagagccgcctgcggcctgaagaccgagagctacgtgcaggccgccagcgacgccagcagagccatcgacatcaacagcagcgacatcaaggccctgtacagaagatgccaggccctggagcacctgggcaagctggaccaggccttcaaggacgtgcagagatgcgccaccctggagcccagaaaccagaacttccaggagatgctgagaagactgaacaccagcatccaggagaagctgagagtgcagttcagcaccgacagcagagtgcagaagatgttcgagatcctgctggacgagaacagcgaggccgacaagagagagaaggccgccaacaacctgatcgtgctgggcagagaggaggccggcgccgagaagatcttccagaacaacggcgtggccctgctgctgcagctgctggacaccaagaagcccgagctggtgctggccgccgtgagaaccctgagcggcatgtgcagcggccaccaggccagagccaccgtgatcctgcacgccgtgagaatcgacagaatctgcagcctgatggccgtggagaacgaggagatgagcctggccgtgtgcaacctgctgcaggccatcatcgacagcctgagcggcgaggacaagagagagcacagaggcaaggaggaggccctggtgctggacaccaagaaggacctgaagcagatcaccagccacctgctggacatgctggtgagcaagaaggtgagcggccagggcagagaccaggccctgaacctgctgaacaagaacgtgcccagaaaggacctggccatccacgacaacagcagaaccatctacgtggtggacaacggcctgagaaagatcctgaaggtggtgggccaggtgcccgacctgcccagctgcctgcccctgaccgacaacaccagaatgctggccagcatcctgatcaacaagctgtacgacgacctgagatgcgaccccgagagagaccacttcagaaagatctgcgaggagtacatcaccggcaagttcgacccccaggacatggacaagaacctgaacgccatccagaccgtgagcggcatcctgcagggccccttcgacctgggcaaccagctgctgggcctgaagggcgtgatggagatgatggtggccctgtgcggcagcgagagagagaccgaccagctggtggccgtggaggccctgatccacgccagcaccaagctgagcagagccaccttcatcatcaccaacggcgtgagcctgctgaagcagatctacaagaccaccaagaacgagaagatcaagatcagaaccctggtgggcctgtgcaagctgggcagcgccggcggcaccgactacggcctgagacagttcgccgagggcagcaccgagaagctggccaagcagtgcagaaagtggctgtgcaacatgagcatcgacaccagaaccagaagatgggccgtggagggcctggcctacctgaccctggacgccgacgtgaaggacgacttcgtgcaggacgtgcccgccctgcaggccatgttcgagctggccaagaccagcgacaagaccatcctgtacagcgtggccaccaccctggtgaactgcaccaacagctacgacgtgaaggaggtgatccccgagctggtgcagctggccaagttcagcaagcagcacgtgcccgaggagcaccccaaggacaagaaggacttcatcgacatgagagtgaagagactgctgaaggccggcgtgatcagcgccctggcctgcatggtgaaggccgacagcgccatcctgaccgaccagaccaaggagctgctggccagagtgttcctggccctgtgcgacaaccccaaggacagaggcaccatcgtggcccagggcggcggcaaggccctgatccccctggccctggagggcaccgacgtgggcaaggtgaaggccgcccacgccctggccaagatcgccgccgtgagcaaccccgacatcgccttccccggcgagagagtgtacgaggtggtgagacccctggtgagactgctggacacccagagagacggcctgcagaactacgaggccctgctgggcctgaccaacctgagcggcagaagcgacaagctgagacagaagatcttcaaggagagagccctgcccgacatcgagaactacatgttcgagaaccacgaccagctgagacaggccgccaccgagtgcatgtgcaacatggtgctgcacaaggaggtgcaggagagattcctggccgacggcaacgacagactgaagctggtggtgctgctgtgcggcgaggacgacgacaaggtgcagaacgccgccgccggcgccctggccatgctgaccgccgcccacaagaagctgtgcctgaagatgacccaggtgaccacccagtggctggagatcctgcagagactgtgcctgcacgaccagctgagcgtgcagcacagaggcctggtgatcgcctacaacctgctggccgccgacgccgagctggccaagaagctggtggagagcgagctgctggagatcctgaccgtggtgggcaagcaggagcccgacgagaagaaggccgaggtggtgcagaccgccagagagtgcctgatcaagtgcatggactacggcttcatcaagcccgtgagctag

SEQ ID NO: 12190 - DNA, 246 bp, synthetic construct
  source 1..246: mol_type = other DNA; note = Synthetic coding sequence
atgagccactacggcagctactacggcggcctgggctacagctgcggcggcttcggcggcctgggctacggctacggctgcggctgcggcagcttctgcagaagaggcagcggctgcggctacggcggctacggctacggcagcggcttcggcggctacggctacggcagcggcttcggcggctacggctacggctgctgcagacccagctacaacggcggctacggcttcagcggcttctactag

SEQ ID NO: 12191 - DNA, 150 bp, synthetic construct
  source 1..150: mol_type = other DNA; note = Synthetic coding sequence
atggaggtgcccagactggaccacgccctgaacagccccaccagcccctgcgaggaggtgatcaagaacctgagcctggaggccatccagctgtgcgacagagacgtggtgttcgaggagctgaccagcaagcagaccagaaagggctag

SEQ ID NO: 12192 - DNA, 498 bp, synthetic construct
  source 1..498: mol_type = other DNA; note = Synthetic coding sequence
atgagcagatacctgagaccccccaacaccagcctgttcgtgagaaacgtggccgacgacaccagaagcgaggacctgagaagagagttcggcagatacggccccatcgtggacgtgtacgtgcccctggacttctacaccagaagacccagaggcttcgcctacgtgcagttcgaggacgtgagagacgccgaggacgccctgcacaacctggacagaaagtggatctgcggcagacagatcgagatccagttcgcccagggcgacagaaagacccccaaccagatgaaggccaaggagggcagaaacgtgtacagcagcagcagatacgacgactacgacagatacagaagaagcagaagcagaagctacgagagaagaagaagcagaagcagaagcttcgactacaactacagaagaagctacagccccagaaagcccaactgcagctggaacacccagtacagcagcgcctactacaccagcagaaagatctag

SEQ ID NO: 12193 - DNA, 1803 bp, synthetic construct; identical to SEQ ID NO: 11130
  source 1..1803: mol_type = other DNA; note = Synthetic coding sequence

SEQ ID NO: 12194 - DNA, 465 bp, synthetic construct
  source 1..465: mol_type = other DNA; note = Synthetic coding sequence
atggtgagcagcgcccagatgggcttcaacctgcaggccctgctggagcagctgagccaggacgagctgagcaagttcaagtacctgatcaccaccttcagcctggcccacgagctgcagaagatcccccacaaggaggtggacaaggccgacggcaagcagctggtggagatcctgaccacccactgcgacagctactgggtggagatggccagcctgcaggtgttcgagaagatgcacagaatggacctgagcgagagagccaaggacgaggtgagagaggccgccctgaagagcttcaacaagagaaagcccctgagcctgggcatcaccagaaaggagagaccccccctggacgtggacgagatgctggagagattcaagaccgaggcccaggccttcaccgagaccaagggcaacgtgatctgcctgggcaaggaggtgttcaagggcaagaagccctag

SEQ ID NO: 12195 - DNA, 474 bp, synthetic construct; identical to SEQ ID NO: 11812
  source 1..474: mol_type = other DNA; note = Synthetic coding sequence

SEQ ID NO: 12196 - DNA, 348 bp, synthetic construct; identical to SEQ ID NO: 11792
  source 1..348: mol_type = other DNA; note = Synthetic coding sequence

SEQ ID NO: 12197 - DNA, 432 bp, synthetic construct
  source 1..432: mol_type = other DNA; note = Synthetic coding sequence
gtgagagagctggaggccgagctggacgccgagcagaagaagcacgccgaggccctgaagggcgtgagaaagcacgagagaagagtgaaggagctggcctaccaggtgggcgacagagtgagcctgggcagcggccccggcgccggccccgcccaggccagccccgagagccccctgcccgcccaggccgaggaggacagaaagaacctggccagaatgcaggacctggtggacaagctgcagagcaaggtgaagagctacaagagacagttcgaggaggccgagcagcaggccaacaccaacctggccaagtacagaaaggcccagcacgagctggacgacgccgaggagagagccgacatggccgagacccaggccaacaagctgagagccagaaccagagacgccctgggccccaagcacaaggagtag

SEQ ID NO: 12198 - DNA, 828 bp, synthetic construct; identical to SEQ ID NO: 10301
  source 1..828: mol_type = other DNA; note = Synthetic coding sequence

SEQ ID NO: 12199 - DNA, 339 bp, synthetic construct
  source 1..339: mol_type = other DNA; note = Synthetic coding sequence
tgatgcgccagaaccgccggcggctgcctgggctgcctgagcggccagtgctgctgcagactgtgccccctgaccctgcccgccaccagaagcctgtgccccggcagagtggtgtgggccagaagaagatggtggcccagctggctggcctggagatgcctgtggtgcaccaccagaccccccgcctgcatggagaacaccgacgccttcctgttcctgttcagcttcaccgacagagccagcttcgaggacctgcccggccagctggccagaatcgccggcgaggcccccggcgtggtgagaatggtgatcggcagcaagttcgaccagtacatgtag

SEQ ID NO: 12200 - DNA, 3330 bp, synthetic construct
  source 1..3330: mol_type = other DNA; note = Synthetic coding sequence
atgggcaccggcgacttcatctgcatcagcatgaccggcggcgccccctggggcttcagactgcagggcggcaaggagcagaagcagcccctgcaggtggccaagatcagaaaccagagcaaggccagcggcagcggcctgtgcgagggcgacgaggtggtgagcatcaacggcaacccctgcgccgacctgacctaccccgaggtgatcaagctgatggagagcatcaccgacagcctgcagatgctgatcaagagacccagcagcggcatcagcgaggccctgatcagcgagaacgagaacaagaacctggagcacctgacccacggcggctacgtggagagcaccaccctgcagatcagacccgccaccaagacccagtgcaccgagttcttcctggcccccgtgaagaccgaggtgcccctggccgagaaccagagaagcggccccgactgcgccggcagcctgaaggaggagaccggccccagctaccagagagccccccagatgcccgacagccagagaggcagagtggccgaggagctgatcctgagagagaaggtggaggccgtgcagcccggccccgtggtggagctgcagctgagcctgagccaggagagacacaagggcgccagcggccccctggtggccctgcccggcgccgagaagagcaagagccccgaccccgaccccaacctgagccacgacagaatcgtgcacatcaacagcatccccaccaacgagaaggccgaccccttcctgagaagcagcaagatcatccagatcagcagcggcagagagctgagagtgatccaggagagcgaggccggcgacgccggcctgcccagagtggaggtgatcctggactgcagcgacagacagaagaccgagggctgcagactgcaggccggcaaggagtgcgtggacagccccgtggagggcggccagagcgaggccccccccagcctggtgagcttcgccgtgagcagcgagggcaccgagcagggcgaggaccccagaagcgagaaggaccacagcagaccccacaagcacagagccagacacgccagactgagaagaagcgagagcctgagcgagaagcaggtgaaggaggccaagagcaagtgcaagagcatcgccctgctgctgaccgacgcccccaaccccaacagcaagggcgtgctgatgttcaagaagagaagaagaagagccagaaagtacaccctggtgagctacggcaccggcgagctggagagagaggccgacgaggaggaggagggcgacaaggaggacacctgcgaggtggccttcctgggcgccagcgagagcgaggtggacgaggagctgctgagcgacgtggacgacaacacccaggtggtgaacttcgactgggacagcggcctggtggacatcgagaagaagctgaacagaggcgacaagatggagatgctgcccgacaccaccggcaagggcgccctgatgttcgccaagagaagagagagaatggaccagatcaccgcccagaaggaggaggacaaggtgggcggcacccccagcagagagcaggacgccgcccagaccgacggcctgagaaccaccaccagctaccagagaaaggaggaggagagcgtgagaacccagagcagcgtgagcaagagctacatcgaggtgagccacggcctgggccacgtgccccagcagaacggcttcagcggcaccagcgagaccgccaacatccagagaatggtgcccatgaacagaaccgccaagcccttccccggcagcgtgaaccagcccgccacccccttcagccccaccagaaacatgaccagccccatcgccgacttccccgccccccccccctacagcgccgtgacccccccccccgacgccttcagcagaggcgtgagcagccccatcgccggccccgcccagccccccccctggccccagcccgccccctggagccagcccgccttctacgacagcagcgagagaatcgccagcagagacgagagaatcagcgtgcccgccaagagaaccggcatcctgcaggaggccaagagaagaagcaccaccaagcccatgttcaccttcaaggagcccaaggtgagccccaaccccgagctgctgagcctgctgcagaacagcgagggcaagagaggcaccggcgccggcggcgacagcggccccgaggaggactacctgagcctgggcgccgaggcctgcaacttcatgcagagcagcagcgccaagcagaagacccccccccccgtggcccccaagcccgccgtgaagagcagcagcagccagcccgtgacccccgtgagccccgtgtggagccccggcgtggcccccacccagccccccgccttccccaccagcaaccccagcaagggcaccgtggtgagcagcatcaagatcgcccagcccagctacccccccgccagacccgccagcaccctgaacgtggccggccccttcaagggcccccaggccgccgtggccagccagaactacacccccaagcccaccgtgagcacccccaccgtgaacgccgtgcagcccggcgccgtgggccccagcaacgagctgcccggcatgagcggcagaggcgcccagctgttcgccaagagacagagcagaatggagaagtacgtggtggacagcgacaccgtgcaggcccacgccgccagagcccagagccccacccccagcctgcccgccagctggaagtacagcagcaacgtgagagcccccccccccgtggcctacaaccccatccacagccccagctaccccctggccgccctgaagagccagcccagcgccgcccagcccagcaagatgggcaagaagaagggcaagaagcccctgaacgccctggacgtgatgaagcaccagccctaccagctgaacgccagcctgttcaccttccagccccccgacgccaaggacggcctgccccagaagagcagcgtgaaggtgaacagcgccctggccatgaagcaggccctgccccccagacccgtgaacgccgccagccccaccaacgtgcaggccagcagcgtgtacagcgtgcccgcctacaccagcccccccagcttcttcgccgaggccagcagccccgtgagcgccagccccgtgcccgtgggcatccccaccagccccaagcaggagagcgccagcagcagctacttcgtggcccccagacccaagttcagcgccaagaagagcggcgtgaccatccaggtgaagtgcaagagcggcatccacagccaggacatcatcagaacctacttccccgcctacctgagcagcagcacctag

SEQ ID NO: 12201 - DNA, 1554 bp, synthetic construct; identical to SEQ ID NO: 9849
  source 1..1554: mol_type = other DNA; note = Synthetic coding sequence

SEQ ID NO: 12202 - DNA, 348 bp, synthetic construct; identical to SEQ ID NO: 11792
  source 1..348: mol_type = other DNA; note = Synthetic coding sequence

SEQ ID NO: 12203 - DNA, 1014 bp, synthetic construct
  source 1..1014: mol_type = other DNA; note = Synthetic coding sequence
atggagctgaagaccctgtgggagaacaagctgatgcagagcagagccgtggacggcttccacagcgaggagcagcagctgctgctgcaggtgcagcagcagcaccagccccagcagcagcagcaccaccaccaccaccaccaccagcaggcccagccccagcagaccgtgccccagcaggcccagacccagcaggtgctgatccccgccagccagcaggccaccgccccccaggtgatcgtgcccgacagcaagctgatccagcacatgaacgccagcaacatgagcgccgccgccaccgccgccaccctggccctgcccgccggcgtgacccccgtgcagcagatcctgaccaacagcggccagctgctgcaggtggtgagagccgccaacggcgcccagtacatcttccagccccagcagagcgtggtgctgcagcagcaggtgatcccccagatgcagcccggcggcgtgcaggcccccgtgatccagcaggtgctggcccccctgcccggcggcatcagcccccagaccggcgtgatcatccagccccagcagatcctgttcaccggcaacaagacccaggtgatccccaccaccgtggccgcccccacccccgcccaggcccagatcaccgccaccggccagcagcagccccaggcccagcccgcccagacccaggcccccctggtgctgcaggtggacggcaccggcgacaccagcagcgaggaggacgaggacgaggaggaggactacgacgacgacgaggaggaggacaaggagaaggacggcgccgaggacggccaggtggaggaggagcccctgaacagcgaggacgacgtgagcgacgaggagggccaggagctgttcgacaccgagaacgtggtggtgtgccagtacgacaagatccacagaagcaagaacaagtggaagttccacctgaaggacggcatcatgaacctgaacggcagagactacatcttcagcaaggccatcggcgacgccgagtggtag

SEQ ID NO: 12204 - DNA, 3012 bp, synthetic construct
  source 1..3012: mol_type = other DNA; note = Synthetic coding sequence
atgagccagtggacccccgagtacaacgagctgtacaccctgaaggtggacatgaagagcgagatccccagcgacgcccccaagacccaggagagcctgaagggcatcctgctgcaccccgagcccatcggcgccgccaagagcttccccgccggcgtggagatgatcaacagcaaggtgggcaacgagttcagccacctgtgcgacgacagccagaagcaggagaaggagatgaacggcaaccagcaggagcaggagaagagcctggtggtgagaaagaagagaaagagccagcaggccggccccagctacgtgcagaactgcgtgaaggagaaccagggcatcctgggcctgagacagcacctgggcacccccagcgacgaggacaacgacagcagcttcagcgactgcctgagcagccccagcagcagcctgcacttcggcgacagcgacaccgtgaccagcgacgaggacaaggaggtgagcgtgagacacagccagaccatcctgaacgccaagagcagaagccacagcgccagaagccacaagtggcccagaaccgagaccgagagcgtgagcggcctgctgatgaagagaccctgcctgcacggcagcagcctgagaagactgccctgcagaaagagattcgtgaagaacaacagcagccagagaacccagaagcagaaggagagaatcctgatgcagagaaagaagagagaggtgctggccagaagaaagtacgccctgctgcccagcagcagcagcagcagcgagaacgacctgagcagcgagagcagcagcagcagcagcaccgagggcgaggaggacctgttcgtgagcgccagcgagaaccaccagaacaaccccgccgtgcccagcggcagcatcgacgaggacgtggtggtgatcgaggccagcagcaccccccaggtgaccgccaacgaggagatcaacgtgaccagcaccgacagcgaggtggagatcgtgaccgtgggcgagagctacagaagcagaagcaccctgggccacagcagaagccactggagccagggcagcagcagccacgccagcagaccccaggagcccagaaacagaagcagaatcagcaccgtgatccagcccctgagacagaacgccgccgaggtggtggacctgaccgtggacgaggacgagcccaccgtggtgcccaccaccagcgccagaatggagagccaggccaccagcgccagcatcaacaacagcaaccccagcaccagcgagcaggccagcgacaccgccagcgccgtgaccagcagccagcccagcaccgtgagcgagaccagcgccaccctgaccagcaacagcaccaccggcaccagcatcggcgacgacagcagaagaaccaccagcagcgccgtgaccgagaccggcccccccgccatgcccagactgcccagctgctgcccccagcacagcccctgcggcggcagcagccagaaccaccacgccctgggccacccccacaccagctgcttccagcagcacggccaccacttccagcaccaccaccaccaccaccacaccccccaccccgccgtgcccgtgagccccagcttcagcgaccccgcctgccccgtggagagacccccccaggtgcaggccccctgcggcgccaacagcagcagcggcaccagctaccacgagcagcaggccctgcccgtggacctgagcaacagcggcatcagaagccacggcagcggcagcttccacggcgccagcgccttcgacccctgctgccccgtgagcagcagcagagccgccatcttcggccaccaggccgccgccgccgcccccagccagcccctgagcagcatcgacggctacggcagcagcatggtggcccagccccagccccagccccccccccagcccagcctgagcagctgcagacactacatgccccccccctacgccagcctgaccagacccctgcaccaccaggccagcgcctgcccccacagccacggcaacccccccccccagacccagccccccccccaggtggactacgtgatcccccaccccgtgcacgccttccacagccagatcagcagccacgccaccagccaccccgtggccccccccccccccacccacctggccagcaccgccgcccccatcccccagcacctgccccccacccaccagcccatcagccaccacatccccgccaccgccccccccgcccagagactgcacccccacgaggtgatgcagagaatggaggtgcagagaagaagaatgatgcagcaccccaccggcctgttcgtgttctgcgtgagcagaagagcccacgagagaccccccccccacccccacagaatgcaccccaactacggccacggccaccacatccacgtgccccagaccatgagcagccaccccagacaggcccccgagagaagcgcctgggagctgggcatcgaggccggcgtgaccgccgccacctacacccccggcgccctgcacccccacctggcccactaccacgccccccccagactgcaccacctgcagctgggcgccctgcccctgatggtgcccgacatggccggctacccccacatcagatacatcagcagcggcctggacggcaccagcttcagaggccccttcagaggcaacttcgaggagctgatccacctggaggagagactgggcaacgtgaacagaggcgccagccagggcaccatcgagagatgcacctacccccacaagtacaagaaggtgaccaccgactggttcagccagagaaagctgcactgcaagcaggacggcgaggagggcaccgaggaggacaccgaggagaagtgcaccatctgcctgagcatcctggaggagggcgaggacgtgagaagactgccctgcatgcacctgttccaccaggtgtgcgtggaccagtggctgatcaccaacaagaagtgccccatctgcagagtggacatcgaggcccagctgcccagcgagagctag

SEQ ID NO: 12205 - DNA, 3309 bp, synthetic construct
  source 1..3309: mol_type = other DNA; note = Synthetic coding sequence
atggccgagaaggaggccagaagaaagttcaagcagatcgtgaccgccgtgtacttctgccactgcagaaacatcgtgcacagagacctgaaggccgagaacctgctgctggacgccaacctgaacatcaagatcgccgacttcggcttcagcaacctgttcacccccggccagctgctgaagacctggtgcggcagccccccctacgccgcccccgagctgttcgagggcaaggagtacgacggccccaaggtggacatctggagcctgggcgtggtgctgtacgtgctggtgtgcggcgccctgcccttcgacggcagcaccctgcagaacctgagagccagagtgctgagcggcaagttcagaatccccttcttcatgagcaccgagtgcgagcacctgatcagacacatgctggtgctggaccccaacaagagactgagcatggagcagatctgcaagcacaagtggatgaagctgggcgacgccgaccccaacttcgacagactgatcgccgagtgccagcagctgaaggaggagagacaggtggaccccctgaacgaggacgtgctgctggccatggaggacatgggcctggacaaggagcagaccctgcagagcctgagaagcgacgcctacgaccactacagcgccatctacagcctgctgtgcgacagacacaagagacacaagaccctgagactgggcgccctgcccagcatgcccagagccctggccttccaggcccccgtgaacatccaggccgagcaggccggcaccgccatgaacatcagcgtgccccaggtgcagctgatcaaccccgagaaccagatcgtggagcccgacggcaccctgaacctggacagcgacgagggcgaggagcccagccccgaggccctggtgagatacctgagcatgagaagacacaccgtgggcgtggccgaccccagaaccgaggtgatggaggacctgcagaagctgctgcccggcttccccggcgtgaacccccaggcccccttcctgcaggtggcccccaacgtgaacttcatgcacaacctgctgcccatgcagaacctgcagcccaccggccagctggagtacaaggagcagagcctgctgcagccccccaccctgcagctgctgaacggcatgggccccctgggcagaagagccagcgacggcggcgccaacatccagctgcacgcccagcagctgctgaagagacccagaggccccagccccctggtgaccatgacccccgccgtgcccgccgtgacccccgtggacgaggagagcagcgacggcgagcccgaccaggaggccgtgcagagcagcacctacaaggacagcaacaccctgcacctgcccaccgagagattcagccccgtgagaagattcagcgacggcgccgccagcatccaggccttcaaggcccacctggagaagatgggcaacaacagcagcatcaagcagctgcagcaggagtgcgagcagctgcagaagatgtacggcggccagatcgacgagagaaccctggagaagacccagcagcagcacatgctgtaccagcaggagcagcaccaccagatcctgcagcagcagatccaggacagcatctgccccccccagcccagcccccccctgcaggccgcctgcgagaaccagcccgccctgctgacccaccagctgcagagactgagaatccagcccagcagccccccccccaaccaccccaacaaccacctgttcagacagcccagcaacagccccccccccatgagcagcgccatgatccagccccacggcgccgccagcagcagccagttccagggcctgcccagcagaagcgccatcttccagcagcagcccgagaactgcagcagcccccccaacgtggccctgacctgcctgggcatgcagcagcccgcccagagccagcaggtgaccatccaggtgcaggagcccgtggacatgctgagcaacatgcccggcaccgccgccggcagcagcggcagaggcatcagcatcagccccagcgccggccagatgcagatgcagcacagaaccaacctgatggccaccctgagctacggccacagacccctgagcaagcagctgagcgccgacagcgccgaggcccacagcgcccaccagcagcccccccactacaccaccagcgccctgcagcaggccctgctgagccccaccccccccgactacaccagacaccagcaggtgccccacatcctgcagggcctgctgagccccagacacagcctgaccggccacagcgacatcagactgccccccaccgagttcgcccagctgatcaagagacagcagcagcagagacagcagcagcagcagcagcagcagcagcaggagtaccaggagctgttcagacacatgaaccagggcgacgccggcagcctggcccccagcctgggcggccagagcatgaccgagagacaggccctgagctaccagaacgccgacagctaccaccaccacaccagcccccagcacctgctgcagatcagagcccaggagtgcgtgagccaggccagcagccccacccccccccacggctacgcccaccagcccgccctgatgcacagcgagagcatggaggaggactgcagctgcgagggcgccaaggacggcttccaggacagcaagagcagcagcaccctgaccaagggctgccacgacagccccctgctgctgagcaccggcggccccggcgaccccgagagcctgctgggcaccgtgagccacgcccaggagctgggcatccacccctacggccaccagcccaccgccgccttcagcaagaacaaggtgcccagcagagagcccgtgatcggcaactgcatggacagaagcagccccggccaggccgtggagctgcccgaccacaacggcctgggctaccccgccagacccagcgtgcacgagcaccacagacccagagccctgcagagacaccacaccatccagaacagcgacgacgcctacgtgcagctggacaacctgcccggcatgagcctggtggccggcaaggccctgagcagcgccagaatgagcgacgccgtgctgagccagagcagcctgatgggcagccagcagttccaggacggcgagaacgaggagtgcggcgccagcctgggcggccacgagcaccccgacctgagcgacggcagccagcacctgaacagcagctgctaccccagcacctgcatcaccgacatcctgctgagctacaagcaccccgaggtgagcttcagcatggagcaggccggcgtgtag

SEQ ID NO: 12206 - DNA, 1461 bp, synthetic construct
  source 1..1461: mol_type = other DNA; note = Synthetic coding sequence
atgaccctgatggtgctgaccttcagcagctacatcctggacttcatcaacgtgctgagctacgacctgcacggcagctgggagagattcaccggccacaacagccccctgttcagcctgcccgaggaccccaagagcagcgcctacgccatgaactactggagaaagctgggcgcccccagcgagaagctgatcatgggcatccccacctacggcagaaccttcagactgctgaaggccagcaagaacggcctgcaggccagagccatcggccccgccagccccggcaagtacaccaagcaggagggcttcctggcctacttcgagatctgcagcttcgtgtggggcgccaagaagcactggatcgactaccagtacgtgccctacgccaacaagggcaaggagtgggtgggctacgacaacgccatcagcttcagctacaaggcctggttcatcagaagagagcacttcggcggcgccatggtgtggaccctggacatggacgacgtgagaggcaccttctgcggcaccggccccttccccctggtgtacgtgctgaacgacatcctggtgagagccgagttcagcagcaccagcctgccccagttctggctgagcagcgccgtgaacagcagcagcaccgaccccgagagactggccgtgaccaccgcctggaccaccgacagcaagatcctgccccccggcggcgaggccggcgtgaccgagatccacggcaagtgcgagaacatgaccatcacccccagaggcaccaccgtgacccccaccaaggagaccgtgagcctgggcaagcacaccgtggccctgggcgagaagaccgagatcaccggcgccatgaccatgaccagcgtgggccaccagagcatgacccccggcgagaaggccctgacccccgtgggccaccagagcgtgaccaccggccagaagaccctgaccagcgtgggctaccagagcgtgacccccggcgagaagaccctgacccccgtgggccaccagagcgtgacccccgtgagccaccagagcgtgagccccggcggcaccaccatgacccccgtgcacttccagaccgagaccctgagacagaacaccgtggcccccagaagaaaggccgtggccagagagaaggtgaccgtgcccagcagaaacatcagcgtgacccccgagggccagaccatgcccctgagaggcgagaacctgaccagcgaggtgggcacccaccccagaatgggcaacctgggcctgcagatggaggccgagaacagaatgatgctgagcagcagccccgtgatccagctgcccgagcagacccccctggccttcgacaacagattcgtgcccatctacggcaaccacagcagcgtgaacagcgtgaccccccagaccagccccctgagcctgaagaaggagatccccgagaacagcgccgtggacgaggaggcctag

SEQ ID NO: 12207 - DNA, 1017 bp, synthetic construct
  source 1..1017: mol_type = other DNA; note = Synthetic coding sequence
atggagctgtggggcagaatgctgtgggccctgctgagcggccccggcagaagaggcagcaccagaggctgggccttcagcagctggcagccccagccccccctggccggcctgagcagcgccatcgagctggtgagccactggaccggcgtgttcgagaagagaggcatccccgaggccagagagagcagcgagtacatcgtggcccacgtgctgggcgccaagaccttccagagcctgagacccgccctgtggacccagcccctgaccagccagcagctgcagtgcatcagagagctgagcagcagaagactgcagagaatgcccgtgcagtacatcctgggcgagtgggacttccagggcctgagcctgagaatggtgccccccgtgttcatccccagacccgagaccgaggagctggtggagtgggtgctggaggaggtggcccagagaagccacgccgtgggcagccccggcagccccctgatcctggaggtgggctgcggcagcggcgccatcagcctgagcctgctgagccagctgccccagagcagagtgatcgccgtggacaagagagaggccgccatcagcctgacccacgagaacgcccagagactgagactgcaggacagaatctggatcatccacctggacatgaccagcgagagaagctggacccacctgccctggggccccatggacctgatcgtgagcaaccccccctacgtgttccaccaggacatggagcagctggcccccgagatcagaagctacgaggaccccgccgccctggacggcggcgaggagggcatggacatcatcacccacatcctggccctggcccccagactgctgaaggacagcggcagcatcttcctggaggtggaccccagacaccccgagctggtgagcagctggctgcagagcagacccgacctgtacctgaacctggtggccgtgagaagagacttctgcggcagacccagattcctgcacatcagaagaagcggcccctag

SEQ ID NO: 12208 - DNA, 1899 bp, synthetic construct; identical to SEQ ID NO: 9855
  source 1..1899: mol_type = other DNA; note = Synthetic coding sequence

SEQ ID NO: 12209 - DNA, 1791 bp, synthetic construct
  source 1..1791: mol_type = other DNA; note = Synthetic coding sequence
atgagcaaccagcaggagaagtacgaggcccagaacatcgtgaacagcaccgaggagagcgacgacgccttcgacaccgtgaccatccccgtgcccagcgaggagccccaggagagcgaccagaccgaggagcacgagagcggcatcgagcagttcagcgagagccacgccatccacgtggaggagcagagcgaccagagcttcagcagcctggagcccgacaacgagcagctgatggaggaggtgatcagccccagacaggtgagctacaccccccagcaccacgagaagcagtacgccatgcagagacccaacgacgacagcctggccttcctggacaagatcaagagcgtgaaggagagcctgcaggagagcgtggaggacagcctggccaccgtgaaggtggtgctgatccccgtgggccaggagatcgtgatccccttcaaggtggacaccatcctgaagtacctgaaggaccacttcagccacctgctgggcatcccccacagcgtgctgcagatcagatacagcggcaagatcctgaagaacaacgagaccctggtgcagcacggcgtgaagccccaggagatcgtgcaggtggagatcttcagcaccaaccccgacctgtaccccgtgagaagaatcgacggcctgaccgacgtgagccagatcatcaccgtgaccgtgcagaccggcctggaccagtaccagcaggtgcccgtggagatcgtgaagagcgacttccacaagcccttcctgggcggcttcagacacaaggtgaccggcgtggagtaccacaacgccggcacccagaccgtgcccaagagaatccccgagagactgagcatcttctgcagagacacccagaccgtgttccagaagaagaacctgcagcagaccaccaacaccaccagcacccagatgaccaacatcggcgtgtacgtgagcaacatgaccgacaagctggtgacccccggcaagtacttcagcgccgccgagtaccacgcccagagactgaaggccgtgatcgtgatccagacctactacagacagtggcacgccaagatcttcgtggagaacctgagaagacagaagagcctgagactggagtgggagacccagcaggagctgagaaagatcagagagaaggaggagtggatcaagctggactaccacagaagacacaaccccaagaccaacgaggacttcgagttcctgtacaacgccctggagttctggagacaggaggagctgaccagaatcaaccagagcttcaccggcgccgagagaaaggccgccctgtgcgagctgctggagaaggagacccagatcatcgccagcatcggcagacacagatacatcgcctacatggccaaccaggaggccgccatccaggccttcctggacaagtgcagcgcccccaagatctggagaacccccaacggcaagaccatcgagatggacacccagttcaccatcagagccagagagctgcagaacatctacaagtgcatcatgctgaagaacatcagccaggacgagagactggacgtgctgctgaccctgaagcacaccgtgaaggagcacgagtgcaagctgacccaggagatcctggagctgatcgacagagaggtggacctgatgatgagaggcgtgaagcaccacaacctggagggcctgagaaagagaatcgccaccctgttcttccactacatcaagacccccctgttcaaccccgaggtggccaagtacctgaagatgggcggcgagtacctgagcatggccctgtag

SEQ ID NO: 12210 - DNA, 1305 bp, synthetic construct
  source 1..1305: mol_type = other DNA; note = Synthetic coding sequence
atggtgcaggacggcaccttcaagaccagagacagcacctggacctgcgagagcaccagaatggccgccgccccccccagctactgcttcgtggccttcccccccagagccaaggacggcctggtggtgttcggcaagaacagcgccagacccagagacgaggtgcaggaggtggtgtacttcagcgccgccgaccacgagcccgagagcaaggtggagtgcacctacatcagcatcgaccaggtgcccagaacctacgccatcatgatcagcagacccgcctggctgtggggcgccgagatgggcgccaacgagcacggcgtgtgcatcgccaacgaggccatcaacaccagagagcccgccgccgagatcgaggccctgctgggcatggacctggtgagactgggcctggagagaggcgagaccgccaaggaggccctggacgtgatcgtgagcctgctggaggagcacggccagggcggcaactacttcgaggacgccaacagctgccacagcttccagagcgcctacctgatcgtggacagagacgaggcctgggtgctggagaccatcggcaagtactgggccgccgagaaggtgaccgagggcgtgagatgcatctgcagccagctgagcctgaccaccaagatggacgccgagcaccccgagctgagaagctacgcccagagccagggctggtggaccggcgagggcgagttcaacttcagcgaggtgttcagccccgtggaggaccacctggactgcggcgccggcaaggacagcctggagaagcaggaggagagcatcaccgtgcagaccatgatgaacaccctgagagacaaggccagcggcgtgtgcatcgacagcgagttcttcctgaccaccgccagcggcgtgagcgtgctgccccagaacagaagcagcccctgcatccactacttcaccggcacccccgaccccagcagaagcatcttcaagcccttcatcttcgtggacgacgtgaagctggtgcccaagacccagagcccctgcttcggcgacgacgaccccgccaagaaggagcccagattccaggagaagcccgacagaagacacgagctgtacaaggcccacgagtgggccagagccatcatcgagagcgaccaggagcagggcagaaagctgagaagcaccatgctggagctggagaagcagggcctggaggccatggaggagatcctgaccagcagcgagcccctggaccccgccgaggtgggcgacctgttctacgactgcgtggacaccgagatcaagttcttcaagtag

SEQ ID NO: 12211 - DNA, 1320 bp, synthetic construct
  source 1..1320: mol_type = other DNA; note = Synthetic coding sequence
atggcctggccctgcatcaccagagcctgctgcatcgccagattctggaaccagctggacaaggccgacatcgccgtgcccctggtgttcaccaagtacagcgaggccaccgagcaccccggcgcccccccccagcccccccccccccagcagcaggcccagcccgccctggccccccccagcgccagagccgtggccatcgagacccagcccgcccagggcgagctggacgccgtggccagagccaccggccccgcccccggccccaccggcgagagagagcccgccgccggccccggcagaagcggccccggccccggcctgggcagcggcagcaccagcggccccgccgacagcgtgatgagacaggactacagagcctggaaggtgcagagacccgagcccagctgcagacccagaagcgagtaccagcccagcgacgcccccttcgagagagagacccagtaccagaaggacttcagagcctggcccctgcccagaagaggcgaccacccctggatccccaagcccgtgcagatcagcgccgccagccaggccagcgcccccatcctgggcgcccccaagagaagaccccagagccaggagagatggcccgtgcaggccgccgccgaggccagagagcaggaggccgcccccggcggcgccggcggcctggccgccggcaaggccagcggcgccgacgagagagacaccagaagaaaggccggccccgcctggatcgtgagaagagccgagggcctgggccacgagcagacccccctgcccgccgcccaggcccaggtgcaggccaccggccccgaggccggcagaggcagagccgccgccgacgccctgaacagacagatcagagaggaggtggccagcgccgtgagcagcagctacagaaacgagttcagagcctggaccgacatcaagcccgtgaagcccatcaaggccaagccccagtacaagccccccgacgacaagatggtgcacgagaccagctacagcgcccagttcaagggcgaggccagcaagcccaccaccgccgacaacaaggtgatcgacagaagaagaatcagaagcctgtacagcgagcccttcaaggagccccccaaggtggagaagcccagcgtgcagagcagcaagcccaagaagaccagcgccagccacaagcccaccagaaaggccaaggacaagcaggccgtgagcggccaggccgccaagaagaagagcgccgagggccccagcaccaccaagcccgacgacaaggagcagagcaaggagatgaacaacaagctggccgaggccaaggagtag

SEQ ID NO: 12212 - DNA, 813 bp, synthetic construct
  source 1..813: mol_type = other DNA; note = Synthetic coding sequence
atgggcggctgcttcagcaagcccaagcccgtggagctgaagatcgaggtggtgctgcccgagaaggagagaggcaaggaggagctgagcgccagcggcaagggcagccccagagcctaccagggcaacggcaccgccagacacttccacaccgaggagagactgagcaccccccacccctaccccagcccccaggactgcgtggaggccgccgtgtgccacgtgaaggacctggagaacggccagatgagagaggtggagctgggctggggcaaggtgctgctggtgaaggacaacggcgagttccacgccctgggccacaagtgcccccactacggcgcccccctggtgaagggcgtgctgagcagaggcagagtgagatgcccctggcacggcgcctgcttcaacatcagcaccggcgacctggaggacttccccggcctggacagcctgcacaagttccaggtgaagatcgagaaggagaaggtgtacgtgagagccagcaagcaggccctgcagctgcagagaagaaccaaggtgatggccaagtgcatcagccccagcgccggctacagcagcagcaccaacgtgctgatcgtgggcgccggcgccgccggcctggtgtgcgccgagaccctgagacaggagggcttcagcgacagaatcgtgctgtgcaccctggacagacacctgccctacgacagacccaagctgagcaagagcctggacacccagcccgagcagctggccctgagacccaaggagttcttcagagcctacggcatcgaggtgctgaccgaggcccaggtgtag

SEQ ID NO: 12213 - DNA, 369 bp, synthetic construct; identical to SEQ ID NO: 12080
  source 1..369: mol_type = other DNA; note = Synthetic coding sequence

SEQ ID NO: 12214 - DNA, 1269 bp, synthetic construct
  source 1..1269: mol_type = other DNA; note = Synthetic coding sequence
atgacccccagcatccccagcatcagaagactgggcagcggctacttcagcagcaacggcaagctggaggaggtgaagacccccaagaaccccgtgaagagaaaggacctgctgagacacgaccccgacctgcacatgcaccagggctacgacaagtacgacgtgagcgagttctgcagctacatcaagagcagcagcagcctgggcaacgccaccagcgacgaggaccccaacaccaacatcatgaacatcaacgagaacaagaacatccccaaggccaagaacaagagcgagagcgagaacgagcccaaggccggcaccgacagccccgtgagctgcgccagcgtgaccgaggagagagtggccagcgacagccccaagcccgccctgaccctgcagcagggccaggagttcagcgccggcggccagaacgccgagaacctgtgccagttcttcaagatcagccccgacctgaacatcaagtgcgagagaaaggacgacttcctgggcgccgccgagggcaagctgcagtgcaacagactgatgcccaacagccagaaggactgccactgcctgggcgacgtgctgatcgagaacaccaaggagagcaagagccagagcgaggacctgggcagaaagcccatggagagcagcagcgtggtgagctgcagagacagaaaggacagaagaagaagcatgtgctacagcgacggcagaagcctgcacctggagaagaacggcaaccacacccccagcagcagcgtgggcagcagcgtggagatcagcctggagaacagcgagctgttcaaggacctgagcgacgccatcgagcagaccttccagagaagaaacagcgagaccaaggtgagaagaagcaccagactgcagaaggacctggagaacgagggcctggtgtggatcagcctgcccctgcccagcaccagccagaaggccaagagaagaaccatctgcaccttcgacagcagcggcttcgagagcatgagccccatcaaggagaccgtgagcagcagacagaagccccagatggccccccccgtgagcgaccccgagaacagccagggccccgccgccggcagcagcgacgagcccggcaagagaagaaagagcttctgcatcagcaccctggccaacaccaaggccaccagccagttcaagggctacagaagaagaagcagcctgaacggcaagggcgagagcagcctgaccgccctggagagaatcgagcacaacggcgagagaaagcagtag

SEQ ID NO: 12215 - DNA, 3336 bp, synthetic construct
  source 1..3336: mol_type = other DNA; note = Synthetic coding sequence
atggtgagagagagaaagtgcatcctgtgccacatcgtgtacagcagcaagaaggagatggacgagcacatgagaagcatgctgcaccacagagagctggagaacctgaagggcagattcggcatcgagatggtgcccctggtgcagaacgagcaggaggccctggacctggacggcgagcccgacctgagcagcctggagggcttccagtgggagggcgtgagcatcagcagcagccccggcctggccagaaagagaagcctgagcgagagcagcgtgatcatggacagagcccccagcgtgtacagcttcttcagcgaggagggcaccggcaaggagaacgagccccagcagatggtgagccccagcaacagcctgagagccggccagagccagaaggccaccatgcacctgaagcaggaggtgacccccagagccgccagcctgagaaccggcgagagagccgagaacgtggccacccagagaagacacagcgcccagctgagcagcgaccacatcatccccctgatgcacctggccaaggacctgaacagccaggagagaagcatcccccccagcgagaaccagaacagccaggagagcaacggcgagggcaactgcctgagcagcagcgccagcagcgccctggccatcagcagcctggccgacgccgccaccgacagcagctgcaccagcggcgccgagcagaacgacggccagagcatcagaaagaagagaagagccaccggcgacggcagcagccccgagctgcccagcctggagagaaagaacaagagaagaaagatcaagggcaagaaggagagaagccaggtggaccagctgctgaacatcagcctgagagaggaggagctgagcaagagcctgcagtgcatggacaacaacctgctgcaggccagagccgccctgcagaccgcctacgtggaggtgcagagactgctgatgctgaagcagcagatcaccatggagatgagcgccctgagaacccacagaatccagatcctgcagggcctgcaggagacctacgagcccagcgagcaccccgaccaggtgccctgcagcctgaccagagagagaagaaacagcagaagccagaccagcatcgacgccgccctgctgcccacccccttcttccccctgttcctggagccccccagcagccacgtgagccccagccccaccggcgccagcctgcagatcaccaccagccccaccttccagacccacggcagcgtgcccgcccccgacagcagcgtgcagatcaagcaggagcccatgagccccgagcaggacgagaacgtgaacgccgtgccccccagcagcgcctgcaacgtgagcaaggagctgctggaggccaacagagagatcagcgacagctgccccgtgtaccccgtgatcaccgccagactgagcctgcccgagagcaccgagagcttccacgagcccagccaggagctgaagttcagcgtggagcagagaaacaccagaaacagagagaacagccccagcagccagagcgccggcctgagcagcatcaacaaggagggcgaggagcccaccaagggcaacagcggcagcgaggcctgcaccagcagcttcctgagactgagcttcgccagcgagacccccctggagaaggagccccacagccccgccgaccagcccgagcagcaggccgagagcaccctgaccagcgccgagaccagaggcagcaagaagaagaagaagctgagaaagaagaagagcctgagagccgcccacgtgcccgagaacagcgacaccgagcaggacgtgctgaccgtgaagcccgtgagaaaggtgaaggccggcaagctgatcaagggcggcaaggtgaccaccagcacctgggaggacagcagaaccggcagagagcaggagagcgtgagagacgagcccgacagcgacagcagcctggaggtgctggagatccccaacccccagctggaggtggtggccatcgacagcagcgagagcggcgaggagaagcccgacagccccagcaagaaggacatctggaacagcaccgagcagaaccccctggagaccagcagaagcggctgcgacgaggtgagcagcaccagcgagatcggcaccagatacaaggacggcatccccgtgagcgtggccgagacccagaccgtgatcagcagcatcaagggcagcaagaacagcagcgagatcagcagcgagcccggcgacgacgacgagcccaccgagggcagcttcgagggccaccaggccgccgtgaacgccatccagatcttcggcaacctgctgtacacctgcagcgccgacaagaccgtgagagtgtacaacctggtgagcagaaagtgcatcggcgtgttcgagggccacaccagcaaggtgaactgcctgctggtgacccagaccagcggcaagaacgccgccctgtacaccggcagcagcgaccacaccatcagatgctacaacgtgaagagcagagagtgcgtggagcagctgcagctggaggacagagtgctgtgcctgcacagcagatggagaatcctgtacgccggcctggccaacggcaccgtggtgaccttcaacatcaagaacaacaagagactggagatcttcgagtgccacggccccagagccgtgagctgcctggccaccgcccaggagggcgccagaaagctgctggtggtgggcagctacgactgcaccatcagcgtgagagacgccagaaacggcctgctgctgagaaccctggagggccacagcaagaccatcctgtgcatgaaggtggtgaacgacctggtgttcagcggcagcagcgaccagagcgtgcacgcccacaacatccacaccggcgagctggtgagaatctacaagggccacaaccacgccgtgaccgtggtgaacatcctgggcaaggtgatggtgaccgcctgcctggacaagttcgtgagagtgtacgagctgcagagccacgacagactgcaggtgtacggcggccacaaggacatgatcatgtgcatgaccatccacaagagcatgatctacaccggctgctacgacggcagcatccaggccgtgagactgaacctgatgcagaactacagatgctggtggcacggctgcagcctgatcttcggcgtggtggaccacctgaagcagcacctgctgaccgaccacaccaaccccaacttccagaccctgaagtgcagatggaagaactgcgacgccttcttcaccgccagaaagggcagcaagcaggacgccgccggccacatcgagagacacgccgaggacgacagcaagatcgacagctag

SEQ ID NO: 12216 - DNA, 354 bp, synthetic construct
  source 1..354: mol_type = other DNA; note = Synthetic coding sequence
atgtacagccccatcatctaccaggccctgtgcgagcacgtgcagacccagatgagcctgatgaacgacctgaccagcaagaacatccccaacggcatccccgccgtgccctgccacgcccccagccacagcgagagccaggccaccccccacagcagctacggcctgtgcaccagcacccccgtgtggagcctgcagagacccccctgcccccccaaggtgcacagcgaggtgcagaccgacggcaacagccagttcgccagccagggcaagaccgtgagcgccacctgcaccgacgtgctgagaaacagcttcaacaccagccccggcgtgccctgcagcctgcccaagtag

SEQ ID NO: 12217 - DNA, 189 bp, synthetic construct
  source 1..189: mol_type = other DNA; note = Synthetic coding sequence
atggccgccctgagacccctggtgaagcccaagatcgtgaagaagagaaccaagaagttcatcagacaccagagcgacagatacgtgaagatcaagagaaactggagaaagcccagaggcatcgacaacagagtgagaagaagattcaagggccagatcctgatgcccaacatcggctacggcagctag

SEQ ID NO: 12218 - DNA, 411 bp, synthetic construct
  source 1..411: mol_type = other DNA; note = Synthetic coding sequence
atgagcgccagctgcgacggctgcgtgggcagcagaccccccgtgcacctggccagcggctacagcctggccgacctgctggtgctggagatgggcatgggcacccagtgctggaccgaggaccagagaagatggagcagcctgtggccctggagccacctgagcagcgtgctgctggccgacaaggagggcggcccccccgccgtggacgaggtgctggacgaggccgtgcccgagtacagagcccccggcagaaagagcctgctggagatcagacagctggaccccgacgacagaagcctggccaagtacaagagagtgctgctgggccccctgccccccgccgtggaccccagcctgcccaacgtgcaggtgaccagactgaccctgctgagcgagcaggccccctag

SEQ ID NO: 12219 - DNA, 1803 bp, synthetic construct
  source 1..1803: mol_type = other DNA; note = Synthetic coding sequence
atgcccgagatcagagtgacccccctgggcgccggccaggacgtgggcagaagctgcatcctggtgagcatcgccggcaagaacgtgatgctggactgcggcatgcacatgggcttcaacgacgacagaagattccccgacttcagctacatcacccagaacggcagactgaccgacttcctggactgcgtgatcatcagccacttccacctggaccactgcggcgccctgccctacttcagcgagatggtgggctacgacggccccatctacatgacccaccccacccaggccatctgccccatcctgctggaggactacagaaagatcgccgtggacaagaagggcgaggccaacttcttcaccagccagatgatcaaggactgcatgaagaaggtggtggccgtgcacctgcaccagaccgtgcaggtggacgacgagctggagatcaaggcctactacgccggccacgtgctgggcgccgccatgttccagatcaaggtgggcagcgagagcgtggtgtacaccggcgactacaacatgacccccgacagacacctgggcgccgcctggatcgacaagtgcagacccaacctgctgatcaccgagagcacctacgccaccaccatcagagacagcaagagatgcagagagagagacttcctgaagaaggtgcacgagaccgtggagagaggcggcaaggtgctgatccccgtgttcgccctgggcagagcccaggagctgtgcatcctgctggagaccttctgggagagaatgaacctgaaggtgcccatctacttcagcaccggcctgaccgagaaggccaaccactactacaagctgttcatcccctggaccaaccagaagatcagaaagaccttcgtgcagagaaacatgttcgagttcaagcacatcaaggccttcgacagagccttcgccgacaaccccggccccatggtggtgttcgccacccccggcatgctgcacgccggccagagcctgcagatcttcagaaagtgggccggcaacgagaagaacatggtgatcatgcccggctactgcgtgcagggcaccgtgggccacaagatcctgagcggccagagaaagctggagatggagggcagacaggtgctggaggtgaagatgcaggtggagtacatgagcttcagcgcccacgccgacgccaagggcatcatgcagctggtgggccaggccgagcccgagagcgtgctgctggtgcacggcgaggccaagaagatggagttcctgaagcagaagatcgagcaggagctgagagtgaactgctacatgcccgccaacggcgagaccgtgaccctgcccaccagccccagcatccccgtgggcatcagcctgggcctgctgaagagagagatggcccagggcctgctgcccgaggccaagaagcccagactgctgcacggcaccctgatcatgaaggacagcaacttcagactggtgagcagcgagcaggccctgaaggagctgggcctggccgagcaccagctgagattcacctgcagagtgcacctgcacgacaccagaaaggagcaggagaccgccctgagagtgtacagccacctgaagagcgtgctgaaggaccactgcgtgcagcacctgcccgacggcagcgtgaccgtggagagcgtgctgctgcaggccgccgcccccagcgaggaccccggcaccaaggtgctgctggtgagctggacctaccaggacgaggagctgggcagcttcctgaccagcctgctgaagaagggcctgccccaggcccccagctag

SEQ ID NO: 12220 - DNA, 774 bp, synthetic construct
  source 1..774: mol_type = other DNA; note = Synthetic coding sequence
atgctggagtacgccctgaagcaggagagagccaagtaccacaagctgaagttcggcaccgacctgaaccagggcgagaagaaggccgacgtgagcgagcaggtgagcaacggccccgtggagagcgtgaccctggagaacagccccctggtgtggaaggagggcagacagctgctgagacagtacctggaggaggtgggctacaccgacaccatcctggacatgagaagcaagagagtgagaagcctgctgggcagaagcctggagctgaacggcgccgtggagcccagcgagggcgcccccagagccccccccggccccgccggcctgagcggcggcgagagcctgctggtgaagcagatcgaggagcagatcaagagaaacgccgccggcaaggacggcaaggagagactgggcggcagcgtgctgggccagatccccttcctgcagaactgcgaggacgaggacagcgacgaggacgacgagctggacagcgtgcagcacaagaagcagagagtgaagctgcccagcaaggccctggtgcccgagatggaggacgaggacgaggaggacgacagcgaggacgccatcaacgagttcgacttcctgggcagcggcgaggacggcgagggcgcccccgaccccagaagatgcaccgtggacggcagcccccacgagctgggccccgagctgcacagccccaccgagtggcagggcgccctgagcgtgggcaaggccagccccatgcccgactgggtgggcaccgccggctag

SEQ ID NO: 12221 - DNA, 381 bp, synthetic construct
  source 1..381: mol_type = other DNA; note = Synthetic coding sequence
atgcccggcgtgaagctgaccacccaggcctactgcaagatggtgctgcacggcgccaagtacccccactgcgccgtgaacggcctgctggtggccgagaagcagaagcccagaaaggagcacctgcccctgggcggccccggcgcccaccacaccctgttcgtggactgcatccccctgttccacggcaccctggccctggcccccatgctggaggtggccctgaccctgatcgacagctggtgcaaggaccacagctacgtgatcgccggctactaccaggccaacgagagagtgaaggacgccagccccaaccaggtggccgagaaggtggccagcagaatcgccgagggcttcagcgacaccgccctgatcatgtag

SEQ ID NO: 12222 - DNA, 450 bp, synthetic construct
  source 1..450: mol_type = other DNA; note = Synthetic coding sequence
gtgagagagctggaggccgagctggacgccgagcagaagaagcacgccgaggccctgaagggcgtgagaaagcacgagagaagagtgaaggagctggcctaccaggtgggcgacagagtgagcctgggcagcggccccggcgccggccccgcccaggccagccccgagagccccctgcccgcccaggccgaggaggacagaaagaacctggccagaatgcaggacctggtggacaagctgcagagcaaggtgaagagctacaagagacagttcgaggaggccgagcagcaggccaacaccaacctggccaagtacagaaaggcccagcacgagctggacgacgccgaggagagagccgacatggccgagacccaggccaacaagctgagagccagaaccagagacgccctgggccccaagctgagcctgagcccccagcacaaggagtag

SEQ ID NO: 12223 - DNA, 2349 bp, synthetic construct; identical to SEQ ID NO: 9570
  source 1..2349: mol_type = other DNA; note = Synthetic coding sequence

SEQ ID NO: 12224 - DNA, 495 bp, synthetic construct
  source 1..495: mol_type = other DNA; note = Synthetic coding sequence
atgatgagcgaggtggaggaggccatgcagtgcgtggaggagctgaacgcccagggcctgctgcacgtgttcgtgagagtgggcgtggagagcaccctggagagaagccagatcaccagagaccacatgggccagctgctgtaccagctggtgcagagcgagaagctgagcaagcaggacttcttcaagggcttcagcgagaccctggagctggccgacgacatggccatcgacatcccccacatctggctgtacctggccgagctggtgacccccatgctgaaggagggcggcatcagcatgagagagctgaccatcgagttcagcaagcccctgctgcccgtgggcagagccggcgtgctgctgagcgagatcctgcacctgctgtgcaagcagatgagccacaagaaggtgggcgccctgtggagagaggccgacctgagctggaaggacttcctgcccgagggcgaggacgtgcacaacttcctgctgtag

SEQ ID NO: 12225 - DNA, 369 bp, synthetic construct; identical to SEQ ID NO: 12080
  source 1..369: mol_type = other DNA; note = Synthetic coding sequence

SEQ ID NO: 12226 - DNA, 3345 bp, synthetic construct
  source 1..3345: mol_type = other DNA; note = Synthetic coding sequence
atggcctgcagaagaagatacttcgtggagggcgaggcccccagcagcgagaccggcaccagcctggacagccccagcgcctacccccagggccccctggtgcccggcagcagcctgagccccgaccactacgagcacaccagcgtgggcgcctacggcctgtacagcggcccccccggccagcagcagagaaccagaagacccaagctgcagcacagcaccagcatcctgagaaagcaggccgaggaggaggccatcaagagaagcagaagcctgagcgagagctacgagctgagcagcgacctgcaggacaagcaggtggagatgctggagagaaagtacggcggcagactggtgaccagacacgccgccagaaccatccagaccgccttcagacagtaccagatgaacaagaacttcgagagactgagaagcagcatgagcgagaacagaatgagcagaagaatcgtgctgagcaacatgagaatgcagttcagcttcgagggccccgagaaggtgcacagcagctacttcgagggcaagcaggtgagcgtgaccaacgacggcagccagctgggcgccctggtgagccccgagtgcggcgacctgagcgagcccaccaccctgaagagccccgcccccagcagcgacttcgccgacgccatcaccgagctggaggacgccttcagcagacaggtgaagagcctggccgagagcatcgacgacgccctgaactgcagaagcctgcacaccgaggaggcccccgccctggacgccgccagagccagagacaccgagccccagaccgccctgcacggcatggaccacagaaagctggacgagatgaccgccagctacagcgacgtgaccctgtacatcgacgaggaggagctgagcccccccctgcccctgagccaggccggcgacagacccagcagcaccgagagcgacctgagactgagagccggcggcgccgcccccgactactgggccctggcccacaaggaggacaaggccgacaccgacaccagctgcagaagcacccccagcctggagagacaggagcagagactgagagtggagcacctgcccctgctgaccatcgagccccccagcgacagcagcgtggacctgagcgacagaagcgagagaggcagcctgaagagacagagcgcctacgagagaagcctgggcggccagcagggcagccccaagcacggcccccacagcggcgcccccaagagcctgcccagagaggagcccgagctgagacccagaccccccagacccctggacagccacctggccatcaacggcagcgccaacagacagagcaagagcgagagcgactacagcgacggcgacaacgacagcatcaacagcaccagcaacagcaacgacaccatcaactgcagcagcgagagcagcagcagagacagcctgagagagcagaccctgagcaagcagacctaccacaaggaggccagaaacagctgggacagccccgccttcagcaacgacgtgatcagaaagagacactacagaatcggcctgaacctgttcaacaagaagcccgagaagggcgtgcagtacctgatcgagagaggcttcgtgcccgacacccccgtgggcgtggcccacttcctgctgcagagaaagggcctgagcagacagatgatcggcgagttcctgggcaacagacagaagcagttcaacagagacgtgctggactgcgtggtggacgagatggacttcagcaccatggagctggacgaggccctgagaaagttccaggcccacatcagagtgcagggcgaggcccagaaggtggagagactgatcgaggccttcagccagagatactgcatctgcaaccccggcgtggtgagacagttcagaaaccccgacaccatcttcatcctggccttcgccatcatcctgctgaacaccgacatgtacagccccaacgtgaagcccgagagaaagatgaagctggaggacttcatcaagaacctgagaggcgtggacgacggcgaggacatccccagagagatgctgatgggcatctacgagagaatcagaaagagagagctgaagaccaacgaggaccacgtgagccaggtgcagaaggtggagaagctgatcgtgggcaagaagcccatcggcagcctgcaccccggcctgggctgcgtgctgagcctgccccacagaagactggtgtgctactgcagactgttcgaggtgcccgaccccaacaagccccagaagctgggcctgcaccagagagagatcttcctgttcaacgacctgctggtggtgaccaagatcttccagaagaagaagaacagcgtgacctacagcttcagacagagcttcagcctgtacggcatgcaggtgctgctgttcgagaaccagtactaccccaacggcatcagactgaccagcagcgtgcccggcgccgacatcaaggtgctgatcaacttcaacgcccccaacccccaggacagaaagaagttcaccgacgacctgagagagagcatcgccgaggtgcaggagatggagaagcacagaatcgagagcgagctggagaagcagaagggcgtggtgagacccagcatgagccagtgcagcagcctgaagaaggagagcggcaacggcaccctgagcagagcctgcctggacgacagctacgccagcggcgagggcctgaagagaagcgccctgagcagcagcctgagagacctgagcgaggccggcaagagaggcagaagaagcagcgccggcagcctggagagcaacgtggagggcagcatcatcagcagcccccacatgagaagaagagccaccagcaccagagagtgccccagcagaccccaccagaccatgcccaacagcagcagcctgctgggcagcctgttcggcagcaagagaggcaagccccccccccaggcccacctgcccagcgcccccgccctgccccccccccacccccccgtggtgctgccccacctgcagcacagcgtggccggccaccacctgggcccccccgagggcctgccccaggccgccatgcacggccaccacacccagtactgccacatgcagaacccccccccctaccaccaccaccaccaccaccaccccccccagcacatccagcacgcccaccagtaccaccacggcccccacggcggccaccccgcctacggcgcccacgcccacggccacccccccctgcccagcgcccacgtgggccacaccgtgcaccaccacggccagccccccgccccccccccccccaccagcagcaaggccaagcccagcggcatcagcaccatcgtgtag

SEQ ID NO: 12227 - DNA, 903 bp, synthetic construct
  source 1..903: mol_type = other DNA; note = Synthetic coding sequence
atggccgaggaggtgagcaccctgatgaaggccaccgtgctgatgagacagcccggcagagtgcaggagatcgtgggcgccctgagaaagggcggcggcgacagactgcaggtgatcagcgacttcgacatgaccctgagcagattcgcctacaacggcaagagatgccccagcagctacaacatcctggacaacagcaagatcatcagcgaggagtgcagaaaggagctgaccgccctgctgcaccactactaccccatcgagatcgacccccacagaaccgtgaaggagaagctgccccacatggtggagtggtggaccaaggcccacaacctgctgtgccagcagaagatccagaagttccagatcgcccaggtggtgagagagagcaacgccatgctgagagagggctacaagaccttcttcaacaccctgtaccacaacaacatccccctgttcatcttcagcgccggcatcggcgacatcctggaggagatcatcagacagatgaaggtgttccaccccaacatccacatcgtgagcaactacatggacttcaacgaggacggcttcctgcagggcttcaagggccagctgatccacacctacaacaagaacagcagcgcctgcgagaacagcggctacttccagcagctggagggcaagaccaacgtgatcctgctgggcgacagcatcggcgacctgaccatggccgacggcgtgcccggcgtgcagaacatcctgaagatcggcttcctgaacgacaaggtggaggagagaagagagagatacatggacagctacgacatcgtgctggagaaggacgagaccctggacgtggtgaacggcctgctgcagcacatcctgtgccagggcgtgcagctggagatgcagggcccctag

SEQ ID NO: 12228 - DNA, 834 bp, synthetic construct
  source 1..834: mol_type = other DNA; note = Synthetic coding sequence
atgttccccggcgccaccacccccctgcccaaggccgccgcctaccccggcgtgtacggcagcaacggcagaaccccccagcccgcctacctgagcgaggccatgaagctgacccagagcgagcaggcccacctgagcctggagctgcagagagacagccacatgaagcagctgctgctgatccaggagagatggaagagagcccagagagaggagagactgaaggcccagcagaacaccgacaaggacgccgccgcccacctgcagaccagccacaagcccagcgccgaggacgccgagggccagagccccctgagccagaagtacagccccagcaccgagaagtgcctgcccgagatccagggcatcttcgacagagaccccgacaccctgctgtacctgctgcagcagaagagcgagcccgccgagccctgcatcggcagcaaggcccccaaggacgacaagaccatcatcgaggagcaggccaccaagatcgccgacctgaagagacacgtggagttcctggtggccgagaacgagagactgagaaaggagaacaagcagctgaaggccgagaaggccagactgctgaagggccccatcgagaaggagctggacgtggacgccgacttcgtggagaccagcgagctgtggagcctgcccccccacgccgagaccgccaccgccagcagcacctggcagaagttcgccgccaacaccggcaaggccaaggacatccccatccccaacctgccccccctggacttccccagccccgagctgcccctgatggagctgagcgaggacatcctgaagggcttcatgaacaactag

SEQ ID NO: 12229 - DNA, 138 bp, synthetic construct
  source 1..138: mol_type = other DNA; note = Synthetic coding sequence
atgagcccccagaagagagtgaagaacgtgcaggcccagaacagaaccagccagggcagcagcagcttccagaccaccctgagcgcctggaaggtgaagcaggaccccagcaacagcaagaacatcagcaagcactag

SEQ ID NO: 12230 - DNA, 819 bp, synthetic construct
  source 1..819: mol_type = other DNA; note = Synthetic coding sequence
atgcccggcgaccacagaagaatcagaggccccgaggagagccagcccccccagctgtacgccgccgacgaggaggaggcccccggcaccagagaccccaccagactgagacccgtgtacgccagagccggcctgctgagccaggccaagggcagcgcctacctggaggccggcggcaccaaggtgctgtgcgccgtgagcggccccagacaggccgagggcggcgagagaggcggcggccccgccggcgccggcggcgaggcccccgccgccctgagaggcagactgctgtgcgacttcagaagagcccccttcgccggcagaagaagaagagccccccccggcggctgcgaggagagagagctggccctggccctgcaggaggccctggagcccgccgtgagactgggcagataccccagagcccagctggaggtgagcgccctgctgctggaggacggcggcagcgccctggccgccgccctgaccgccgccgccctggccctggccgacgccggcgtggagatgtacgacctggtggtgggctgcggcctgagcctggcccccggccccgcccccacctggctgctggaccccaccagactggaggaggagagagccgccgccggcctgaccgtggccctgatgcccgtgctgaaccaggtggccggcctgctgggcagcggcgagggcggcctgaccgagagctgggccgaggccgtgagactgggcctggagggctgccagagactgtaccccgtgctgcagcagagcctggtgagagccgccagaagaagaggcgccgccgcccagccctag

SEQ ID NO: 12231 - DNA, 429 bp, synthetic construct
  source 1..429: mol_type = other DNA; note = Synthetic coding sequence
atggccagcggcaacgccagaatcggcaagcccgcccccgacttcaaggccaccgccgtggtggacggcgccttcaaggaggtgaagctgagcgactacaagggcaagtacgtggtgctgttcttctaccccctggacttcaccttcgtgtgccccaccgagatcatcgccttcagcaacagagccgaggacttcagaaagctgggctgcgaggtgctgggcgtgagcgtggacagccagttcacccacctggcctggtacgagcagggccccaagagagaggtggccgccaagctgacccccagcggccccagcagcgtggccagctggcccctgctgaacctgtggaacctgagattccccatcgtgaagatcatggagaccctgccccccaagagcctgagaatgatgaccgtgatcagcatctag

SEQ ID NO: 12232 - DNA, 1137 bp, synthetic construct; identical to SEQ ID NO: 11303
  source 1..1137: mol_type = other DNA; note = Synthetic coding sequence

SEQ ID NO: 12233 - DNA, 324 bp, synthetic construct
  source 1..324: mol_type = other DNA; note = Synthetic coding sequence
tgaatccacgagcagtgggagaaggccaacgtgagcagcccccacagagagttcccccccgccaccgccagagaggtggaccccctgagaatccccccccaccacccccacaccagcagacagcccccctggcccagaagaggcggcatgatcgtggaccccctgagaagcggcttccccagagccctgatcgaccccagcagcggcctgcccaacagactgccccccggcgccgtgccccccggcgccagattcgaccccttcggccccatcggcaccagcccccccggccccaaccccgaccacctgcccccccccggctag

SEQ ID NO: 12234 - DNA, 201 bp, synthetic construct
  source 1..201: mol_type = other DNA; note = Synthetic coding sequence
atggccgccgccaccggcgaccccggcctgagcaagctgcagttcgcccccttcagcagcgccctggacgtgggcttctggcacgagctgacccagaagaagctgaacgagtacagactggacgaggcccccaaggacatcaagggctactactacaacggcgacagcgccggcctgcccgccagactgaccctggagtag

SEQ ID NO: 12235 - DNA, 2115 bp, synthetic construct
  source 1..2115: mol_type = other DNA; note = Synthetic coding sequence
atgctgcccaccgccagcagcaagagaagaaccttcgccgccagatacttcaccagaagcaagagcctggtgatgggcgagcagagcagaagccccggcagaatgccctgcccccacagactgggccccgtgctgaaggccggctggctgaagaagcagagaagcatcatgaagaactggcagcagagatggttcgtgctgagaggcgaccagctgttctactacaaggacaaggacgagatcaagccccagggcttcatcagcctgcagggcacccaggtgaccgagctgccccccggccccgaggaccccggcaagcacctgttcgagatcagccccggcggcgccggcgagagagagaaggtgcccgccaaccccgaggccctgctgctgatggccagcagccagagagacatggaggactgggtgcaggccatcagaagagtgatctgggcccccctgggcggcggcatcttcggccagagactggaggagaccgtgcaccacgagagaaagtacggccccagactggcccccctgctggtggagcagtgcgtggacttcatcagagagagaggcctgaccgaggagggcctgttcagaatgcccggccaggccaacctggtgagagacctgcaggacagcttcgactgcggcgagaagcccctgttcgacagcaccaccgacgtgcacaccgtggccagcctgctgaagctgtacctgagagagctgcccgagcccgtggtgcccttcgccagatacgaggacttcctgagctgcgcccagctgctgaccaaggacgagggcgagggcaccctggagctggccaagcaggtgagcaacctgccccaggccaactacaacctgctgagatacatctgcaagttcctggacgaggtgcaggcctacagcaacgtgaacaagatgagcgtgcagaacctggccaccgtgttcggccccaacatcctgagaccccaggtggaggaccccgtgaccatcatggagggcaccagcctggtgcagcacctgatgaccgtgctgatcagaaagcacagccagctgttcaccgcccccgtgcccgagggccccaccagccccagaggcggcctgcagtgcgccgtgggctggggcagcgaggaggtgaccagagacagccagggcgagcccggcggccccggcctgcccgcccacagaaccagcagcctggacggcgccgccgtggccgtgctgagcagaaccgcccccaccggccccggcagcagatgcagccccggcaagaaggtgcagaccctgcccagctggaagagcagcttcagacagcccagaagcctgagcggcagccccaagggcggcggcagcagcctggaggtgcccatcatcagcagcggcggcaactggctgatgaacggcctgagcagcctgagaggccacagaagagccagcagcggcgacagactgaaggacagcggcagcgtgcagagactgagcacctacgacaacgtgcccgcccccggcctggtgcccggcatccccagcgtggccagcatggcctggagcggcgccagcagcagcgagagcagcgtgggcggcagcctgagcagctgcaccgcctgcagagccagcgacagcagcgccagaagcagcctgcacaccgactgggccctggagcccagccccctgcccagcagcagcgaggaccccaagagcctggacctggaccacagcatggacgaggccggcgccggcgccagcaacagcgagcccagcgagcccgacagccccaccagagagcacgccagaagaagcgaggccctgcagggcctggtgaccgagctgagagccgagctgtgcagacagagaaccgagtacgagagaagcgtgaagagaatcgaggagggcagcgccgacctgagaaagagaatgagcagactggaggaggagctggaccaggagaagaagaagtacatcatgctggagatcaagctgagaaacagcgagagagccagagaggacgccgagagaagaaaccagctgctgcagagagagatggaggagttcttcagcaccctgggcagcctgaccgtgggcgccaagggcgccagagcccccaagtag

SEQ ID NO: 12236 - DNA, 630 bp, synthetic construct
  source 1..630: mol_type = other DNA; note = Synthetic coding sequence
atgatcagcaactacagaaacggcagcgagctggtgtgcttcaacagcggcgtgggctgcttcctgatcggctgcgactgggccttcaccgtgctggtgaacaccttcttcagcttcctgagaagaaagaccgacttcttcatcggcggcgaggagggcatggccgagaagctgatcacccagaccttcagccaccacaaccagctggcccagaagaccagaagagagaagagagccagacaggaggccgagagaagagagaaggccgagagagccgccagactggccaaggaggccaagagcgagaccagcggcccccagatcaaggagctgaccgacgaggaggccgagagactgcagctggagatcgaccagaagaaggacgccgagaaccacgaggcccagctgaagaacggcagcctggacagccccggcaagcaggacaccgaggaggacgaggaggaggacgagaaggacaagggcaagctgaagcccaacctgggcaacggcgccgacctgcccaactacagatggacccagaccctgagcgagctggacctggccgtgcccttctgcgtgaacttcagactgaagggcaaggacatggtggtggacatccagagaagatag

SEQ ID NO: 12237 - DNA, 309 bp, synthetic construct; identical to SEQ ID NO: 11999
  source 1..309: mol_type = other DNA; note = Synthetic coding sequence

SEQ ID NO: 12238 - DNA, 273 bp, synthetic construct
  source 1..273: mol_type = other DNA; note = Synthetic coding sequence
atggccatggcccccagccccagcctggtgcaggtgtacaccagccccgccgccgtggccgtgtgggagtggcaggacggcctgggcacctggcacccctacagcgccaccgtgtgcagcttcatcgagcagcagttcgtgcagcagaagggccagagattcggcctgggcagcctggcccacagcatccccctgggccaggccgaccccagcctggccccctacatcatcgacctgcccagctggacccagttcagacaggacaccggctag

SEQ ID NO: 12239 - DNA, 207 bp, synthetic construct
  source 1..207: mol_type = other DNA; note = Synthetic coding sequence
atggacgccaacagcaaggacaagccccccgagaccaaggagagcgccatgaacaacgccggcaacgccagcttcatcctgggcaccggcaagatcgtgaccccccagaagcacgccgagctgccccccaacccctgcacccccgacaccttcaagagccccctgaacttcagcaccgtgaccgtggagcagctgggcatcaactag

SEQ ID NO: 12240 - DNA, 879 bp, synthetic construct
  source 1..879: mol_type = other DNA; note = Synthetic coding sequence
atggacggcagcttcgtgcagcacagcgtgagagtgctgcaggagctgaacaagcagagagagaagggccagtactgcgacgccaccctggacgtgggcggcctggtgttcaaggcccactggagcgtgctggcctgctgcagccacttcttccagagcctgtacggcgacggcagcggcggcagcgtggtgctgcccgccggcttcgccgagatcttcggcctgctgctggacttcttctacaccggccacctggccctgaccagcggcaacagagaccaggtgctgctggccgccagagagctgagagtgcccgaggccgtggagctgtgccagagcttcaagcccaagaccagcgtgggccaggccgccggcggccagagcggcctgggcccccccgccagccagaacgtgaacagccacgtgaaggagcccgccggcctggaggaggaggaggtgagcagaaccctgggcctggtgcccagagaccaggagcccagaggcagccacagcccccagagaccccagctgcacagccccgcccagagcgagggccccagcagcctgtgcggcaagctgaagcaggccctgaagccctgccccctggaggacaagaagcccgaggactgcaaggtgccccccagacccctggaggccgagggcgcccagctgcagggcggcagcaacgagtgggaggtggtggtgcaggtggaggacgacggcgacggcgactacatgagcgagcccgaggccgtgctgaccagaagaaagagcaacgtgatcagaaagccctgcgccgccgagcccgccctgagcgccggcagcctggccgccgagcccgccgagaacagaaagggcaccgccgtgcccgtggagtag

SEQ ID NO: 12241 - DNA, 408 bp, synthetic construct; identical to SEQ ID NO: 11485
  source 1..408: mol_type = other DNA; note = Synthetic coding sequence

SEQ ID NO: 12242 - DNA, 810 bp, synthetic construct
  source 1..810: mol_type = other DNA; note = Synthetic coding sequence
atgaagacccccgtggagctggccgtgagcggcatgcagaccctgggcctgcagcacagatgcagaggcggctacagagtgaaggccagaaccagctacgtggacgagaccctgttcggcagccccgccggcaccagacccaccccccccgacttcgaccccccctgggtggagaaggccaacagaaccagaggcgtgggcaaggaggccagcaaggccctgggcgccaagggcagctgcgagaccacccccagcagaggcagcacccccaccctgacccccagaaagaagaacaagtacagacccatcagccacacccccagctactgcgacgagagcctgttcggcagcagaagcgagggcgccagcttcggcgcccccagaatggccaagggcgacgccgccaagctgagagccctgctgtggacccccccccccacccccagaggcagccacagccccagacccagagaggcccccctgagagccatccaccccgccggccccagcaagaccgagcccggccccgccgccgacagccagaagctgagcatgggcggcctgcacagcagcagacccctgaagagaggcctgagccacagcctgacccacctgaacgtgcccagcaccggccaccccgccaccagcgccccccacaccaacggcccccaggacctgagacccagcaccagcggcgtgaccttcagaagccccctggtgaccagcagagccagaagcgtgagcatcagcgtgcccagcacccccagaagaggcggcgccacccagaagcccaagcccccctggaagtag

SEQ ID NO: 12243 - DNA, 840 bp, synthetic construct
  source 1..840: mol_type = other DNA; note = Synthetic coding sequence
atggtggaccacctggccaacaccgagatcaacagccagagaatcgccgccgtggagagctgcttcggcgccagcggccagcccctggccctgcccggcagagtgctgctgggcgagggcgtgctgaccaaggagtgcagaaagaaggccaagcccagaatcttcttcctgttcaacgacatcctggtgtacggcagcatcgtgctgaacaagagaaagtacagaagccagcacatcatccccctggaggaggtgaccctggagctgctgcccgagaccctgcaggccaagaacagatggatgatcaagaccgccaagaagagcttcgtggtgagcgccgccagcgccaccgagagacaggagtggatcagccacatcgaggagtgcgtgagaagacagctgagagccaccggcagaccccccagcaccgagcacgccgccccctggatccccgacaaggccaccgacatctgcatgagatgcacccagaccagattcagcgccctgaccagaagacaccactgcagaaagtgcggcttcgtggtgtgcgccgagtgcagcagacagagattcctgctgcccagactgagccccaagcccgtgagagtgtgcagcctgtgctacagagagctggccgcccagcagagacaggaggaggccgaggagcagggcgccggcagccccggccagcccgcccacctggccagacccatctgcggcgccagcagcggcgacgacgacgacagcgacgaggacaaggagggcagcagagacggcgactggcccagcagcgtggagttctacgccagcggcgtggcctggagcgccttccacagctag

SEQ ID NO: 12244 - DNA, 279 bp, synthetic construct
  source 1..279: mol_type = other DNA; note = Synthetic coding sequence
tgaagaagcagcaccagcccctgcggcaccagcaagagccccaacagagagtgggagggcaagagcgtggcctacatgccctacgccgaggtgaagagagccctggagcaggaggcccagatgcacaacaccgccgccagaagcgccagcccctgcagactgagccccagagaggtgagcaaggccgccccccagcccgacatgagcgccgccagatacagcgtgccccccgtgctgcagcccgccccccaccaggtgatcaccaacctgcccgagtag

SEQ ID NO: 12245 - DNA, 771 bp, synthetic construct
  source 1..771: mol_type = other DNA; note = Synthetic coding sequence
atgagcaacaacctgagcgagctggacaccaagatccaggagaaggccatgaaggtggacatggacatctgcagaagaatcgacatcaccgccaagctgtgcgacgtggcccagcagagaaactgcgaggacatgatccagatgttccagaagaagctggtgcccagcatgggcggcagaaagagagagagaaaggccgccgtggaggaggacaccagcctgagcgagagcgagggccccagacagcccgacggcgacgaggaggagagcaccgccctgagcatcaacgaggagatgcagagaatgctgaaccagctgagagagtacgacttcgaggacgactgcgacagcctgacctgggaggagaccgaggagaccctgctgctgtgggaggacttcagcggctacgccatggccgccgccgaggcccagggcgagcagcaggaggacagcctggagaaggtgatcaaggacaccgagagcctgttcaagaccagagagaaggagtaccaggagaccatcgaccagatcgagctggagctggccaccgccaagaacgacatgaacagacacctgcacgagtacatggagatgtgcagcatgaagagaggcctggacgtgcagatggagacctgcagaagactgatcacccagagcggcgacagaaagagccccgccttcaccgccgtgcccctgagcgaccccccccccccccccagcgaggccgaggacagcgacagagacgtgagcagcgacagcagcatgagatag

SEQ ID NO: 12246 - DNA, 1620 bp, synthetic construct; identical to SEQ ID NO: 10018
  source 1..1620: mol_type = other DNA; note = Synthetic coding sequence

SEQ ID NO: 12247 - DNA, 750 bp, synthetic construct
  source 1..750: mol_type = other DNA; note = Synthetic coding sequence
atggccttcatgaccagaaagctgtgggacctggagcagcaggtgaaggcccagaccgacgagatcctgagcaaggaccagaagatcgccgccctggaggacctggtgcagaccctgagaccccaccccgccgaggccaccctgcagagacaggaggagctggagaccatgtgcgtgcagctgcagagacaggtgagagagatggagagattcctgagcgactacggcctgcagtgggtgggcgagcccatggaccaggaggacagcgagagcaagaccgtgagcgagcacggcgagagagactggatgaccgccaagaagttctggaagcccggcgacagcctggccccccccgaggtggacttcgacagactgctggccagcctgcaggacctgagcgagctggtggtggagggcgacacccaggtgacccccgtgcccggcggcgccagactgagaaccctggagcccatccccctgaagctgtacagaaacggcatcatgatgttcgacggccccttccagcccttctacgaccccagcacccagagatgcctgagagacatcctggacggcttcttccccagcgagctgcagagactgtaccccaacggcgtgcccttcaaggtgatcagctgcagcagcaaccacaccttcggcgacttcgagggcagcggcgacacccagcccccccagaccccccccatcctgagaggcagcagatgcaccccctggggcacccccgtgtag

SEQ ID NO: 12248 - DNA, 2763 bp, synthetic construct
  source 1..2763: mol_type = other DNA; note = Synthetic coding sequence
atgagcgaggacagcgagaaggaggactacagcgacagaaccatcagcgacgaggacgagagcgacgaggacatgttcatgaagttcgtgagcgaggacctgcacagatgcgccctgctgaccgccgacagcttcggcgaccccttcttccccagaaccacccagatcctgctggagtaccagctgggcagatgggtgcccagactgagagagcccagagacctgtacggcgtgagcagcagcggccccctgagccccaccagatggccctaccactgcgaggtgatcgacgagaaggtgcagcacatcgactggacccccagctgccccgagcccgtgtacatccccaccggcctggagaccgagcccctgtaccccgacagcaaggaggccaccgtggtgtacctggccgaggacgcctacaaggagccctgcttcgtgtacagcagagtgggcggcaacagaacccccctgaagcagcccgtggactacagagacaacaccctgatgttcgaggccagattcgagagcggcaacctgcagaaggtggtgaaggtggccgagtacgagtaccagctgaccgtgagacccgacctgttcaccaacaagcacacccagtggtactacttccaggtgaccaacatgagagccggcatcgtgtacagattcaccatcgtgaacttcaccaagcccgccagcctgtacagcagaggcatgagacccctgttctacagcgagaaggaggccaaggcccaccacatcggctggcagagaatcggcgaccagatcaagtactacagaaacaaccccggccaggacggcagacactacttcagcctgacctggaccttccagttcccccacaacaaggacacctgctacttcgcccactgctacccctacacctacaccaacctgcaggagtacctgagcggcatcaacaacgaccccgtgagaagcaagttctgcaagatcagagtgctgtgccacaccctggccagaaacatggtgtacatcctgaccatcaccacccccctgaagaacagcgacagcagaaagagaaaggccgtgatcctgaccgccagagtgcaccccggcgagaccaacagcagctggatcatgaagggcttcctggactacatcctgggcaacagcagcgacgcccagctgctgagagacaccttcgtgttcaaggtggtgcccatgctgaaccccgacggcgtgatcgtgggcaactacagatgcagcctggccggcagagacctgaacagaaactacaccagcctgctgaaggagagcttccccagcgtgtggtacaccagaaacatggtgcacagactgatggagaagagagaggtgatcctgtactgcgacctgcacggccacagcagaaaggagaacatcttcatgtacggctgcgacggcagcgacagaagcaagaccctgtacctgcagcagagaatcttccccctgatgctgagcaagaactgccccgacaagttcagcttcagcgcctgcaagttcaacgtgcagaagagcaaggagggcaccggcagagtggtgatgtggaagatgggcatcagaaacagcttcaccatggaggccaccttctgcggcagcaccctgggcaacaagagaggcacccacttcagcaccaaggacctggagagcatgggctaccacttctgcgacagcctgctggactactgcgaccccgacagaaccaagtactacagatgcctgaaggagctggaggagatggagagacacatcaccctggagaaggtgttcgaggacagcgacacccccgtgatcgacatcaccctggacgtggagagcagcagcagaggcagcgacagcagcgagagcatcgacagcctgacctacctgctgaagctgaccagccagaagaagcacctgaagaccaagaaggagagaaacagcaccatcgccagccaccagaacgccagaggccaggaggtgtacgacagaggccacctgctgcagagacacacccagagcaacagcgacgtgaaggacaccagacccaacgagcccgacgactacatggtggactacttcagaagacagctgcccaaccagggcctggacctgcaccacaacctgaagagcaagatcaaggagtgcatcagcttccagagcaagaagaccggcatcaactggaccgacgacgagaagagaagctacaaggacaagggcatcgtgcagacccaggagatcctgcagtacctgctgcccatcgtgcacagcaccaagaacatgcagaccacccagatcaagcagctgttcaaccccagaaccaacttccagatccagcaccagctgaaccccgccacctgcagaaacatcaagaagtacagcaccagctggaccgcccccagaaaccaccccttcgtgatccagggcgacgtgatggccaacagcagcgagtgggtgcagagcaagccccacagaagcctggagagcctgagccccctgaagggccccaagaagaacaagcacagccagatctgggccatcaagaacgaggacatcaagcccctgagcagcaagtgggagaccgccagcagcagcttcggcatggacgccaacgtgctgaagtacaagagcctgcaggccgaggagaccaaccagcagagcagcaagcacaccgccctgcacctgaccaagaacaaggacgagcaggccaacaagaacgacggccagcccaccctgtacctgaagttccagagagagagctag

SEQ ID NO: 12249 - DNA, 858 bp, synthetic construct
  source 1..858: mol_type = other DNA; note = Synthetic coding sequence
atgaccaacgcccagatcatcctgctgatcgacaacgccagaatggccgtggacgacttcaacctgaagtacgagaacgagcacagcttcaagaaggacctggagatcgaggtggagggcctgagaagaaccctggacaacctgaccatcgtgaccaccgacctggagcaggaggtggagggcatgagaaaggagctgatcctgatgaagaagcaccacgagcaggagatggagaagcaccacgtgcccagcgacttcaacgtgaacgtgaaggtggacaccggccccagagaggacctgatcaaggtgctggaggacatgagacaggagtacgagctgatcatcaagaagaagcacagagacctggacacctggtacaaggagcagagcgccgccatgagccaggaggccgccagccccgccaccgtgcagagcagacagggcgacatccacgagctgaagagaaccttccaggccctggagatcgacctgcagacccagtacagcaccaagagcgccctggagaacatgctgagcgagacccagagcagatacagctgcaagctgcaggacatgcaggagatcatcagccactacgaggaggagctgacccagctgagacacgagctggagagacagaacaacgagtaccaggtgctgctgggcatcaagacccacctggagaaggagatcaccacctacagaagactgctggagggcgagagcgagggcaccagagaggagagcaagagcagcatgaaggtgagcgccacccccaagatcaaggccatcacccaggagaccatcaacggcagactggtgctgtgccaggtgaacgagatccagaagcacgcctag

SEQ ID NO: 12250 - DNA, 2013 bp, synthetic construct
  source 1..2013: mol_type = other DNA; note = Synthetic coding sequence
atgagcccctgcagcggcggcagaggcgagctgagagccgcctgcctgcagcccgaggtgcccggcgcccccggcctgagctggtggcccagcaccgccggcctgagacagagccagaccgacctgcagctgagcctgagcatctggtgcggcaagaagatgggcagctacctgagcgtgcccgcctacttcaccagcagagacctgttcagatgcagcgagtgccaggacagcctgaccaactggtactacgagaaggacggcaagctgtactgccccaaggactactggggcaagttcggcgagttctgccacggctgcagcctgctgatgaccggccccttcatggtggccggcgagttcaagtaccaccccgagtgcttcgcctgcatgagctgcaaggtgatcatcgaggacggcgacgcctacgccctggtgcagcacgccaccctgtactgcggcaagtgccacaacgaggtggtgctggcccccatgttcgagagactgagcaccgagagcgtgcaggagcagctgccctacagcgtgaccctgatcagcatgcccgccaccaccgagggcagaagaggcttcagcgtgagcgtggagagcgcctgcagcaactacgccaccaccgtgcaggtgaaggaggtgaacagaatgcacatcagccccaacaacagaaacgccatccaccccggcgacagaatcctggagatcaacggcacccccgtgagaaccctgagagtggaggaggtggaggacgccatcagccagaccagccagaccctgcagctgctgatcgagcacgaccccgtgagccagagactggaccagctgagactggaggccagactggccccccacatgcagaacgccggccacccccacgccctgagcaccctggacaccaaggagaacctggagggcaccctgagaagaagaagcctgagaagaagcaacagcatcagcaagagccccggccccagcagccccaaggagcccctgctgttcagcagagacatcagcagaagcgagagcctgagatgcagcagcagctacagccagcagatcttcagaccctgcgacctgatccacggcgaggtgctgggcaagggcttcttcggccaggccatcaaggtgacccacaaggccaccggcaaggtgatggtgatgaaggagctgatcagatgcgacgaggagacccagaagaccttcctgaccgaggtgaaggtgatgagaagcctggaccaccccaacgtgctgaagttcatcggcgtgctgtacaaggacaagaagctgaacctgctgaccgagtacatcgagggcggcaccctgaaggacttcctgagaagcatggaccccttcccctggcagcagaaggtgagattcgccaagggcatcgccagcggcatggcctacctgcacagcatgtgcatcatccacagagacctgaacagccacaactgcctgatcaagctggacaagaccgtggtggtggccgacttcggcctgagcagactgatcgtggaggagagaaagagagcccccatggagaaggccaccaccaagaagagaaccctgagaaagaacgacagaaagaagagatacaccgtggtgggcaacccctactggatggcccccgagatgctgaacggcaagagctacgacgagaccgtggacatcttcagcttcggcatcgtgctgtgcgagatcatcggccaggtgtacgccgaccccgactgcctgcccagaaccctggacttcggcctgaacgtgaagctgttctgggagaagttcgtgcccaccgactgcccccccgccttcttccccctggccgccatctgctgcagactggagcccgagagcagacccgccttcagcaagctggaggacagcttcgaggccctgagcctgtacctgggcgagctgggcatccccctgcccgccgagctggaggagctggaccacaccgtgagcatgcagtacggcctgaccagagacagccccccctag

SEQ ID NO: 12251 - DNA, 459 bp, synthetic construct
  source 1..459: mol_type = other DNA; note = Synthetic coding sequence
atggcccacctgagaggcttcgccaaccagcacagcagagtggaccccgaggagctgttcaccaagctggacagaatcggcaagggcagcttcggcgaggtgtacaagggcatcgacaaccacaccaaggaggtggtggccatcaagatcatcgacctggaggaggccgaggacgagatcgaggacatccagcaggagatcaccgtgctgagccagtgcgacagcccctacatcaccagatacttcggcagctacctgaagagcaccaagctgtggatcatcatggagtacctgggcggcggcagcgccctggacctgctgaagcccggccccctggaggagacctacatcgccaccatcctgagagagatcctgaagggcctggactacctgcacagcgagagaaagatccacagagacatcaaggccgccaacgtgctgctgagcgagcagggctag

SEQ ID NO: 12252 - DNA, 1365 bp, synthetic construct
  source 1..1365: mol_type = other DNA; note = Synthetic coding sequence
atggccccctgcagagccagaaccggccccagcacctggagaagcgccaccagcagcaccagaagaagaaagggcgccagaagacacctgagcgccctgcaggtgctggagacctgcgtgaagaactgcggccacagattccacgtgctggtggccagccaggacttcgtggagagcgtgctggtgagaaccatcctgcccaagaacaacccccccaccatcgtgcacgacaaggtgctgaacctgatccagagctgggccgacgccttcagaagcagccccgacctgaccggcgtggtgaccatctacgaggacctgagaagaaagggcctggagttccccatgaccgacctggacatgctgagccccatccacaccccccagagaaccgtgttcaacagcgagacccagagcggccaggacagcgtgggcaccgacagcagccagcaggaggacagcggccagcacgccgcccccctgcccgccccccccatcctgagcggcgacacccccatcgcccccacccccgagcagatcggcaagctgagaagcgagctggagatggtgagcggcaacgtgagagtgatgagcgagatgctgaccgagctggtgcccacccaggccgagcccgccgacctggagctgctgcaggagctgaacagaacctgcagagccatgcagcagagagtgctggagctgatcccccagatcgccaacgagcagctgaccgaggagctgctgatcgtgaacgacaacctgaacaacgtgttcctgagacacgagagattcgagagattcagaaccggccagaccaccaaggcccccagcgaggccgagcccgccgccgacctgatcgacatgggccccgaccccgccgccaccggcaacctgagcagccagctggccggcatgaacctgggcagcagcagcgtgagagccggcctgcagagcctggaggccagcggcagactggaggacgagttcgacatgttcgccctgaccagaggcagcagcctggccgaccagagaaaggaggtgaagtacgaggccccccaggccaccgacggcctggccggcgccctggacgccagacagcagagcaccggcgccatccccgtgacccaggcctgcctgatggaggacatcgagcagtggctgagcaccgacgtgggcaacgacgccgaggagcccaagggcgtgaccagcgaggagttcgacaagttcctggaggagagagccaaggccgccgacagactgcccaacctgagcagccccagcgccgagggcccccccggcccccccagcggccccgcccccagaaagaagacccaggagaaggacgacgacatgctgttcgccctgtag

SEQ ID NO: 12253 - DNA, 378 bp, synthetic construct
  source 1..378: mol_type = other DNA; note = Synthetic coding sequence
atgcagaccagcagcagcagaagcgtgcacctgagcgagtggcagaagaactacttcgccatcaccagcggcatctgcaccggccccaaggccgacgcctacagagcccagatcctgagaatccagtacgcctgggccaacagcgagatcagccaggtgtgcgccaccaagctgttcaagaagtacgccgagaagtacagcgccatcatcgacagcgacaacgtggagagcggcctgaacaactacgccgagaacatcctgaccctggccggcagccagcagaccgacagcgacaagtggcagagcggcctgagcatcaacaacgtgttcaagatgagcagcgtgcagaagatgatgcaggccggcaagaagttctag

SEQ ID NO: 12254 - DNA, 30 bp, synthetic construct
  source 1..30: mol_type = other DNA; note = Synthetic coding sequence
atgagccacctgcagagcctgctgctgtag

SEQ ID NO: 12255 - DNA, 270 bp, synthetic construct; identical to SEQ ID NO: 11466
  source 1..270: mol_type = other DNA; note = Synthetic coding sequence

SEQ ID NO: 12256 - DNA, 3732 bp, synthetic construct
  source 1..3732: mol_type = other DNA; note = Synthetic coding sequence
atgctgatcaaggagtaccacatcctgctgcccatgagcctggacgagtaccaggtggcccagctgtacatgatccagaagaagagcagagaggagagcagcggcgagggcagcggcgtggagatcctggccaacagaccctacaccgacggccccggcggcagcggccagtacacccacaaggtgtaccacgtgggcagccacatccccggctggttcagagccctgctgcccaaggccgccctgcaggtggaggaggagagctggaacgcctacccctacaccagaaccagatacacctgccccttcgtggagaagttcagcatcgagatcgagacctactacctgcccgacggcggccagcagcccaacgtgttcaacctgagcggcgccgagagaagacagagaatcctggacaccatcgacatcgtgagagacgccgtggcccccggcgagtacaaggccgaggaggaccccagactgtaccacagcgtgaagaccggcagaggccccctgagcgacgactgggccagaaccgccgcccagaccggccccctgatgtgcgcctacaagctgtgcaaggtggagttcagatactggggcatgcaggccaagatcgagcagttcatccacgacgtgggcctgagaagagtgatgctgagagcccacagacaggcctggtgctggcaggacgagtggaccgagctgagcatggccgacatcagagccctggaggaggagaccgccagaatgctggcccagagaatggccaagtgcaacaccggcagcgagggcagcgaggcccagccccccggcaagcccagcaccgaggccagaagcgccgccagcaacaccggcacccccgacggccccgaggccccccccggccccgacgccagccccgacgccagcttcggcaagcagtggagcagcagcagcagaagcagctacagcagccagcacggcggcgccgtgagcccccagagcctgagcgagtggagaatgcagaacatcgccagagacagcgagaacagcagcgaggaggagttcttcgacgcccacgagggcttcagcgacagcgaggaggtgttccccaaggagatgaccaagtggaacagcaacgacttcatcgacgccttcgccagccccgtggaggccgagggcacccccgagcccggcgccgaggccgccaagggcatcgaggacggcgcccaggcccccagagacagcgagggcctggacggcgccggcgagctgggcgccgaggcctgcgccgtgcacgccctgttcctgatcctgcacagcggcaacatcctggacagcggccccggcgacgccaacagcaagcaggccgacgtgcagaccctgagcagcgccttcgaggccgtgaccagaatccacttccccgaggccctgggccacgtggccctgagactggtgccctgcccccccatctgcgccgccgcctacgccctggtgagcaacctgagcccctacagccacgacggcgacagcctgagcagaagccaggaccacatccccctggccgccctgcccctgctggccaccagcagcagcagataccagggcgccgtggccaccgtgatcgccagaaccaaccaggcctacagcgccttcctgagaagccccgagggcgccggcttctgcggccaggtggccctgatcggcgacggcgtgggcggcatcctgggcttcgacgccctgtgccacagcgccaacgccggcaccggcagcagaggcagcagcagaagaggcagcatgaacaacgagctgctgagccccgagttcggccccgtgagagaccccctggccgacggcgtggagggcctgggcagaggcagccccgagcccagcgccctgcccccccagagaatccccagcgacatggccagccccgagcccgagggcagccagaacagcctgcaggccgcccccgccaccaccagcagctgggagcccagaagagccagcaccgccttctgcccccccgccgccagcagcgaggcccccgacggccccagcagcaccgccagactggacttcaaggtgagcggcttcttcctgttcggcagccccctgggcctggtgctggccctgagaaagaccgtgatgcccgccctggaggcccagatgagacccgcctgcgagcagatctacaacctgttccacgccgccgacccctgcgccagcagactggagcccctgctggcccccaagttccaggccatcgcccccctgaccgtgcccagataccagaagttccccctgggcgacggcagcagcctgctgctggccgacaccctgcagacccacagcagcctgttcctggaggagctggagatgctggtgcccagcacccccaccagcaccagcggcgccttctggaagggcagcgagctggccaccgacccccccgcccagcccgccgcccccagcaccaccagcgaggtggtgaagatcctggagagatggtggggcaccaagagaatcgactacagcctgtactgccccgaggccctgaccgccttccccaccgtgaccctgccccacctgttccacgccagctactgggagagcgccgacgtggtggccttcatcctgagacaggtgatcgagaaggagagaccccagctggccgagtgcgaggagcccagcatctacagccccgccttccccagagagaagtggcagagaaagagaacccaggtgaagatcagaaacgtgaccagcaaccacagagccagcgacaccgtggtgtgcgagggcagaccccaggtgctgagcggcagattcatgtacggccccctggacgtggtgaccctgaccggcgagaaggtggacgtgtacatcatgacccagcccctgagcggcaagtggatccacttcggcaccgaggtgaccaacagcagcggcagactgaccttccccgtgccccccgagagagccctgggcatcggcgtgtaccccgtgagaatggtggtgagaggcgaccacacctacgccgagtgctgcctgaccgtggtggccagaggcaccgaggccgtggtgttcagcatcgacggcagcttcaccgccagcgtgagcatcatgggcagcgaccccaaggtgagagccggcgccgtggacgtggtgagacactggcaggacagcggctacctgatcgtgtacgtgaccggcagacccgacatgcagaagcacagagtggtggcctggctgagccagcacaacttcccccacggcgtggtgagcttctgcgacggcctgacccacgaccccctgagacagaaggccatgttcctgcagagcctggtgcaggaggtggagctgaacatcgtggccggctacggcagccccaaggacgtggccgtgtacgccgccctgggcctgagccccagccagacctacatcgtgggcagagccgtgagaaagctgcaggcccagtgccagttcctgagcgacggctacgtggcccacctgggccagctggaggccggcagccacagccacgccagcagcggcccccccagagccgccctgggcaagagcagctacggcgtggccgcccccgtggacttcctgagaaagcagagccagctgctgagaagcagaggccccagccaggccgagagagagggccccggcaccccccccaccaccctggccagaggcaaggccagaagcatcagcctgaagctggacagcgaggagtag

SEQ ID NO: 12257 - DNA, 1614 bp, synthetic construct
  source 1..1614: mol_type = other DNA; note = Synthetic coding sequence
atgagcagcagcggctacccccccaaccagggcgccttcagcaccgagcagagcagataccccccccacagcgtgcagtacaccttccccaacaccagacaccagcaggagttcgccgtgcccgactacagaagcagccacctggaggtgagccaggccagccagctgctgcagcagcagcagcagcagcagctgagaagaagacccagcctgctgagcgagttccaccccggcagcgacagaccccaggagagaagaaccagctacgagcccttccaccccggccccagccccgtggaccacgacagcctggagagcaagagacccagactggagcaggtgagcgacagccacttccagagagtgagcgccgccgtgctgcccctggtgcaccccctgcccgagggcctgagagccagcgccgacgccaagaaggaccccgccttcggcggcaagcacgaggcccccagcagccccatcagcggccagccctgcggcgacgaccagaacgccagccccagcaagctgagcaaggaggagctgatccagagcatggacagagtggacagagagatcgccaaggtggagcagcagatcctgaagctgaagaagaagcagcagcagctggaggaggaggccgccaagccccccgagcccgagaagcccgtgagccccccccccgtggagcagaagcacagaagcatcgtgcagatcatctacgacgagaacagaaagaaggccgaggaggcccacaagatcttcgagggcctgggccccaaggtggagctgcccctgtacaaccagcccagcgacaccaaggtgtaccacgagaacatcaagaccggcgtgcccgccagaagaatgatgaagaaccaggtgatgagaaagaagctgatcctgttcttcaagagaagaaaccacgccagaaagcagagagagcagaagatctgccagagatacgaccagctgatggaggcctgggagaagaaggtggacagaatcgagaacaaccccagaagaaaggccaaggagagcaagaccagagagtactacgagaagcagttccccgagatcagaaagcagagagagcagcaggagagattccagagagtgggccagagaggcgccggcctgagcgccaccatcgccagaagcgagcacgagatcagcgagatcatcgacggcctgagcgagcaggagaacaacgagaagcagatgagacagctgagcgtgatcccccccatgatgttcgacgccgagcagagaagagtgaagttcatcaacatgaacggcctgatggaggaccccatgaaggtgtacaaggacagacagttcatgaacgtgtggaccgaccacgagaaggagatcttcaaggacaagttcatccagcaccccaagaacttcggcctgatcgccagctacctggagagaaagagcgtgcccgactgcgtgctgtactactacctgaccaagaagaacgagaactacaaggccctggtgagaagaaactacggcaagagaagaggcagaaaccagcagatcgccagacccagccaggaggagaaggtggaggagaaggaggaggacaaggccgagaagaccgagaagaagtag

SEQ ID NO: 12258 - DNA, 147 bp, synthetic construct
  source 1..147: mol_type = other DNA; note = Synthetic coding sequence
atggaggacctgttcgagaccttccaggacgagatgggcttcagcaacatggaggacgacggccccgaggaggaggagagagtggccgagccccaggccaacttcaacaccccccaggccctgagacagctgctgctgctgatgtag

SEQ ID NO: 12259 - DNA, 798 bp, synthetic construct
  source 1..798: mol_type = other DNA; note = Synthetic coding sequence
atggccagcagcagcgtgccccccgccaccgtgagcgccgccaccgccggccccggccccggcttcggcttcgccagcaagaccaagaagaagcacttcgtgcagcagaaggtgaaggtgttcagagccgccgaccccctggtgggcgtgttcctgtggggcgtggcccacagcatcaacgagctgagccaggtgcccccccccgtgatgctgctgcccgacgacttcaaggccagcagcaagatcaaggtgaacaaccacctgttccacagagagaacctgcccagccacttcaagttcaaggagtactgcccccaggtgttcagaaacctgagagacagattcggcatcgacgaccaggactacctggtgagcctgaccagaaacccccccagcgagagcgagggcagcgacggcagattcctgatcagctacgacagaaccctggtgatcaaggaggtgagcagcgaggacatcgccgacatgcacagcaacctgagcaactaccaccagtacatcgtgaagtgccacggcaacaccctgctgccccagttcctgggcatgtacagagtgagcgtggacaacgaggacagctacatgctggtgatgagaaacatgttcagccacagactgcccgtgcacagaaagtacgacctgaagggcagcctggtgagcagagagcccgccatcagaaagagactgaagaactgcccccccctgagaatctggaccttcagcaccagaaccagaaagtacatcctggtgaagagaagaagaaagtacttctggagaagctag

SEQ ID NO: 12260 - DNA, 462 bp, synthetic construct
  source 1..462: mol_type = other DNA; note = Synthetic coding sequence
atgagccccgaggtggccctgaacagaatcagccccatgctgagccccttcatcagcagcgtggtgagaaacggcaaggtgggcctggacgccaccaactgcctgagaatcaccgacctgaagagcggctgcaccagcctgacccccggccccaactgcgacagattcaagctgcacatcccctacgccggcgagaccctgaagtgggacatcatcttcaacgcccagtaccccgagctgccccccgacttcatcttcggcgaggacgccgagttcctgcccgaccccagcgccctgcagaacctggccagctggaaccccagcaaccccgagtgcctgctgctggtggtgaaggagctggtgcagcagtaccaccagttccagtgcagcagactgagagagagcagcagactgatgttcgagtaccagaccctgctggaggagccccagtacggcgagtag

SEQ ID NO: 12261 - DNA, 78 bp, synthetic construct
  source 1..78: mol_type = other DNA; note = Synthetic coding sequence
atggagctgagatgcggcggcctgctgttcagcagcagattcgacagcggcaacctggcccacgtggagaaggtgtag

SEQ ID NO: 12262 - DNA, 228 bp, synthetic construct
  source 1..228: mol_type = other DNA; note = Synthetic coding sequence
atggccagcgaggtgggccacaacctggagagccccgagacccccggcggcggcggctggaccagagtggagttccccccccccgcccccaagggcgccgccaccgtgtggtgcctgaacagactgggcagcagaaagctgagcctgatctggatcaccttcaacaccggctggaacatgaagagcagactgatcatcctgatccagcaggtgagctgccaccactag

SEQ ID NO: 12263 - DNA, 1620 bp, synthetic construct; identical to SEQ ID NO: 10018
  source 1..1620: mol_type = other DNA; note = Synthetic coding sequence

SEQ ID NO: 12264 - DNA, 390 bp, synthetic construct
  source 1..390: mol_type = other DNA; note = Synthetic coding sequence
atgcccggcctgagctgcagattctaccagcacaagttccccgaggtggaggacgtggtgatggtgaacgtgagaagcatcgccgagatgggcgcctacgtgagcctgctggagtacaacaacatcgagggcatgatcctgctgagcgagctgagcagaagaagaatcagaagcatcaacaagctgatcagaatcggcagaaacgagtgcgtggtggtgatcagagtggacaaggagaagggctacatcgacctgagcaagagaagactgaccctgtgggagaccgagagcaacctgagaaacaccgagcagagattcctggccgtgaaccccagactggagagcttccccgtgctgaagaccagcaagctgaacatcttctacttctag

SEQ ID NO: 12265 - DNA, 1842 bp, synthetic construct; identical to SEQ ID NO: 9548
  source 1..1842: mol_type = other DNA; note = Synthetic coding sequence

SEQ ID NO: 12266 - DNA, 1983 bp, synthetic construct
  source 1..1983: mol_type = other DNA; note = Synthetic coding sequence
atcgccaagccccagggcacctaccaggtgctgccccccaacaccggcagcctgtacatcgacaaggactgcagcgccgtgtactgccacgagagcagcagcaacatctactaccccttccagaagagagagcagctgagagccggcagatacatcatgagacacaccagcgaggtgatctgcgaggtgctggaccccgagggcaacaccttccaggtgatggccgacggcagcatcagcaccatcctgcccgagaagaagctggaggacgacctgaacgagaagaccgagggctacgacagcctgagcagcatgcacctggagaagaaccaccagcagatctacggcgagcacgtgcccagattcttcgtgatgtacgccgacggcagcggcatggagctgctgagagacagcgacatcgaggagtacctgagcctggcctacaaggagagcaacaccgtggtgctgcaggagcccgtgcaggagcagcccggcaccctgaccatcaccgtgctgagacccttccacgaggccagcccctggcaggtgaagaaggaggacaccatcgtgccccccaacctgagaagcagaagctgggagaccttccccagcgtggagaagaagacccccggcccccccttcggcacccagatctggaagggcctgtgcatcgagagcaagcagctggtgagcgcccccggcgccatcctgaagagccccagcgtgctgcagatgagacagttcatccagcacgaggtgatcaagaacgaggtgaagctgagactgcaggtgagcctgaaggactacatcaactacatcctgaagaaggaggacgagctgcaggagatgatggtgaaggacagcagaaccgaggaggagagaggcaacgccgccgacctgctgaagctggtgatgagcttccccaagatggaggagaccaccaagagccacgtgaccgaggtggccgcccacctgaccgacctgttcaagcagagcctggccaccccccccaagtgcccccccgacaccttcggcaaggacttcttcgagaagacctggagacacaccgccagcagcaagagatggaaggagaagatcgacaagaccagaaaggagatcgagaccacccagaactacctgatggacatcaagaacagaatcatcccccccttcttcaagagcgagctgaaccagctgtaccagagccagtacaaccacctggacagcctgagcaagaagctgcccagcttcaccaagaagaacgaggacgccaacgagaccgccgtgcaggacaccagcgacctgaacctggacttcaagccccacaaggtgagcgagcagaagagcagcagcgtgcccagcctgcccaagcccgagatcagcgccgacaagaaggacttcaccgcccagaaccagaccgagaacctgaccaagagccccgaggaggccgagagctacgagcccgtgaagatccccacccagagcctgctgcaggacgtggccggccagaccagaaaggagaaggtgaagctgccccactacctgctgagcagcaagcccaagagccagcccctggccaaggtgcaggacagcgtgggcggcaaggtgaacaccagcagcgtggccagcgccgccatcaacaacgccaagagcagcctgttcggcttccacctgctgcccagcagcgtgaagttcggcgtgctgaaggagggccacacctacgccaccgtggtgaagctgaagaacgtgggcgtggacttctgcagattcaaggtgaagcagcccccccccagcaccggcctgaaggtgacctacaagcccggccccgtggccgccggcatgcagaccgagctgaacatcgagctgttcgccaccgccgtgggcgaggacggcgccaagggcagcgcccacatcagccacaacatcgagatcatgaccgagcacgaggtgctgttcctgcccgtggaggccaacatcctgtag

SEQ ID NO: 12267 - DNA, 2475 bp, synthetic construct
  source 1..2475: mol_type = other DNA; note = Synthetic coding sequence
atgtacagcaacgaggacagcagacagaccatcgtgtacagcgaggagagcaacaccaccatgagctacacccagaagatcaccaaccccctgcccgccgccagcagcaccgaccccgcccccttcgccaacatcaacacccccgtgctgcaggaggactacagacaggacagccagaccagaagaatcagcaccctgaagctgacccacaaccaggacctgggcagcagcagccccatcagcaccccccagttcagcaagagcgtggaggtgcccagcttcctgaagagacccagaagcctgacccccaaccccgtgcccgagacccacaccgccagcctgagcatccagatcgcccccctgagcggccaggacctggagagccacaagcagctgcccgagctgagccccgagaccgccaagatccccctgcagcaggagagacagaagagcgccgtggccgccgccagccagagcagcgactgcagagtgagccagatcaccgtgaacggcaacagcggcggcgccgtgagccccatgagctactaccagagacccttcagccccagcgcctacagcctgcccgccagcctgaacagcagcatcgtgatgcagcacggcaccagcctggacagcaccgacacctacccccagcacgcccagagcctggacggcaccaccagcagcagcatccccctgtacagaagcagcgaggaggagaagagagtgaccgtgatcaaggccccccactaccccggcatcggccccgtggacgagagcggcatccccaccgccatcagaaccaccgtggacagacccaaggactggtacaagaccatgttcaagcagatccacatggtgcacaagcccgacgacgacaccgacatgtacaacaccccctacacctacaacgccggcctgtacaaccccccctacagcgcccagagccaccccgccgccaagacccagacctacagacccctgagcaagagccacagcgacaacagccccaacgccttcaaggacgccagcagccccgtgccccccccccacgtgcccccccccgtgccccccctgagacccagagacagaagcagcaccgagaagcacgactgggacccccccgacagaaaggtggacaccagaaagttcagaagcgagcccagaagcatcttcgagtacgagcccggcaagagcagcatcctgcagcacgagagacccccccccctgcccaccacccccacccccgtgcccagagagcccggcagaaagcccctgagcagcagcagactgggcgaggtgaccggcagccccagccccccccccagaagcggcgcccccacccccagcagcagagcccccgccctgagccccaccagaccccccaagaagcccctggactacgtgcaggaccacagcagcggcgtgttcaacgaggccagcctgtaccagagcagcatcgacagaagcctggagagacccatgagcagcgccagcatggccagcgacttcagaaagagaagaaagagcgagcccgccgtgggcccccccagaggcctgggcgaccagagcgccagcagaaccagccccggcagagtggacctgcccggcagcagcaccaccctgaccaagagcttcaccagcagcagccccagcagccccagcagagccaaggacagagagagccccagaagctacagcagcaccctgaccgacatgggcagaagcgcccccagagagagaagaggcacccccgagaaggagaagctgcccgccaaggccgtgtacgacttcaaggcccagaccagcaaggagctgagcttcaagaagggcgacaccgtgtacatcctgagaaagatcgaccagaactggtacgagggcgagcaccacggcagagtgggcatcttccccatcagctacgtggagaagctgaccccccccgagaaggcccagcccgccagaccccccccccccgcccagcccggcgagatcggcgaggccatcgccaagtacaacttcaacgccgacaccaacgtggagctgagcctgagaaagggcgacagagtgatcctgctgaagagagtggaccagaactggtacgagggcaagatccccggcaccaacagacagggcatcttccccgtgagctacgtggaggtggtgaagaagaacaccaagggcgccgaggactaccccgacccccccatcccccacagctacagcagcgacagaatccacagcctgagcagcaacaagccccagagacccgtgttcacccacgagaacatccagggcggcggcgagcccttccaggccctgtacaactacacccccagaaacgaggacgagctggagctgagagagagcgacgtgatcgacgtgatggagaagtgcgacgacggctggttcgtgggcaccagcagaagaaccaagttcttcggcaccttccccggcaactacgtgaagagactgtag

SEQ ID NO: 12268 - DNA, 228 bp, synthetic construct
  source 1..228: mol_type = other DNA; note = Synthetic coding sequence
atgagatactacggcagctactacagaggcctgggctacggctgcggcggcttcggcggcctgggctacggctgcggctgcggcggctacagatacggcagcggctacggcggctacagatacggctgctgcagacccagctgcagagagggctacggcttcagcggcttcaagaagctggccgacagccacaccctgacccccagaagctgcccctacgccagctag

SEQ ID NO: 12269 - DNA, 183 bp, synthetic construct
  source 1..183: mol_type = other DNA; note = Synthetic coding sequence
atggtgctgatcctgggcagaagactgaacagagaggacctgggcgtgagagacagccccgccaccaagagaaaggtgttcgagatggaccccaagagcctgaccggccacgagttcttcgacttcagcagcggcagcagccacgccgagaacatcctgcagatcttcaacgagttcagatag

SEQ ID NO: 12270 - DNA, 600 bp, synthetic construct
  source 1..600: mol_type = other DNA; note = Synthetic coding sequence
atgaagctgggcaagaagcccatgtacaagcccgtggacccctacagcagaatgcagagcacctacaactacaacatgagaggcggcgcctacccccccagatacttctaccccttccccgtgccccccctgctgtaccaggtggagctgagcgtgggcggccagcagttcaacggcaagggcaagaccagacaggccgccaagcacgacgccgccgccaaggccctgagaatcctgcagaacgagcccctgcccgagagactggaggtgaacggcagagagagcgaggaggagaacctgaacaagagcgagatcagccaggtgttcgagatcgccctgaagagaaacctgcccgtgaacttcgagagcttccccctgaagcaggtggccagagagagcggccccccccacatgaagaacttcgtgaccaaggtgagcgtgggcgagttcgtgggcgagggcgagggcaagagcaagaagatcagcaagaagaacgccgccatcgccgtgctggaggagctgaagaagctgccccccctgcccgccgtggagagagtgaagcccagaatcaagaagaagaccaagcccatcgtgaagtag

SEQ ID NO: 12271 - DNA, 2685 bp, synthetic construct
  source 1..2685: mol_type = other DNA; note = Synthetic coding sequence
atgcccgagcagttcagcgtggccgagttcctggccgtgaccgccgaggacctgagcagccccgccggcgccgccgccttcgccgccaagatgcccagatacagaggcgccgccctggccagagaggagatcctggagggcgaccaggccatcctgcagagaatcaagaaggccgtgagagccatccacagcagcggcctgggccacgtggagaacgaggagcagtacagagaggccgtggagagcctgggcaacagccacctgagccagaacagccacgagctgagcaccggcttcctgaacctggccgtgttcaccagagaggtggccgccctgttcaagaacctgatccagaacctgaacaacatcgtgagcttccccctggacagcctgatgaagggccagctgagagacggcagacaggccagcctgagcctgggcagcagagccaagctggagaaggagagagacagagccagagtgaccggcggcatccccggcgaggtggcccaggacatgcagagagagagaagaatcttccagctgcacatgtgcgagtacctgctgaaggccggcgagagccagatgaagcagggccccgacttcctgcagagcctgatcaagttcttccacgcccagcacaacttcttccaggacggctggaaggccgcccagagcctgttccccttcatcgagaagctggccgccagcgtgcacgccctgcaccaggcccaggaggacgagctgcagaagctgacccagctgagagacagcctgagaggcaccctgcagctggagagcagagaggagcacctgagcagaaagaacagcggctgcggctacagcatccaccagcaccagggcaacaagcagttcggcaccgagaaggtgggcttcctgtacaagaagagcgacggcatcagaagagtgtggcagaagagaaagtgcggcgtgaagtacggctgcctgaccatcagccacagcaccatcaacagaccccccgtgaagctgaccctgctgacctgccaggtgagacccaaccccgaggagaagaagtgcttcgacctggtgacccacaacagaacctaccacttccaggccgaggacgagcacgagtgcgaggcctgggtgagcgtgctgcagaacagcaaggacgaggccctgagcagcgccttcctgggcgagcccagcgccggccccggcagctggggcagcgccggccacgacggcgagccccacgacctgaccaagctgctgatcgccgaggtgaagagcagacccggcaacagccagtgctgcgactgcggcgccgccgaccccacctggctgagcaccaacctgggcgtgctgacctgcatccagtgcagcggcgtgcacagagagctgggcgtgagattcagcagaatgcagagcctgaccctggacctgctgggccccagcgagctgctgctggccctgaacatgggcaacaccagcttcaacgaggtgatggaggcccagctgcccagccacggcggccccaagcccagcgccgagagcgacatgggcaccagaagagactacatcatggccaagtacgtggagcacagattcgccagaagatgcacccccgagccccagagactgtggaccgccatctgcaacagagacctgctgagcgtgctggaggccttcgccaacggccaggacttcggccagcccctgcccggccccgacgcccaggcccccgaggagctggtgctgcacctggccgtgaaggtggccaaccaggccagcctgcccctggtggacttcatcatccagaacggcggccacctggacgccaaggccgccgacggcaacaccgccctgcactacgccgccctgtacaaccagcccgactgcctgaagctgctgctgaagggcagagccctggtgggcaccgtgaacgaggccggcgagaccgccctggacatcgccagaaagaagcaccacaaggagtgcgaggagctgctggagcaggcccaggccggcaccttcgccttccccctgcacgtggactacagctgggtgatcagcaccgagcccggcagcgacagcgaggaggacgaggaggagaagagatgcctgctgaagctgcccgcccaggcccactgggccagcggcagactggacatcagcaacaagacctacgagaccgtggccagcctgggcgccgccaccccccagggcgagagcgaggactgccccccccccctgcccgtgaagaacagcagcagaaccctggtgcagggctgcgccagacacgccagcggcgacagaagcgaggtgagcagcctgagcagcgaggcccccgagacccccgagagcctgggcagccccgccagcagcagcagcctgatgagccccctggagcccggcgaccccagccaggccccccccaacagcgaggagggcctgagagagccccccggcaccagcagacccagcctgaccagcggcaccacccccagcgagatgtacctgcccgtgagattcagcagcgagagcaccagaagctacagaagaggcgccagaagccccgaggacggccccagcgccagacagcccctgcccagaagaaacgtgcccgtgggcatcaccgagggcgacggcagcagaaccggcagcctgcccgccagcagcgtgcagctgctgcaggactag

SEQ ID NO: 12272 - DNA, 354 bp, synthetic construct; identical to SEQ ID NO: 11779
  source 1..354: mol_type = other DNA; note = Synthetic coding sequence

SEQ ID NO: 12273 - DNA, 1797 bp, synthetic construct
  source 1..1797: mol_type = other DNA; note = Synthetic coding sequence
atgttcgtgagcgacttcagaaaggagttctacgaggtggtgcagagccagagagtgctgctgttcgtggccagcgacgtggacgccctgtgcgcctgcaagatcctgcaggccctgttccagtgcgaccacgtgcagtacaccctggtgcccgtgagcggctggcaggagctggagaccgccttcctggagcacaaggagcagttccactacttcatcctgatcaactgcggcgccaacgtggacctgctggacatcctgcagcccgacgaggacaccatcttcttcgtgtgcgacacccacagacccgtgaacgtggtgaacgtgtacaacgacacccagatcaagctgctgatcaagcaggacgacgacctggaggtgcccgcctacgaggacatcttcagagacgaggaggaggacgaggagcacagcggcaacgacagcgacggcagcgagcccagcgagaagagaaccagactggaggaggagatcgtggagcagaccatgagaagaagacagagaagagagtgggaggccagaagcggcagcggcagcgagcccgtggccgccgccctggagaagagcagcagactgttcgccggccccatgagcgacagaaccgcccccagaagccccagaagagacatcctgttcgactacgagcagtacgagtaccacggcaccagcagcgccatggtgatgttcgagctggcctggatgctgagcaaggacctgaacgacatgctgtggtgggccatcgtgggcctgaccgaccagtgggtgcaggacaagatcacccagatgaagtacgtgaccgacgtgggcgtgctgcagagacacgtgagcagacacaaccacagaaacgaggacgaggagaacaccctgagcgtggactgcaccagaatcagcttcgagtacgacctgagactggtgctgtaccagcactggagcctgcacgacagcctgtgcaacaccagctacaccgccgccagattcaagctgtggagcgtgcacggccagaagagactgcaggagttcctggccgacatgggcctgcccctgaagcaggtgaagcagaagttccaggccatggacatcagcctgaaggagaacctgagagagatgatcgaggagagcgccaacaagttcggcatgaaggacatgagagtgcagaccttcagcatccacttcggcttcaagcacaagttcctggccagcgacgtggtgttcgccaccatgagcctgatggagagccccgagaaggacggcagcggcaccgaccacttcatccaggccctggacagcctgagcagaagcaacctggacaagctgtaccacggcctggagctggccaagaagcagctgagagccacccagcagaccatcgccagctgcctgtgcaccaacctggtgatcagccagggccccttcctgtactgcagcctgatggagggcacccccgacgtgatgctgttcagcagacccgccagcctgagcctgctgagcaagcacctgctgaagagcttcgtgtgcagcaccaagaacagaagatgcaagctgctgcccctggtgatggccgcccccctgagcatggagcacggcaccgtgaccgtggtgggcatcccccccgagaccgacagcagcgacagaaagaacttcttcggcagagccttcgagaaggccgccgagagcaccagcagcagaatgctgcacaaccacttcgacctgagcgtgatcgagctgaaggccgaggacagaagcaagttcctggacgccctgatcagcctgctgagctag

SEQ ID NO: 12274 - DNA, 2994 bp, synthetic construct
  source 1..2994: mol_type = other DNA; note = Synthetic coding sequence
atgcccagcgagaagaagatcagcagcgccaacgactgcatcagcttcatgcaggccggctgcgagctgaagaaggtgagacccaacagcagaatctacaacagattcttcaccctggacaccgacctgcaggccctgagatgggagcccagcaagaaggacctggagaaggccaagctggacatcagcgccatcaaggagatcagactgggcaagaacaccgagaccttcagaaacaacggcctggccgaccagatctgcgaggactgcgccttcagcatcctgcacggcgagaactacgagagcctggacctggtggccaacagcgccgacgtggccaacatctgggtgagcggcctgagatacctggtgagcagaagcaagcagcccctggacttcatggagggcaaccagaacacccccagattcatgtggctgaagaccgtgttcgaggccgccgacgtggacggcaacggcatcatgctggaggacaccagcgtggagctgatcaagcagctgaaccccaccctgaaggaggccaagatcagactgaagttcaaggagatccagaagagcaaggagaagctgaccaccagagtgaccgaggaggagttctgcgaggccttctgcgagctgtgcaccagacccgaggtgtacttcctgctggtgcagatcagcaagaacaaggagtacctggacgccaacgacctgatgctgttcctggaggccgagcagggcgtgacccacatcaccgaggacatctgcctggacatcatcagaagatacgagctgagcgaggagggcagacagaagggcttcctggccatcgacggcttcacccagtacctgctgagcagcgagtgcgacatcttcgaccccgagcagaagaaggtggcccaggacatgacccagcccctgagccactactacatcaacgccagccacaacacctacctgatcgaggaccagttcagaggccccgccgacatcaacggctacatcagagccctgaagatgggctgcagaagcgtggagctggacgtgagcgacggcagcgacaacgagcccatcctgtgcaacagaaacaacatgaccacccacgtgagcttcagaagcgtgatcgaggtgatcaacaagttcgccttcgtggccagcgagtaccccctgatcctgtgcctgggcaaccactgcagcctgccccagcagaaggtgatggcccagcagatgaagaaggtgttcggcaacaagctgtacaccgaggcccccctgcccagcgagagctacctgcccagccccgagaagctgaagagaatgatcatcgtgaagggcaagaagctgcccagcgaccccgacgtgctggagggcgaggtgaccgacgaggacgaggaggccgagatgagcagaagaatgagcgtggactacaacggcgagcagaagcagatcagactgtgcagagagctgagcgacctggtgagcatctgcaagagcgtgcagtacagagacttcgagctgagcatgaagagccagaactactgggagatgtgcagcttcagcgagaccgaggccagcagaatcgccaacgagtaccccgaggacttcgtgaactacaacaagaagttcctgagcagaatctaccccagcgccatgagaatcgacagcagcaacctgaacccccaggacttctggaactgcggctgccagatcgtggccatgaacttccagacccccggccccatgatggacctgcacaccggctggttcctgcagaacggcggctgcggctacgtgctgagacccagcatcatgagagacgaggtgagctacttcagcgccaacaccaagggcatcctgcccggcgtgagccccctggccctgcacatcaagatcatcagcggccagaacttccccaagcccaagggcgcctgcgccaagggcgacgtgatcgacccctacgtgtgcatcgagatccacggcatccccgccgactgcagcgagcagagaaccaagaccgtgcagcagaacagcgacaaccccatcttcgacgagaccttcgagttccaggtgaacctgcccgagctggccatgatcagattcgtggtgctggacgacgactacatcggcgacgagttcatcggccagtacaccatccccttcgagtgcctgcagcccggctacagacacgtgcccctgagaagcttcgtgggcgacatcatggagcacgtgaccctgttcgtgcacatcgccatcaccaacagaagcggcggcggcaaggcccagaagagaagcctgagcgtgagaatgggcaagaaggtgagagagtacaccatgctgagaaacatcggcctgaagaccatcgacgacatcttcaagatcgccgtgcaccccctgagagaggccatcgacatgagagagaacatgcagaacgccatcgtgagcatcaaggagctgtgcggcctgccccccatcgccagcctgaagcagtgcctgctgaccctgagcagcagactgatcaccagcgacaacacccccagcgtgagcctggtgatgaaggacagcttcccctacctggagcccctgggcgccatccccgacgtgcagaagaagatgctgaccgcctacgacctgatgatccaggagagcagattcctgatcgagatggccgacaccgtgcaggagaagatcgtgcagtgccagaaggccggcatggagttccacgaggagctgcacaacctgggcgccaaggagggcctgaagggcagaaagctgaacaaggccaccgagagcttcgcctggaacatcaccgtgctgaagggccagggcgacctgctgaagaacgccaagaacgaggccatcgagaacatgaagcagatccagctggcctgcctgagctgcggcctgagcaaggcccccagcagcagcgccgaggccaagagcaagagaagcctggaggccatcgaggagaaggagagcagcgaggagaacggcaagctgtag

SEQ ID NO: 12275 - DNA, 612 bp, synthetic construct
  source 1..612: mol_type = other DNA; note = Synthetic coding sequence
atgagaaacggcgacttcctgcccaccagactgcaggcccagcaggacgccgtgaacatcgtgtgccacagcaagaccagaagcaaccccgagaacaacgtgggcctgatcaccctggccaacgactgcgaggtgctgaccaccctgacccccgacaccggcagaatcctgagcaagctgcacaccgtgcagcccaagggcaagatcaccttctgcaccggcatcagagtggcccacctggccctgaagcacagacagggcaagaaccacaagatgagaatcatcgccttcgtgggcagccccgtggaggacaacgagaaggacctggtgaagctggccaagagactgaagaaggagaaggtgaacgtggacatcatcaacttcggcgaggaggaggtgaacaccgagaagctgaccgccttcgtgaacaccctgaacggcaaggacggcaccggcagccacctggtgaccgtgccccccggccccagcctggccgacgccctgatcagcagccccatcctggccggcgagggcggcgccatgctgggcctgggcgccagcgacttcgagttcggcgtggaccccagcgccgaccccgagctggccctgtag

SEQ ID NO: 12276 - DNA, 429 bp, synthetic construct; identical to SEQ ID NO: 10351
  source 1..429: mol_type = other DNA; note = Synthetic coding sequence

SEQ ID NO: 12277 - DNA, 1410 bp, synthetic construct
  source 1..1410: mol_type = other DNA; note = Synthetic coding sequence
atgtgcagcctggccagcggcgccaccggctacagccacctgctgaagaagcacttccacaccgtgagcctgagcatcagcctgatcctgaccgcctggttcatcaacatgaaccccaccgtggagtacatgaacagcatctacaaccccgtgccctgggagaaggaggagtacctgaagcccgtgctggaggacgacctgctgctgcagttcgacgtggaggacctgtacgagcccgtgagcgtgcccttcagctaccccaacggcctgagcgagaacaccagcgtggtggagaagctgaagcacatggaggccagagccctgagcgccgaggccgccctggccagagccagagaggacctgcagaagatgaagcagttcgcccaggacttcgtgatgcacaccgacgtgagaacctgcagcagcagcaccagcgtgatcgccgacctgcaggaggacgaggacggcgtgtacttcagcagctacggccactacggcatccacgaggagatgctgaaggacaagatcagaaccgagagctacagagacttcatctaccagaacccccacatcttcaaggacaaggtggtgctggacgtgggctgcggcaccggcatcctgagcatgttcgccgccaaggccggcgccaagaaggtgctgggcgtggaccagagcgagatcctgtaccaggccatggacatcatcagactgaacaagctggaggacaccatcaccctgatcaagggcaagatcgaggaggtgcacctgcccgtggagaaggtggacgtgatcatcagcgagtggatgggctacttcctgctgttcgagagcatgctggacagcgtgctgtacgccaagaacaagtacctggccaagggcggcagcgtgtaccccgacatctgcaccatcagcctggtggccgtgagcgacgtgaacaagcacgccgacagaatcgccttctgggacgacgtgtacggcttcaagatgagctgcatgaagaaggccgtgatccccgaggccgtggtggaggtgctggaccccaagaccctgatcagcgagccctgcggcatcaagcacatcgactgccacaccaccagcatcagcgacctggagttcagcagcgacttcaccctgaagatcaccagaaccagcatgtgcaccgccatcgccggctacttcgacatctacttcgagaagaactgccacaacagagtggtgttcagcaccggcccccagagcaccaagacccactggaagcagaccgtgttcctgctggagaagcccttcagcgtgaaggccggcgaggccctgaagggcaaggtgaccgtgcacaagagcaagaaggaccccagaagcctgaccgtgaccctgaccctgaacaacagcacccagacctacggcctgcagtag

SEQ ID NO: 12278 - DNA, 525 bp, synthetic construct
  source 1..525: mol_type = other DNA; note = Synthetic coding sequence
atggccagcgccggcacccagcactacagcatcggcctgagacagaagaacagcttcaagcagagcggccccagcggcaccgtgcccgccaccccccccgagaagcccagcgagggcagagtgtggccccaggcccaccagcaggtgaagcccatctggaagctggagaagaagcaggtggagaccctgagcgccggcctgggccccggcctgctgggcgtgcccccccagcccgcctacttcttctgccccagcaccctgtgcagcagcggcaccaccgccgtgatcgccggccacagcagcagctgctacctgcacagcctgcccgacctgttcaacagcaccctgctgtacagaagaagcagctacagacagaagccctaccagcagctggagagcttctgcctgagaagcagccccagcgagaagagccccttcagcctgccccagaagagcctgcccgtgagcctgaccgccaacaaggccaccagcagcatggtgttcagcatggcccagcccatgtag

SEQ ID NO: 12279 - DNA, 1572 bp, synthetic construct
  source 1..1572: mol_type = other DNA; note = Synthetic coding sequence
atgcagaaggagagagagctgcaggagaccatctacttcaagaacacctggcccgcctgcatgttcctgatcgtggcccccctgagcgtgctgtacaactggaaggacgagctggacacctggggctacttcagagtgaccgtgctgcacggcaacagaaaggacaacgagctgatcagagtgaagcagagaaagtgcgagatcgccctgaccacctacgagaccctgagactgtgcctggacgagctgaacagcctggagtggagcgccgtgatcgtggacgaggcccacagaatcaagaaccccaaggccagagtgaccgaggtgatgaaggccctgaagtgcaacgtgagaatcggcctgaccggcaccatcctgcagaacaacatgaaggagctgtggtgcgtgatggactgggccgtgcccggcctgctgggcagcggcacctacttcaagaagcagttcagcgaccccgtggagcacggccagagacacaccgccaccaagagagagctggccaccggcagaaaggccatgcagagactggccaagaagatgagcggctggttcctgagaagaaccaagaccctgatcaaggaccagctgcccaagaaggaggacagaatggtgtactgcagcctgaccgacttccagaaggccgtgtaccagaccgtgctggagaccgaggacgtgaccctgatcctgcagagcagcgagccctgcacctgcagaagcggccagaagagaagaaactgctgctacaagaccaacagccacggcgagaccgtgaagaccctgtacctgagctacctgaccgtgctgcagaaggtggccaaccacgtggccctgctgcaggccgccagcaccagcaagcagcaggagaccctgatcaagagaatctgcgaccaggtgttcagcagattccccgacttcgtgcagaagagcaaggacgccgccttcgagaccctgagcgaccccaagtacagcggcaagatgaaggtgctgcagcagctgctgaaccactgcagaaagaacagagacaaggtgctgctgttcagcttcagcaccaagctgctggacgtgctgcagcagtactgcatggccagcggcctggactacagaagactggacggcagcaccaagagcgaggagagactgaagatcgtgaaggagttcaacagcacccaggacgtgaacatctgcctggtgagcaccatggccggcggcctgggcctgaacttcgtgggcgccaacgtggtggtgctgttcgaccccacctggaaccccgccaacgacctgcaggccatcgacagagcctacagaatcggccagtgcagagacgtgaaggtgctgagactgatcagcctgggcaccgtggaggagatcatgtacctgagacagatctacaagcagcagctgcactgcgtggtggtgggcagcgagaacgccaagagatacttcgaggccgtgcagggcagcaaggagcaccagggcgagctgttcggcatccacaacctgttcaagttcagaagccagggcagctgcctgaccaaggacatcctggaggtgtag

SEQ ID NO: 12280 - DNA, 1179 bp, synthetic construct; identical to SEQ ID NO: 11426
  source 1..1179: mol_type = other DNA; note = Synthetic coding sequence

SEQ ID NO: 12281 - DNA, 1566 bp, synthetic construct
  source 1..1566: mol_type = other DNA; note = Synthetic coding sequence
atggagcagagcagcctgtacttctgggacctgctggagggcagcgagaaggccgtggtgggcaccacctacaagcacctgaaggacctgctgagcaagctgctgaacagcggctacttcgagagcatccccgtgcccaagaacgccaaggagaaggaggtgcccctggaggaggagatgctgatccagagcgagaagaagacccagctgagcaagaccgagagcgtgaaggagagcgagagcctgatggagttcgcccagcccgagatccagccccaggagttcctgaacagaagatacatgaccgaggtggactacagcaacaagcagggcgaggagcagccctgggaggccgactacgccagaaagcccaacctgcccaagagatgggacatgctgaccgagcccgacggccaggagaagaagcaggagagcttcaagagctgggaggccagcggcaagcaccaggaggtgagcaagcccgccgtgagcctggagcagagaaagcaggacaccagcaagctgagaagcaccctgcccgaggagcagaagaagcaggagatcagcaagagcaagcccagccccagccagtggaagcaggacacccccaagagcaaggccggctacgtgcaggaggagcagaagaagcaggagacccccaagctgtggcccgtgcagctgcagaaggagcaggaccccaagaagcagacccccaagagctggacccccagcatgcagagcgagcagaacaccaccaagagctggaccacccccatgtgcgaggagcaggacagcaagcagcccgagacccccaagagctgggagaacaacgtggagagccagaagcacagcctgaccagccagagccagatcagccccaagagctggggcgtggccaccgccagcctgatccccaacgaccagctgctgcccagaaagctgaacaccgagcccaaggacgtgcccaagcccgtgcaccagcccgtgggcagcagcagcaccctgcccaaggaccccgtgctgagaaaggagaagctgcaggacctgatgacccagatccagggcacctgcaacttcatgcaggagagcgtgctggacttcgacaagcccagcagcgccatccccaccagccagccccccagcgccacccccggcagccccgtggccagcaaggagcagaacctgagcagccagagcgacttcctgcaggagcccctgcaggccgccatcccccccggcaagcagcccagcagcctggccagccccaacccccccatggccaagggcagcgagcagggcttccagagcccccccgccagcagcagcagcgtgaccatcaacaccgcccccttccaggccatgcagaccgtgttcaacgtgaacgcccccctgccccccagaaaggagcaggagatcaaggagagcccctacagccccggctacaaccagagcttcaccaccgccagcacccagacccccccccagtgccagctgcccagcatccacgtggagcagaccgtgcacagccaggagaccgcccccggcaaccaccacagcaccttctag

SEQ ID NO: 12282 - DNA, 480 bp, synthetic construct; identical to SEQ ID NO: 11816
  source 1..480: mol_type = other DNA; note = Synthetic coding sequence

SEQ ID NO: 12283 - DNA, 270 bp, synthetic construct; identical to SEQ ID NO: 11466
  source 1..270: mol_type = other DNA; note = Synthetic coding sequence

SEQ ID NO: 12284 - DNA, 1356 bp, synthetic construct
  source 1..1356: mol_type = other DNA; note = Synthetic coding sequence
atggccgagggcgcccagccccaccagcccccccagctgggccccggcgccgccgccagaggcatgaagagagagagcgagctggagctgcccgtgcccggcgccggcggcgacggcgccgaccccggcctgagcaagagacccagaaccgaggaggccgccgccgacggcggcggcggcatgcagaacgagcccctgacccccggctaccacggcttccccgccagagacagccagggcaaccaggagcccaccaccacccccgacgccatggtgcagcccttcaccaccatccccttccccccccccccccagaacggcatccccaccgagtacggcgtgccccacacccaggactacgccggccagaccggcgagcacaacctgaccctgtacggcagcacccaggcccacggcgagcagagcagcaacagccccagcacccagaacggcagcctgacccagaccgagggcggcgcccagaccgacggccagcagagccagacccagagcagcgagaacagcgagagcaagagcacccccaagagactgcacgtgagcaacatccccttcagattcagagaccccgacctgagacagatgttcggccagttcggcaagatcctggacgtggagatcatcttcaacgagagaggcagcaagggcttcggcttcgtgaccttcgagaacagcgccgacgccgacagagccagagagaagctgcacggcaccgtggtggagggcagaaagatcgaggtgaacaacgccaccgccagagtgatgaccaacaagaagatggtgaccccctacgccaacggctggaagctgagccccgtggtgggcgccgtgtacggccccgagctgtacgccgccagcagcttccaggccgacgtgagcctgggcaacgacgccgccgtgcccctgagcggcagaggcggcatcaacacctacatccccctgatcagcctgcccctggtgcccggcttcccctaccccaccgccgccaccaccgccgccgccttcagaggcgcccacctgagaggcagaggcagaaccgtgtacggcgccgtgagagccgtgccccccaccgccatccccgcctaccccggcgtggtgtaccaggacggcttctacggcgccgacctgtacggcggctacgccgcctacagatacgcccagcccgccaccgccaccgccgccaccgccgccgccgccgccgccgccgcctacagcgacggctacggcagagtgtacaccgccgacccctaccacgccctggcccccgccgccagctacggcgtgggcgccgtggccagcctgtacagaggcggctacagcagattcgccccctactag

SEQ ID NO: 12285 - DNA, 855 bp, synthetic construct
  source 1..855: mol_type = other DNA; note = Synthetic coding sequence
atgttcagcagaagaagccacggcgacgtgaagaagagcacccagaaggtgctggaccccaagaaggacgtgctgaccagactgaagcacctgagagccctgctggacaacgtggacgccaacgacctgaagcagttcttcgagaccaactacagccagatctacttcatcttctacgagaacttcatcgccctggagaacagcctgaagctgaagggcaacaacaagagccagagagaggagctggacagcatcctgttcctgttcgagaagatcctgcagttcctgcccgagagaatcttcttcagatggcactaccagagcatcggcagcaccctgaagaagctgctgcacaccggcaacagcatcaagatcagatgcgagggcatcagactgttcctgctgtggctgcaggccctgcagaccaactgcgccgaggagcaggtgctgatcttcgcctgcctggtgcccggcttccccgccgtgatgagcagcagaggcccctgcaccctggagaccctgatcaaccccagccccagcgtggccgacgtgaagatctaccccgaggagatcacccccctgctgcccgccatcagcggcgagaagatcgccgaggaccagacctgcttcttcctgcagatcctgctgaagtacatggtgatccaggccgccagcctggagtggaagaacaaggagaaccaggacaccggcttcaagttcctgttcaccctgttcagaaagtactacctgccccacctgttccccagcttcaccaagctgaccaacatctacaagcccgtgctggacatcccccacctgagacccaagcccgtgtacatcaccaccaccagatag

SEQ ID NO: 12286 - DNA, 846 bp, synthetic construct
  source 1..846: mol_type = other DNA; note = Synthetic coding sequence
atgggcgacaccgtggtggagcccgcccccctgaagcccaccagcgagcccaccagcggcccccccggcaacaacggcggcagcctgctgagcgtgatcaccgagggcgtgggcgagctgagcgtgatcgaccccgaggtggcccagaaggcctgccaggaggtgctggagaaggtgaagctgctgcacggcggcgtggccgtgagcagcagaggcacccccctggagctggtgaacggcgacggcgtggacagcgagatcagatgcctggacgacccccccgcccagatcagagaggaggaggacgagatgggcgccgccgtggccagcggcaccgccaagggcgccagaagaagaagacagaacaacagcgccaagcagagctggctgctgagactgttcgagagcaagctgttcgacatcagcatggccatcagctacctgtacaacagcaaggagcccggcgtgcaggcctacatcggcaacagactgttctgcttcagaaacgaggacgtggacttctacctgccccagctgctgaacatgtacatccacatggacgaggacgtgggcgacgccatcaagccctacatcgtgcacagatgcagacagagcatcaacttcagcctgcagtgcgccctgctgctgggcgcctacagcagcgacatgcacatcagcacccagagacacagcagaggcaccaagctgagaaagctgatcctgagcgacgagctgaagcccgcccacagaaagagagagctgcccagcctgagccccgcccccgacaccggcctgagccccagcaagagaacccaccagagaagcaagagcgacgccaccgcctag

SEQ ID NO: 12287 - DNA, 591 bp, synthetic construct; identical to SEQ ID NO: 10377
  source 1..591: mol_type = other DNA; note = Synthetic coding sequence

SEQ ID NO: 12288 - DNA, 1620 bp, synthetic construct; identical to SEQ ID NO: 10018
  source 1..1620: mol_type = other DNA; note = Synthetic coding sequence

SEQ ID NO: 12289 - DNA, 1086 bp, synthetic construct
  source 1..1086: mol_type = other DNA; note = Synthetic coding sequence
gtgaccaccgagaagacctacaccagcaccagcaacaacagcatcagcggcagcctgaagagactggaggacaccaccgccagattcaccaacgccaacttccaggaggtgagcgcccacaccagcagcggcaaggacgtgagcgagaccagaggcagcgagggcaagggcaagaagagcagcgcccacagcagcggccagagaggcagaaagcccggcggcggcagaaaccccggcaccaccgtgagcgccgccagccccttcccccaggccggctacaagagagcccagaccagcggcatcgaggaggagaccgtgaaggagaagaagagaaagggcaacaagcagagcaagcacggccccggcagacccaagggcaacaagaaccaggagaacgtgagccacctgagcgtgagcagcgccagccccaccagcagcgtggccagcgccgccggcagcatcaccagcagcagcctgcagaagagccccaccctgctgagaaacggcagcctgcagagcctgagcgtgggcagcagccccgtgggcagcgagatcagcatgcagtacagacacgacggcgcctgccccaccaccaccttcagcgagctgctgaacgccatccacaacgacagaggcgacagcagcaccctgaccaagcaggagctgaagttcatcggcatctacaacagcaacgacgtggccgtgagcttccccaacgtggtgagcggcagcggcagcagcacccccgtgagcagcagccacctgccccagcagagcagcggccacctgcagcaggtgggcgccctgagccccagcgccgtgagcagcgccgcccccgccgtggccaccacccaggccaacaccctgagcggcagcagcctgagccaggcccccagccacatgtacggcaacagaagcaacagcagcatggccgccctgatcgcccagagcgagaacaaccagaccgaccaggacctgggcgacaacagcagaaacctggtgggcagaggcagcagccccagaggcagcctgagccccagaagccccgtgagcagcctgcagatcagatacgaccagcccggctag

SEQ ID NO: 12290 - DNA, 426 bp, synthetic construct
  source 1..426: mol_type = other DNA; note = Synthetic coding sequence
atggccgccgccccccccagctactgcttcgtggccttcccccccagagccaaggacggcctggtggtgttcggcaagaacagcgccagacccagagacgaggtgcaggaggtggtgtacttcagcgccgccgaccacgagcccgagagcaaggtggagtgcacctacatcagcatcgaccaggtgcccagaacctacgccatcatgatcagcagacccgcctggctgtggggcgccgagatgggcgccaacgagcacggcgtgtgcatcgccaacgaggccatcaacaccagagagcccgccgccgagatcgaggccctgctgggcatggacctggtgagactgggcctggagagaggcgagaccgccaaggaggccctggacgtgatcgtgagcctgctggaggagcacggccagggcggctag

SEQ ID NO: 12291 - DNA, 573 bp, synthetic construct
  source 1..573: mol_type = other DNA; note = Synthetic coding sequence
tgacagctggccgccctgaaggagatccaggccgaggtgcaggagaaggagagcgacgccgtgaagcccaagaaccaggacatccagggcggcaaggccgcccccgccgaggccctgggcatccccgacgagcactacctggacaacctgtgcatcttctgcggcgagagaagcgagagcttcaccgaggagggcctggacctgcactactggaagcactgcctgatgctgaccagatgcgaccactgcaagcaggtggtggagatcagcagcctgaccgagcacctgctgaccgagtgcgacaagaaggacggcttcggcaagtgctacagatgcagcgaggccgtgttcaaggaggagctgcccagacacatcaagcacaaggactgcaaccccgccaagcccgagaagctggccaacagatgccccctgtgccacgagaacttcagccccggcgaggaggcctggaaggcccacctgatgggccccgccggctgcaccatgaacctgagaaagacccacatcctgcagaaggcccccgccctgcagcccggcgagggccagagaagatag

SEQ ID NO: 12292 - DNA, 723 bp, synthetic construct
  source 1..723: mol_type = other DNA; note = Synthetic coding sequence
atgaccgtgggcaagagcagcaagatgctgcagcacatcgactacagaatgagatgcatcctgcaggacggcagaatcttcatcggcaccttcaaggccttcgacaagcacatgaacctgatcctgtgcgactgcgacgagttcagaaagatcaagcccaagaacagcaagcaggccgagagagaggagaagagagtgctgggcctggtgctgctgagaggcgagaacctggtgagcatgaccgtggagggccccccccccaaggacaccggcatcgccagagtgcccctggccggcgccgccggcggccccggcatcggcagagccgccggcagaggcatccccgccggcgtgcccatgccccaggcccccgccggcctggccggccccgtgagaggcgtgggcggccccagccagcaggtgatgaccccccagggcagaggcaccgtggccgccgccgccgccgccgccaccgccagcatcgccggcgcccccacccagtacccccccggcagaggcggcccccccccccccatgggcagaggcgcccccccccccggcatgatgggccccccccccggcatgagaccccccatgggcccccccatgggcatcccccccggcagaggcacccccatgggcatgcccccccccggcatgagaccccccccccccggcatgagaggcccccccccccccggcatgagaccccccagaccctag

SEQ ID NO: 12293 - DNA, 420 bp, synthetic construct
  source 1..420: mol_type = other DNA; note = Synthetic coding sequence
atggagaccgactgcaaccccatggagctgagcagcatgagcggcttcgaggagggcagcgagctgaacggcttcgagggcaccgacatgaaggacatgagactggaggccgaggccgtggtgaacgacgtgctgttcgccgtgaacaacatgttcgtgagcaagagcctgagatgcgccgacgacgtggcctacatcaacgtggagaccaaggagagaaacagatactgcctggagctgaccgaggccggcctgaaggtggtgggctacgccttcgaccaggtggacgaccacctgcagaccccctaccacgagaccgtgtacagcctgctggacaccctgagccccgcctacagagaggccttcggcaacgccctgctgcagagactggaggccctgaagagagacggccagagctag

SEQ ID NO: 12294 - DNA, 606 bp, synthetic construct
  source 1..606: mol_type = other DNA; note = Synthetic coding sequence
atggccggcctggaggtgctgttcgccagcgccgcccccgccatcacctgcagacaggacgccctggtgtgcttcctgcactgggaggtggtgacccacggctacttcggcctgggcgtgggcgaccagcccggccccaacgacaagaagagcgagctgctgcccgccggctggaacaacaacaaggacctgtacgtgctgagatacgagtacaaggacggcagcagaaagctgctggtgaaggccatcaccgtggagagcagcatgatcctgaacgtgctggagtacggcagccagcaggtggccgacctgaccctgaacctggacgactacatcgacgccgagcacctgggcgacttccacagatgcgaccccctgggccccttcgtggtgggcggcgaggacctggaccccttcggccccagaagaggcggcatgatcgtggaccccctgagaagcggcttccccagagccctgatcgaccccagcagcggcctgcccaacagactgccccccggcgccgtgccccccggcgccagattcgaccccttcggccccatcggcaccagcccccccggccccagacccgacagaagaggccagtag

SEQ ID NO: 12295 - DNA, 747 bp, synthetic construct; identical to SEQ ID NO: 11765
  source 1..747: mol_type = other DNA; note = Synthetic coding sequence

SEQ ID NO: 12296 - DNA, 1842 bp, synthetic construct; identical to SEQ ID NO: 9548
  source 1..1842: mol_type = other DNA; note = Synthetic coding sequence

SEQ ID NO: 12297 - DNA, 1620 bp, synthetic construct; identical to SEQ ID NO: 10018
  source 1..1620: mol_type = other DNA; note = Synthetic coding sequence

SEQ ID NO: 12298 - DNA, 1089 bp, synthetic construct
  source 1..1089: mol_type = other DNA; note = Synthetic coding sequence
atggcccccaagcccggcgccgagtggagcaccgccctgagccacctggtgctgggcgtggtgagcctgcacgccgccgtgagcaccgccgaggccagcagaggcgccgccgccggcttcctgctgcaggtgctggccgccaccaccaccctggcccccggcctgagcacccacgaggactgcctggccggcgcctgggtggccaccgtgatcggcctgcccctgctggccttcgacttccactggtgcaccaacggccacctgatgtgcgccggctgcttcatccacctgctggccgacgccagactgaaggaggagcaggccacctgccccaactgcagatgcgagatcagcaagagcctgtgctgcagaaacctggccgtggagaaggccgtgagcgagctgcccagcgagtgcggcttctgcctgagacagttccccagaagcctgctggagagacaccagaaggaggagtgccaggacagagtgacccagtgcaagtacaagagaatcggctgcccctggcacggccccttccacgagctgaccgtgcacgaggccgcctgcgcccaccccaccaagaccggcagcgagctgatggagatcctggacggcatggaccagagccacagaaaggagatgcagctgtacaacagcatcttcagcctgctgagcttcgagaagatcggctacaccgaggtgcagttcagaccctacagaaccgacgacttcatcaccagactgtactacgagacccccagattcaccgtgctgaaccagacctgggtgctgaaggccagagtgaacgacagcgagagaaaccccaacctgagctgcaagagaaccctgagcttccagctgctgctgaagagcaaggtgaccgcccccctggagtgcagcttcctgctgctgaagggcccctacgacgacgtgagaatcagccccgtgatctaccacttcgtgttcaccaacgagagcaacgagaccgactacgtgcccctgcccatcatcgacagcgtggagtgcaacaagctgctggccgccaagaacatcaacctgagactgttcctgttccagatccagaagtag

SEQ ID NO: 12299 - DNA, 273 bp, synthetic construct; identical to SEQ ID NO: 12238
  source 1..273: mol_type = other DNA; note = Synthetic coding sequence

SEQ ID NO: 12300 - DNA, 2502 bp, synthetic construct
  source 1..2502: mol_type = other DNA; note = Synthetic coding sequence
atggccgtggaggacagcaccctgcaggtggtggtgagagtgagaccccccacccccagagagctggacagccagagaagacccgtggtgcaggtggtggacgagagagtgctggtgttcaaccccgaggagcccgacggcggcttccccggcctgaagtggggcggcacccacgacggccccaagaagaagggcaaggacctgaccttcgtgttcgacagagtgttcggcgaggccgccacccagcaggacgtgttccagcacaccacccacagcgtgctggacagcttcctgcagggctacaactgcagcgtgttcgcctacggcgccaccggcgccggcaagacccacaccatgctgggcagagagggcgaccccggcatcatgtacctgaccaccgtggagctgtacagaagactggaggccagacagcaggagaagcacttcgaggtgctgatcagctaccaggaggtgtacaacgagcagatccacgacctgctggagcccaagggccccctggccatcagagaggaccccgacaagggcgtggtggtgcagggcctgagcttccaccagcccgccagcgccgagcagctgctggagatcctgaccagaggcaacagaaacagaacccagcaccccaccgacgccaacgccaccagcagcagaagccacgccatcttccagatcttcgtgaagcagcaggacagagtgcccggcctgacccaggccgtgcaggtggccaagatgagcctgatcgacctggccggcagcgagagagccagcagcacccacgccaagggcgagagactgagagagggcgccaacatcaacagaagcctgctggccctgatcaacgtgctgaacgccctggccgacgccaagggcagaaagacccacgtgccctacagagacagcaagctgaccagactgctgaaggacagcctgggcggcaactgcagaaccgtgatgatcgccgccatcagccccagcagcctgacctacgaggacacctacaacaccctgaagtacgccgacagagccaaggagatcagactgagcctgaagagcaacgtgaccagcctggactgccacatcagccagtacgccaccatctgccagcagctgcaggccgaggtggccgccctgagaaagaagctgcaggtgtacgagggcggcggccagccccccccccaggacctgcccggcagccccaagagcggccccccccccgagcacctgcccagcagccccctgcccccccacccccccagccagccctgcacccccgagctgcccgccggccccagagccctgcaggaggagagcctgggcatggaggcccaggtggagagagccatggagggcaacagcagcgaccaggagcagagccccgaggacgaggacgagggccccgccgaggaggtgcccacccagatgcccgagcagaaccccacccacgccctgcccgagagccccagactgaccctgcagcccaagcccgtggtgggccacttcagcgccagagagctggacggcgacagaagcaagcagctggccctgaaggtgctgtgcgtggcccagagacagtacagcctgctgcaggccgccaacctgctgacccccgacatgatcaccgagttcgagaccctgcagcagctggtgcaggaggagaagatcgagcccggcgccgaggccctgagaaccagcggcctggccagaggcgcccccctggcccaggagctgtgcagcgagagcatccccgtgcccagccccctgtgccccgagccccccggctacaccggccccgtgaccagaaccatggccagaagactgagcggccccctgcacaccctgggcatcccccccggccccaactgcacccccgcccagggcagcagatggcccatggagaagaagagaagaagacccagcgccctggaggccgacagccccatggcccccaagagaggcaccaagagacagagacagagcttcctgccctgcctgagaagaggcagcctgcccgacacccagcccagccagggccccagcacccccaagggcgagagagccagcagcccctgccacagccccagagtgtgccccgccaccgtgatcaagagcagagtgcccctgggccccagcgccatgcagaactgcagcacccccctggccctgcccaccagagacctgaacgccaccttcgacctgagcgaggagccccccagcaagcccagcttccacgagtgcatcggctgggacaagatcccccaggagctgagcagactggaccagcccttcatccccagagcccccgtgcccctgttcaccatgaagggccccaagcccaccagcagcctgcccggcaccagcgcctgcaagaagaagagagtggccagcagcagcgtgagccacggcagaagcagaatcgccagactgcccagcagcaccctgaagagacccgccggccccctggtgctgcccggcgactggcactag

SEQ ID NO: 12301 - DNA, 1842 bp, synthetic construct; identical to SEQ ID NO: 9548
  source 1..1842: mol_type = other DNA; note = Synthetic coding sequence

SEQ ID NO: 12302 - DNA, 654 bp, synthetic construct
  source 1..654: mol_type = other DNA; note = Synthetic coding sequence
atgaacagccagccccagaccagaagccccttcttccagagaccccagatccagccccccagagccaccatccccaacagcagccccagcatcagacccggcgcccagacccccaccgccgtgtaccaggccaaccagcacatcatgatggtgaaccacctgcccatgccctaccccgtgccccagggcccccagtactgcatcccccagtacagacacagcggccccccctacgtgggccccccccagcagtaccccgtgcagccccccggccccggccccttctaccccggccccggccccggcgacttccccaacgcctacggcacccccttctaccccagccagcccgtgtaccagagcgcccccatcatcgtgcccacccagcagcagcccccccccgccaagagagagaagaagaccatcagaatcagagaccccaaccagggcggcaaggacatcaccgaggagatcatgagcggcggcggcagcagaaaccccaccccccccatcggcagacccaccagcacccccacccccccccagcagctgcccagccaggtgcccgagcacagccccgtggtgtacggcaccgtggagagcgcccacctggccgccagcacccccgtgaccgccgccagcgaccagaagtag

SEQ ID NO: 12303 - DNA, 969 bp, synthetic construct
  source 1..969: mol_type = other DNA; note = Synthetic coding sequence
atgtacttctgctggggcgccgacagcagagagctgcagagaagaagaaccgccggcagccccggcgccgagctgctgcaggccgccagcggcgagagacacagcctgctgctgctgaccaaccacagagtgctgagctgcggcgacaacagcagaggccagctgggcagaagaggcgcccagagaggcgagctgcccgagcccatccaggccctggagaccctgatcgtggacctggtgagctgcggcaaggagcacagcctggccgtgtgccacaagggcagagtgttcgcctggggcgccggcagcgagggccagctgggcatcggcgagttcaaggagatcagcttcacccccaagaagatcatgaccctgaacgacatcaagatcatccaggtgagctgcggccactaccacagcctggccctgagcaaggacagccaggtgttcagctggggcaagaacagccacggccagctgggcctgggcaaggagttccccagccaggccagcccccagagagtgagaagcctggagggcatccccctggcccaggtggccgccggcggcgcccacagcttcgccctgagcctgtgcggcaccagcttcggctggggcagcaacagcgccggccagctggccctgagcggcagaaacgtgcccgtgcagagcaacaagcccctgagcgtgggcgccctgaagaacctgggcgtggtgtacatcagctgcggcgacgcccacaccgccgtgctgacccaggacggcaaggtgttcaccttcggcgacaacagaagcggccagctgggctacagccccacccccgagaagagaggcccccagctggtggagagaatcgacggcctggtgagccagatcgactgcggcagactgagaggctgcagcagccagacccacttctgctggaacatctgccagctgtgcgacaacagcagcgtgaagctggagtag

SEQ ID NO: 12304 - DNA, 1743 bp, synthetic construct
  source 1..1743: mol_type = other DNA; note = Synthetic coding sequence
atgagagccctgaccgtgcagagagtgaagttcgccatggacctgcccctgctgaagagagccggccaggacctggccgagaagaccaagaacttcgtgagcagaagcctggtgatcggcgaggtgctgagcatggccgacatggccaccggcgtgaagtgcggcatcatctactggctgttcggcggcgccatcagaaacctgggcagccccgagcacgtgaccaagtggttccagcccctgcaggagcagaagtacaccggcatgttcgccatgaccgagagaggccacggcagcaacgccagaggcatccagaccgaggccaccttcgacctgagcgcccaggagttcgtgatcgacaccccctgcgagaacgccgagaagatgtacatcggcaacgccatgtacggcaactacgccgccgtgttcgcccagctgatcatcgacggcagaagccagggcccccactgcttcatcgtgcccgtgagagacgagaacggcagcctgtaccccggcgtgaccgccatcgacatgatgtacaaggagggcctgcacggcgtggacaacggcatcctgatcttcgacaaggtgagaatccccagagagaacctgctggacaagttcggcagcgtggcccccgacggccagtaccacagccccatcagaaacaagagcgccagattcaacgccatgctggccgccctgacccccagcagactggccgtggccttccaggccatgggcgccatgaagctgggcctgaccatcgccatcagatacagccacagcagaagacagttcggccccaagaccaaggaggaggtgaagatcatcgagcaccagacccagaccctgagactgatgccccacctggccaccgccctggccctgaccttcgtgagcagatacgccggcgccctgctggacgaggacgtgttccagggcaaggagctggtgaacagcagaagcctgcaggccctggtggccggcctgaaggcctacagcacctgggagaacatcagatgcctgcaggactgcagagagtgcaccggcggcatggtggtgggcagagagctgctggcccagtacaccaagcagtacgaggagaagcccctgttcggcctgctgcagaactgggccgagagcgtgggcgacaagctgagaaccagcttcctggccttcaacatggacaccgtggacgacctggccttcctgctgaaggccgtgaagttcagagagagagtgctgcagagaggcctggtggccagaatctactacaaggtgaagaccaagaaggaggacttcttccacgcctggaacagctgcctgcaccacgtggccagcctgagcctggcccacacccacagagtgaccctggagcagttcagcctggccgtgaagagctgccccgaccaggaggaccagaccctgctgatgaagttctgcctgctgtacggcaccaagctggtgttccaggagagagcctggtacctggagcacaagtacctgacccccatggccagcaccagaatcagaaaccagctgctggacctgtgcgacagcgtgaaggacgacgccagaagagtgatcagcaccttcaacatcccccacacctacctgcacgcccccatcgccggcatcagcaaccccagagccgcctgggccttctaccccgcccccctgcagcccagacccagagaggaggccagaagcagaagacccaagctgggcgccaagctgtag

SEQ ID NO: 12305 - DNA, 561 bp, synthetic construct
  source 1..561: mol_type = other DNA; note = Synthetic coding sequence
atgggcgtgaaccagagcgtgggcttcccccccgtgaccggcccccacctggtgggctgcggcgacgtgatggagggccagaacctgcagggcagcttcttcagactgttctacccctgccagaaggccgaggagaccatggagcagcccctgtggatccccagatacgagtactgcaccggcctggccgagtacctgcagttcaacaagagatgcggcggcctgctgttcaacctggccgtgggcagctgcagactgcccgtgagctggaacggccccttcaagaccaaggacagcggctaccccctgatcatcttcagccacggcctgggcgccttcagaaccctgtacagcgccttctgcatggagctggccagcagaggcttcgtggtggccgtgcccgagcacagatgcgtgtacttcagagacagaagcgccgccaccacctacttctgcaagcaggcccccgaggagaaccagcccaccaacgagagcctgcaggaggagtggatccccttcagaagagtggaggagggcgagaaggagttccacgtgagatag

SEQ ID NO: 12306 - DNA, 1620 bp, synthetic construct; identical to SEQ ID NO: 10018
  source 1..1620: mol_type = other DNA; note = Synthetic coding sequence

SEQ ID NO: 12307 - DNA, 2613 bp, synthetic construct
  source 1..2613: mol_type = other DNA; note = Synthetic coding sequence
atgagcagaaaccccagcagcaacagccccgaggaggacaccgtgcccgtgcccaagggcagcgtgcccgccgccagacccagcagaggcggcatgagcgtggtgggcatcgacctgggcttcctgaactgctacatcgccgtggccagaagcggcggcatcgagaccatcgccaacgagtacagcgacagatgcacccccgcctgcatcagcctgggcagcagaaccagagccatcggcaacgccgccaagagccagatcgtgaccaacgtgagaaacaccatccacggcttcaagaagctgcacggcagaagcttcgacgaccccatcgtgcagaccgagagaatcagactgccctacgagctgcagaagatgcccaacggcagcgccggcgtgaaggtgagatacctggaggaggagagacccttcgccatcgagcaggtgaccggcatgctgctggccaagctgaaggagaccagcgagaacgccctgaagaagcccgtggccgactgcgtgatcagcatccccagcttcttcaccgacgccgagagaagaagcgtgatggccgccgcccaggtggccggcctgaactgcctgagactgatgaacgagaccaccgccgtggccctggcctacggcatctacaagcaggacctgccccccctggacgagaagcccagaaacgtggtgttcatcgacatgggccacagcgcctaccaggtgctggtgtgcgccttcaacaagggcaagctgaaggtgctggccaccaccttcgacccctacctgggcggcagaaacttcgacgaggccctggtggactacttctgcgacgagttcaagaccaagtacaagatcaacgtgaaggagaacagcagagccctgctgagactgtaccaggagtgcgagaagctgaagaagctgatgagcgccaacgccagcgacctgcccctgaacatcgagtgcttcatgaacgacctggacgtgagcagcaagatgaacagagcccagttcgagcagctgtgcgccagcctgctggccagagtggagccccccctgaaggccgtgatggagcaggccaacctgcagagagaggacatcagcagcatcgagatcgtgggcggcgccaccagaatccccgccgtgaaggagcagatcaccaagttcttcctgaaggacatcagcaccaccctgaacgccgacgaggccgtggccagaggctgcgccctgcagtgcgccatcctgagccccgccttcaaggtgagagagttcagcatcaccgacctggtgccctacagcatcaccctgagatggaagaccagcttcgaggacggcagcggcgagtgcgaggtgttctgcaagaaccaccccgcccccttcagcaaggtgatcaccttccacaagaaggagcccttcgagctggaggccttctacaccaacctgcacgaggtgccctaccccgacgccagaatcggcagcttcaccatccagaacgtgttcccccagagcgacggcgacagcagcaaggtgaaggtgaaggtgagagtgaacatccacggcatcttcagcgtggccagcgccagcgtgatcgagaagcagaacctggagggcgaccacagcgacgcccccatggagaccgagaccagcttcaagaacgagaacaaggacaacatggacaagatgcaggtggaccaggaggagggccaccagaagtgccacgccgagcacacccccgaggaggagatcgaccacaccggcgccaagaccaagagcgccgtgagcgacaagcaggacagactgaaccagaccctgaagaagggcaaggtgaagagcatcgacctgcccatccagagcagcctgtgcagacagctgggccaggacctgctgaacagctacatcgagaacgagggcaagatgatcatgcaggacaagctggagaaggagagaaacgacgccaagaacgccgtggaggagtacgtgtacgacttcagagacagactgggcaccgtgtacgagaagttcatcacccccgaggacctgagcaagctgagcgccgtgctggaggacaccgagaactggctgtacgaggacggcgaggaccagcccaagcaggtgtacgtggacaagctgcaggagctgaagaagtacggccagcccatccagatgaagtacatggagcacgaggagagacccaaggccctgaacgacctgggcaagaagatccagctggtgatgaaggtgatcgaggcctacagaaacaaggacgagagatacgaccacctggaccccaccgagatggagaaggtggagaagtgcatcagcgacgccatgagctggctgaacagcaagatgaacgcccagaacaagctgagcctgacccaggaccccgtggtgaaggtgagcgagatcgtggccaagagcaaggagctggacaacttctgcaaccccatcatctacaagcccaagcccaaggccgaggtgcccgaggacaagcccaaggccaacagcgagcacaacggccccatggacggccagagcggcaccgagaccaagagcgacagcaccaaggacagcagccagcacaccaagagcagcggcgagatggaggtggactag

SEQ ID NO: 12308 - DNA, 5463 bp, synthetic construct
  source 1..5463: mol_type = other DNA; note = Synthetic coding sequence
atggagcccccccaggagaccaacagacccttcagcaccctggacaacagaagcggccaggtgcaggtgctgagcgccacccccctgctgcagagaaacccctacagcagccccgacatcatgcacatcaagggcagcgaggccagcagcgtgccctacgccctgaaccagggcaccaccgccctgcccaagaacaagaaccaggagggcaccggccacagactgctgaacatgctgagaaagaccctgaaggagagcgacagcgaggagctggagatcacccaggagacccccaacctggtgcccttcggcgacgtggtgggctgcctgggcatccacatcaagaactgcagacacttcatgcccaagatcagcctgcagcactacgccaacctgttcatcagaatcagcatcaacaaggccgtgaagtgcaccaagatgtgcagcctgctgagcaagaacgacgagaagaacaccgtgatcaagttcgacgaggtgaagtacttcagcgtgcaggtgcccagaagatacgacgacaagagaaacaacatcctgctggagctgatccagtacgacaacagagagaagagagccttcctgctgggcagcgtgcagatccacctgtacgaggtgatccagaagggctgcttcatcgaggaggtgcaggtgctgcacggcaacatcttcgtgtgcagactggaggtggagttcatgttcagctacggcaacttcggctacggcttcagccaccagctgaagcccctgcagaagatcaccgagcccagcatgttcatgaacctggcccccccccccgagagaaccgaccccgtgaccaaggtgatcaccccccagaccgtggagtaccccgccttcctgagccccgacctgaacgtgaccgtgggcacccccgccgtgcagagcagcaaccagcccagcgtggtgagactggagaagctgcagcagcagcccagagagagactggagaagatgaagaaggagtacagaaacctgaacacctggatcgacaaggccaactacctggagagcatcctgatgcccaagctggagcacaaggacagcgaggagaccaacatcgacgaggccagcgagaacaccaagagcaaccaccccgaggaggagctggagaacatcgtgggcgtggacatccccctggtgaacgaggaggccgagaccaccgccaacgagctgctggacaacgacagcgagaagggcctgaccatccccaccctgaaccagagcgaccaggacaacagcaccgccgacgccagcaagaacgacgagagcacccccagccccaccgaggtgcacagcctgtgcaccatcagcaaccaggagaccatcaaggccggcagaatcccccccctgggcgagagacagagcgagagcatgcccgacagaaagatgaagaacgtgttcttccccctggaggtgaagctgaaggacaactaccccagcatcctgaaggccgacagcagcctgagcgaggtggccttcagccccaaggagtacaacagccccagcttcagacccgagtacatcgagttcaagcccaagttccagttccagaagttcaacaagaacggcttcgaccccttcctgagaaacatcaacaagatgagcgtgagaaagagaaaggaccaggacatctacaagtacagaaacatcctgggcgccgaggtgatcgagcacgaggaccaggaccccccctaccccgcccagagcaagaccgccggccccgccaacaccacctgggcccacgaccccaacatcttcaccaccaagatgctggagaccgagaacaagctggcccccgaccccaccatcaacaccatcaagggcctggacaccaagaacagcctgaaggagaacctgcccaacgtgagcctgcccagcatcaagggcgagagcagcagagccggcaacgtgcaggccaacacctgccacctgagcaagagcctgaacttcaccccccacatcgagtacctgaagcagagcatgatcctgaagagcatcctgagcgagaacctgcaggacctgagcgacaagctgttcagcaagcccgaggtgagcatgaacagcgaggccagagagaagagcagcagccccctgctgagcatccacgacaagagcagcagcagcatggaggacaacgtgctggagaagaagcaggacctgaacaactggctgagcgagaaggacatcctgaacagcaagaccaccctgagccagatcatcaagaacatccccgccgacagcttcagcgagggcagccagatcatcgagaacatccccgccgacagcctgctggagggcggccaggtgatcaagaacatccccgagtacagcctgagcgagggcggccagatcatcaagaacatccccgccgacagcttcctggagagcggccccggccagagccccgaggtggaggagcacgtgagcaagaagcacttcgaggccgacgagagagacttccccatcaagaagaacagcagcaccaagaagaagcacctgatcagcgaggtgcccaacagcaagagcggcagcagcggcaccgtgcacgactacatcatgagacagatcttcaccgcccccatcttcagcgagctggagatcgaggtgaaggagcccagcgagacccccatgaacctggagaaccagctgcccaccccctggaagagaagcctgagcagccacatcctgttccacgaggagaacgccgacgagatcgagctgccccagcccagaagcgccaccagccagatcatccaggccttccccatcgacaccctgctggagagcggcatcatcaaggtgatcgagctggacaaggagcaccacaagagcagcctgctgggcaccggcatcaccagccccaagggcaacctgaaggacagccaggagtactacagcgagatcagaagcgagaccgagcccctgagcgagcagagcatccccatcatccccaaggacaccaccagcgtgagcagagccgagttcatccaggaggaccagaacatgttcccccaggacagcagctactacagcatcgccaacaaggagctgtacctgcccagaaacggccagagactgtgcaaggacaagaacgacctgagcagcaccctggagagcctgaccaacagcctgatggacaagctgagcgagagcgacgagatcatgctgaagagcttcctgaagaacatcttcaacgtgttcttcaagtacaaccacagcgagagaagaggccagcccgagaaggagctggagagactgatccagcccagcttcaccagcgacaccgagcacctggaggagctgcaggaggacttcgacaaggccgacaagctggacagaaagcccatcctgagccccaagctgagagtgttcctggaggagctgagcgagagcgaggtgaagcacctgaagagcgagctgagcaagcagatccagcactacctggtggagagactgagcgagagcggccacatcaccaaggaggacctgcccaagatctaccagaacctgtacctgatgaacgagaaggccgagcagaagggccccaacagcttccagggcaagtacagcgagaccgtgaaggagatcatgagcttcgtgaacaacttcaaccaccacttcatcgacaagcacctggagatcaagctgagaagcttcctgaaggagatcctgcagaactacttcctgaagaacatcagcgagagcagcctgttcaacgagaccgccagcgagaccatctaccccaacatcagcagcctgagaaccaagagcgtgagcatcagcttccacgagctggagcaggacatcagcaagggcagcttcggcagaagattcgagatcaacatgaagtaccccctgagcaagagcctgcagaactacctgatcgccctgagcgagaacgagctgctgcacctgaaggccgacctgagcaagcacctgcagagcctgttcatcgagaagctgagcaagagcggcctgatgaccaagaagcagctggagggcatcaaccagcacatcaacctgctgaacagcagcagcatccccctgaagtacatcaagacccacctgcccttcagagacgactgccacttcgtggagaagcacagcgagaagcagaacaagtacagcagaatcgtgcagcagaccaccctgcagaccgtgagcgaggacaagctgagagaggccgagctgatcagagagaaggagaagaagtacttccccctgcagaacctgaagggcaacagcagcctgatcaaggagcagaagagctactacaccaaggaggaggccaagacccccagcctgatcaaggtgcagcccagcagcaacgagaacatccaggccagccccctgagcaagagcagcgagatcctgaccgacatcctgctgaagaagctgagaaaggagcacgtgttcacccagctgccccaggccgagaacagcgtgcacaagaccgagatccaggacccctacagctggggcggcaagagcaagatcacccagagcaaggcctggtgcgagaagaccctgaagatgaagagcctggacagaaaggagcacgtgaacatctacaagtggaccgtgcaggagaagcccgaggccgtgctgaccagctaccccagaatccccaacgccagaatgcccagagaggacgagtacctgaacagaatcaccttccccagctggcagagcagcaccctgacccacttcaacaccgagaccggcgagaagagcaagctggaggaccagtactgccagaccctgaagggcaacaacaacaacaacaagaagcacctggtgaccttcgcccagtacaagaaggagatccagaccctgtacatcaagcccgacgagatctgcagcgagaagtgcgccaagttccccgagatccagagcttccagtacaaggtggtggaggacgagaagaacctgaagccccacctgttccccgagctgttcaagatcgaggacctgaagcccaaggtgagaaaggagagagacagagtggcccagcccaagaagagcttcaacaagatcgtgagaatcctgcccaccaccctgcccaccaccagaatccacctgaagaagagcgtgcccagaaccctgctgcactggaccgccagaagaaccatccacgactgcagcgacaagttcgaggacctgcacgacatgaccagcttcacccacctgaagaaggtgaagagcagaagcagactgctgggcaagagcagcgacgacatccacaaccacgccagacacagcgccagaccctacaccgcccccgaggtgaacaagcagagagagagctacagcggcaagttcaccagcagaagaatggtgagcagcggcctggtgcacatcaacgacaagaccagcgactacgagatgcacaagatgagacccaagaagatcaagagaggctactag

SEQ ID NO: 12309 - DNA, 498 bp, synthetic construct
  source 1..498: mol_type = other DNA; note = Synthetic coding sequence
atggagcccaccagagactgccccctgttcggcggcgccttcagcgccatcctgcccatgggcgccatcgacgtgagcgacctgagacccgtgcccgacaaccaggaggtgttctgccaccccgtgaccgaccagagcctgatcgtggagctgctggagctgcaggcccacgtgagaggcgaggccgccgccagataccacttcgaggacgtgggcggcgtgcagggcgccagagccgtgcacgtggagagcgtgcagcccctgagcctggagaacctggccctgagaggcagatgccaggaggcctgggtgctgagcggcaagcagcagatcgccaaggagaaccagcaggtgagagccagagagtgcgtgatgagctggaagggcggcagcggcgacgccgagatccaggtgagcatcctgaccctgatccccctgggcagcaagggcagagacaccagcagcggcctggccgaggccgcccccgtgcccgactag

SEQ ID NO: 12310 - DNA, 4482 bp, synthetic construct
  source 1..4482: mol_type = other DNA; note = Synthetic coding sequence
atggccagcatcacccagctgttcgacgacctgtgcgaggccctgctgcccgccgccaagacccacctgggccagagaagcgtgaacagaaagagagccaagagaagcctgaagaaggtggcctacaacgccctgttcaccaacctgttccaggacgagacccagcagctgcagcccgacatgagcaagctgcccgccagaaacaagatcctgatgctgagcttcgacctgagagtgggcggcctgggccccaaggccgacagactggaggagctggtggaggagctggaggccgccccctgctgccccctgctggaggtgggcagcgtgctggacctgctggtgcagctggccggcagcggccccccccaggtgctgcccagaaagagagactacttcctgaacaacaagcacgtgggcagaaacgtgccctacagcggctacgactgcgacgacctgagcgtgttcgagatggacgtgcagagcctgatcagcagagaggagtgcctgtgccacagcatgatccaggagaccctgcaggtgatggaggccgcccccggcaccggcctgcccaccgtgggcctgttcagcttcggcgacccctgcggcgacagattcgagagagacaccagagtgagcctgttcggcgccctggtgcacagcagaacctacgacatggacgtgagactgggcctgccccccgtgcccgacaacgccgacctgagcggcctggccatcaaggtgccccccagcgtggaccagtgggaggacgagggcttccagagcgccagcaacctgacccccgacagccagagcgagcccagcgtgacccccgacgtggacctgtgggaggccgccctgacctacgaggccagcaagagaagatgctgggagagagtgggctgcccccccggccacagagaggagccctacctgaccgaggccggcagagacgccttcgacaagttctgcagactgcaccagggcgagctgcagctgctggccggcggcgtgctgcaggccccccagcccgtgctggtgaaggagtgcgagctggtgaaggacgtgctgaacgtgctgatcggcgtggtgagcgccaccttcagcctgtgccagcccgcccaggccttcgtggtgaagagaggcgtgcacgtgagcggcgccagccccgagagcatcagcagcctgctgagcgaggtggccgagtacggcacctgctacaccagactgagccacttcagcctgcagcccgtgctggacagcctgtacagcaagggcctggtgttccaggccttcaccagcggcctgagaagatacctgcagtactacagagcctgcgtgctgagcaccccccccaccctgagcctgctgaccatcggcttcctgttcaagaagctgggcagacagctgagatacctggccgagctgtgcggcgtgggcgccgtgctgcccggcacctgcggcggcggccccagagccgccttccccaccggcgtgaagctgctgagctacctgtaccaggaggccctgcacaactgcagcaacgagcactaccccgtgctgctgagcctgctgaagaccagctgcgagccctacaccagattcatccacgactgggtgtacagcggcgtgttcagagacgcctacggcgagttcatgatccaggtgaaccacgagtacctgagcttcagagacaagctgtactggacccacggctacgtgctgatcagcaaggaggtggaggactgcgtgcccgtgttcctgaagcacatcgcccacgacatctacgtgtgcggcaagaccatcaacctgctgaagctgtgctgccccagacactacctgtgctggagcgacgtgcccgtgcccagaatcagcgtgatcttcagcctggaggagctgaaggagatcgagaaggactgcgccgtgtacgtgggcagaatggagagagtggccagacacagcagcgtgagcaaggaggagaaggagctgagaatggagatcgccaagcaggagctgatcgcccacgccagagaggccgccagcagagtgctgagcgccctgagcgacagacagatgagcgagagaatggccctggacgccagaaagagagagcagttccagagactgaaggagcagttcgtgaaggaccaggagagaagacaggccgccagacaggaggagctggacgacgacttcagctacgccagagagctgagagacagagagagaagactgaagagcctggaggaggagctggagagaaaggccagacaggccctggtggaccactacagcaagctgagcgccgaggccgccagaagagagcagaaggccctgtggagaatccagagacacagactggagagcgccagactgagattcctgctggaggacgagaagcacatccaggagatgctgaaggccgtgagcgaggcccaccagccccaggagccccccgacgtgctgctgagcgtgcacccccaggtgaccagccccggccccgagcaccccgagggcggccagggctgcgacagcggcagcgccgagcagcacagccccgcctgggacggctggaacagacccggcctgctgaccccccagcccctgaagcccctggccgtgggcgccggcggcagaggcctgcagcaggccgagggcgccagacccttcagcgacagcctgagcatcggcgacttcctgcccgtgggccccggcgccgagcccagcgtgcagaccggcatggtgcccctgctggaggtggccctgcagaccatcaacctggacctgccccccagcgcccccggcgaggcccccgccgccgccagcacccagcccagcagaccccaggagtacgacttcagcaccgtgctgagacccgccgtggccaccagccccgcccccggccccctgcaggccgccgagtgcagcctgggcagcagcggcctgcagctgtgggaggacagctgcggcaagatggacgcctgcggcagcgccagcagagagaccctgctgcccagccacccccccagaagagccgccctggaggagggcagcagccagcccaccgagagactgttcggccaggtgagcggcggcggcctgcccaccggcgactacgccagcgagatcgcccccaccagacccagatggaacacccacggccacgtgagcgacgccagcatcagagtgggcgagaacgtgagcgacgtggcccccacccagcccagatggaacacccacggccacgtgagcaacgccagcatcagcctgggcgagagcgtgagcgacgtggcccccaccagacccagatggaacatccacggccacgtgagcaacgccagcatcagagtgggcgagaacgtgagcgacgtggcccccaccagacccagatggaacacccacggccacgtgagcaacgccagcatcagagtgggcgagaacgtgagcgacgtggcccccaccagacccagatggaacacccacggccacgtgagcgacgccagcatcagcctgggcgagagcgtgagcgacatggcccccgccagacccagatggaacacccacggccacgtgagcgacgccagcatcagcctgggcgagagcgtgagcgacatggcccccaccagacccagatggaacacccacggccacgtgagcgacaccagcatcagagtgggcgagaacgtgagcgacgtggcccccatcagaagcagatgcaacacccacggccacgtgagcgacgccagcatcagcctgggcgagcccgtgagcgacgtggtgagcaccagacccagatggaacacccacgtgcccatcccccccccccacatggtgctgggcgccctgagccccgaggccgagcccaacacccccagaccccagcagagcccccccggccacaccagccagagcgccctgagcctgggcgcccagagcaccgtgctggactgcggccccagactgcccgtggaggtgggccccagcctgagcagccccagcagcggctgcggcgagggcagcatcagcgtgggcgagaacgtgagcgacgtggcccccacccagccctggtggcccaacacccccggcgacagcgtgagcgaggagctgggccagagcagagtggccggcggccaggagtgggactgcggcacccacagagcctgggaggccctgggcggcgccggcaccctgagaaccagcctgcagatcggcctgagcacccacagaaagacccagctgcccagagccgcccaggccgtggtgagaagaagaagacacagaagaagaagactgagagtgggcagcagacccacctggcaggcctggcagggcagcaccacctggagcggcaccagaaccgtgaccagcccctgccccagcagacccctgctgatcttctgcgccccctgcttccccggccccagccccagcccctggacccccagaagcagcctgcccctgatgagactgctgtgcagctag

SEQ ID NO: 12311 - DNA, 1077 bp, synthetic construct; identical to SEQ ID NO: 9480
  source 1..1077: mol_type = other DNA; note = Synthetic coding sequence

SEQ ID NO: 12312 - DNA, 2757 bp, synthetic construct; identical to SEQ ID NO: 10812
  source 1..2757: mol_type = other DNA; note = Synthetic coding sequence

SEQ ID NO: 12313 - DNA, 222 bp, synthetic construct
  source 1..222: mol_type = other DNA; note = Synthetic coding sequence
atgagctaccagcagcagcagtgcaagcagccctgccagccccccccccccgtgtgcagactgcccaagagacccgagccctgcccccccctgaagtgccccgagccctgccccccccccaagtgcccccagccctgccccccccagcagtgccagcagaagtaccccctggtgacccccagccccccctgccagcccaagtgcccccccaagagcaagtag

SEQ ID NO: 12314 - DNA, 576 bp, synthetic construct; identical to SEQ ID NO: 9211
  source 1..576: mol_type = other DNA; note = Synthetic coding sequence

SEQ ID NO: 12315 - DNA, 60 bp, synthetic construct
  source 1..60: mol_type = other DNA; note = Synthetic coding sequence
atgctgaagaacaagggccacagcagcaagaaggacaacctggccgtgaacgccgtgtag

SEQ ID NO: 12316 - DNA, 1026 bp, synthetic construct
  source 1..1026: mol_type = other DNA; note = Synthetic coding sequence
atggagagcaacttcaaccaggagggcgtgcccagacccagctacgtgttcagcgccgaccccatcgccagacccagcgagatcaacttcgacggcatcaagctggacctgagccacgagttcagcctggtggcccccaacaccgaggccaacagcttcgagagcaaggactacctgcaggtgtgcctgagaatcagacccttcacccagagcgagaaggagctggagagcgagggctgcgtgcacatcctggacagccagaccgtggtgctgaaggagccccagtgcatcctgggcagactgagcgagaagagcagcggccagatggcccagaagttcagcttcagcaaggtgttcggccccgccaccacccagaaggagttcttccagggctgcatcatgcagcccgtgaaggacctgctgaagggccagagcagactgatcttcacctacggcctgaccaacagcggcaagacctacaccttccagggcaccgaggagaacatcggcatcctgcccagaaccctgaacgtgctgttcgacagcctgcaggagagactgtacaccaagatgaacctgaagccccacagaagcagagagtacctgagactgagcagcgagcaggagaaggaggagatcgccagcaagagcgccctgctgagacagatcaaggaggtgaccgtgcacaacgacagcgacgacaccctgtacggcagcctgaccaacagcctgaacatcagcgagttcgaggagagcatcaaggactacgagcaggccaacctgaacatggccaacagcatcaagttcagcgtgtgggtgagcttcttcgagatctacaacgagtacatctacgacctgttcgtgcccgagctggccaagaccaagggcgagctgatcaagaccaaggaggagctgaagaagagagagaacgagagcgacagcctgatccaggagctggagaccagcaacaagaagatcatcacccagaaccagagaatcaaggagctgatcaacatcatcgactag

SEQ ID NO: 12317 - DNA, 27 bp, synthetic construct
  source 1..27: mol_type = other DNA; note = Synthetic coding sequence
atggccgacaccgacctgttcatgtag

SEQ ID NO: 12318 - DNA, 2628 bp, synthetic construct
  source 1..2628: mol_type = other DNA; note = Synthetic coding sequence
atgatgtacaccgtgctgcccgacggcagccccgtgccccagggcatggccctgtacgccccccccccccccctgcccaacaacagcagacccctgacccccggcaccgtggtgtacggccccccccccgccggcgcccccatggtgtacggcccccccccccccaacttcagcatccccttcatccccatgggcgtgctgcactgcaacgtgcccgagcaccacaacctggagaacgaggtgagcagactggaggacatcatgcagcacctgaagagcaagaagagagaggagagatggatgagagccagcaagagacagagcgagaaggagatggaggagctgcaccacaacatcgacgacctgctgcaggagaagaagagcctggagtgcgaggtggaggagctgcacagaaccgtgcagaagagacagcagcagaaggacttcatcgacggcaacgtggagagcctgatgaccgagctggagatcgagaagagcctgaagcaccacgaggacatcgtggacgagatcgagtgcatcgagaagaccctgctgaagagaagaagcgagctgagagaggccgacagactgctggccgaggccgagagcgagctgagctgcaccaaggagaagaccaagaacgccgtggagaagttcaccgacgccaagagaagcctgctgcagaccgagagcgacgccgaggagctggagagaagagcccaggagaccgccgtgaacctggtgaaggccgaccagcagctgagaagcctgcaggccgacgccaaggacctggagcagcacaagatcaagcaggaggagatcctgaaggagatcaacaagatcgtggccgccaaggacagcgacttccagtgcctgagcaagaagaaggagaagctgaccgaggagctgcagaagctgcagaaggacatcgagatggccgagagaaacgaggaccaccacctgcaggtgctgaaggagagcgaggtgctgctgcaggccaagagagccgagctggagaagctgaagagccaggtgaccagccagcagcaggagatggccgtgctggacagacagctgggccacaagaaggaggagctgcacctgctgcagggcagcatggtgcaggccaaggccgacctgcaggaggccctgagactgggcgagaccgaggtgaccgagaagtgcaaccacatcagagaggtgaagagcctgctggaggagctgagcttccagaagggcgagctgaacgtgcagatcagcgagagaaagacccagctgaccctgatcaagcaggagatcgagaaggaggaggagaacctgcaggtggtgctgagacagatgagcaagcacaagaccgagctgaagaacatcctggacatgctgcagctggagaaccacgagctgcagggcctgaagctgcagcacgaccagagagtgagcgagctggagaagacccaggtggccgtgctggaggagaagctggagctggagaacctgcagcagatcagccagcagcagaagggcgagatcgagtggcagaagcagctgctggagagagacaagagagagatcgagagaatgaccgccgagagcagagccctgcagagctgcgtggagtgcctgagcaaggagaaggaggacctgcaggagaagtgcgacatctgggagaagaagctggcccagaccaagagagtgctggccgccgccgaggagaacagcaagatggagcagagcaacctggagaagctggagctgaacgtgagaaagctgcagcaggagctggaccagctgaacagagacaagctgagcctgcacaacgacatcagcgccatgcagcagcagctgcaggagaagagagaggccgtgaacagcctgcaggaggagctggccaacgtgcaggaccacctgaacctggccaagcaggacctgctgcacaccaccaagcaccaggacgtgctgctgagcgagcagaccagactgcagaaggacatcagcgagtgggccaacagattcgaggactgccagaaggaggaggagaccaagcagcagcagctgcaggtgctgcagaacgagatcgaggagaacaagctgaagctggtgcagcaggagatgatgttccagagactgcagaaggagagagagagcgaggagagcaagctggagaccagcaaggtgaccctgaaggagcagcagcaccagctggagaaggagctgaccgaccagaagagcaagctggaccaggtgctgagcaaggtgctggccgccgaggagagagtgagaaccctgcaggaggaggagagatggtgcgagagcctggagaagaccctgagccagaccaagagacagctgagcgagagagagcagcagctggtggagaagagcggcgagctgctggccctgcagaaggaggccgacagcatgagagccgacttcagcctgctgagaaaccagttcctgaccgagagaaagaaggccgagaagcaggtggccagcctgaaggaggccctgaagatccagagaagccagctggagaagaacctgctgaccgccagagaggccgaggcccagaagctgaagaagcaggtgtgcgcccagaaggcccagctggccagcctgggcagagagtag

SEQ ID NO: 12319 - DNA, 1188 bp, synthetic construct
  source 1..1188: mol_type = other DNA; note = Synthetic coding sequence
atggagcccccccaggagaccaacagacccttcagcaccctggacaacagaagcggccaggtgcaggtgctgagcgccacccccctgctgcagagaaacccctacagcagccccgacatcatgcacatcaagggcagcgaggccagcagcgtgccctacgccctgaaccagggcaccaccgccctgcccaagaacaagaaccaggagggcaccggccacagactgctgaacatgctgagaaagaccctgaaggagagcgacagcgaggagctggagatcacccaggagacccccaacctggtgcccttcggcgacgtggtgggctgcctgggcatccacatcaagaactgcagacacttcatgcccaagatcagcctgcagcactacgccaacctgttcatcagaatcagcatcaacaaggccgtgaagtgcaccaagatgtgcagcctgctgagcaagaacgacgagaagaacaccgtgatcaagttcgacgaggtgaagtacttcagcgtgcaggtgcccagaagatacgacgacaagagaaacaacatcctgctggagctgatccagtacgacaacagagagaagagagccttcctgctgggcagcgtgcagatccacctgtacgaggtgatccagaagggctgcttcatcgaggaggtgcaggtgctgcacggcaacatcttcgtgtgcagactggaggtggagttcatgttcagctacggcaacttcggctacggcttcagccaccagctgaagcccctgcagaagatcaccgagcccagcatgttcatgaacctggcccccccccccgagagaaccgaccccgtgaccaaggtgatcaccccccagaccgtggagtaccccgccttcctgagccccgacctgaacgtgaccgtgggcacccccgccgtgcagagcagcaaccagcccagcgtggtgagactggagaagctgcagcagcagcccagagagagactggagaagatgaagaaggagtacagaaacctgaacacctggatcgacaaggccaactacctggagagcatcctgatgcccaagctggagcacaaggacagcgaggagaccaacatcgacgaggccagcgagaacaccaagagcaaccaccccgaggaggagctggagaacatcgtgggcgtgggcggcttcttcaccaagagaatctag

SEQ ID NO: 12320 - DNA, 282 bp, synthetic construct
  source 1..282: mol_type = other DNA; note = Synthetic coding sequence
atgagctactaccagagacccttcagccccagcgcctacagcctgcccgccagcctgaacagcagcatcgtgatgcagcacggcaccagcctggacagcaccgacacctacccccagcacgcccagagcctggacggcaccaccagcagcagcatccccctgtacagaagcagcgaggaggagaagagagtgaccgtgatcaaggccccccactaccccggcatcggccccgtggacgagagcggcatccccaccgccatcagaaccaccgtggacagatag

SEQ ID NO: 12321 - DNA, 558 bp, synthetic construct
  source 1..558: mol_type = other DNA; note = Synthetic coding sequence
atggccgccagcgtggagcagagagagggcaccatccaggtgcagggccaggccctgttcttcagagaggccctgcccggcagcggccaggccagattcagcgtgctgctgctgcacggcatcagattcagcagcgagacctggcagaacctgggcaccctgcacagactggcccaggccggctacagagccgtggccatcgacctgcccggcctgggccacagcaaggaggccgccgcccccgcccccatcggcgagctggcccccggcagcttcctggccgccgtggtggacgccctggagctgggcccccccgtggtgcccgtggcccccatctgcaccgacaagatcaacgccgccaactacgccagcgtgaagacccccgccctgatcgtgtacggcgaccaggaccccatgggccagaccagcttcgagcacctgaagcagctgcccaaccacagagtgctgatcatgaagggcgccggccacccctgctacctggacaagcccgaggagtggcacaccggcctgctggacttcctgcagggcctgcagtag

SEQ ID NO: 12322 - DNA, 1443 bp, synthetic construct
  source 1..1443: mol_type = other DNA; note = Synthetic coding sequence
atgctggagagaccccccgccctggccatgcccatgcccaccgagggcacccccccccccctgagcggcacccccatccccgtgcccgcctacttcagacacgccgagcccggcttcagcctgaagagacccagaggcctgagcagaagcctgcccccccccccccccgccaagggcagcatccccatcagcagactgttcccccccagaacccccggctggcaccagctgcagcccagaagagtgagcttcagaggcgaggccagcgagaccctgcagagccccggctacgaccccagcagacccgagagcttcttccagcagagcttccagagactgagcagactgggccacggcagctacggcgaggtgttcaaggtgagaagcaaggaggacggcagactgtacgccgtgaagagaagcatgagccccttcagaggccccaaggacagagccagaaagctggccgaggtgggcagccacgagaaggtgggccagcacccctgctgcgtgagactggagcaggcctgggaggagggcggcatcctgtacctgcagaccgagctgtgcggccccagcctgcagcagcactgcgaggcctggggcgccagcctgcccgaggcccaggtgtggggctacctgagagacaccctgctggccctggcccacctgcacagccagggcctggtgcacctggacgtgaagcccgccaacatcttcctgggccccagaggcagatgcaagctgggcgacttcggcctgctggtggagctgggcaccgccggcgccggcgaggtgcaggagggcgaccccagatacatggcccccgagctgctgcagggcagctacggcaccgccgccgacgtgttcagcctgggcctgaccatcctggaggtggcctgcaacatggagctgccccacggcggcgagggctggcagcagctgagacagggctacctgccccccgagttcaccgccggcctgagcagcgagctgagaagcgtgctggtgatgatgctggagcccgaccccaagctgagagccaccgccgaggccctgctggccctgcccgtgctgagacagcccagagcctggggcgtgctgtggtgcatggccgccgaggccctgagcagaggctgggccctgtggcaggccctgctggccctgctgtgctggctgtggcacggcctggcccaccccgccagctggctgcagcccctgggcccccccgccaccccccccggcagccccccctgcagcctgctgctggacagcagcctgagcagcaactgggacgacgacagcctgggccccggccaccccccctgcctggcctgcccccccgccggcctgcacagccccctgagactgagctggcccggcctgtggggcgccccccccccccccggcgccggcgcccaccccggcatgccctggacctag

SEQ ID NO: 12323 - DNA, 1740 bp, synthetic construct; identical to SEQ ID NO: 12040
  source 1..1740: mol_type = other DNA; note = Synthetic coding sequence

SEQ ID NO: 12324 - DNA, 975 bp, synthetic construct
  source 1..975: mol_type = other DNA; note = Synthetic coding sequence
atggaggccctgggccccggcggcgacagagccagccccgccagcagcaccagcagcctggacctgtggcacctgagcatgagagccgacagcgcctacagcagcttcagcgccgccagcggcggccccgagcccagaacccagagccccggcaccgacctgctgccctacctggactgggactacgtgagagtggtgtggggcggccccggccccgccccccccgacgccgccctgtgcaccagccccagacccagacccgccgtggccgccagaagcggcccccagcccaccgaggtgcccggcacccccggccccctgaacagacaggccacccccctgctgtacgccctggccgccgaggccgaggccgccgcccaggccgccgagccccccagcccccccgccagcagagccgcctacagacagagactgcagggcgcccagagaagagtgctgagagagaccagcttccagagaaaggagctgagaatgagcctgcccgccagactgagacccaccgtgcccgccagaccccccgccacccaccccagaagcgccagcctgagccaccccggcggcgagggcgagcccgccagaagcagagcccccgcccccggcaccgccggcagaggccccctggccaaccagcagagaaagtggtgcttcagcgagcccggcaagctggacagagtgggcagaggcggcggccccgccagagagtgcctgggcgaggcctgcagcagcagcggcctgcccggccccgagcccctggagttccagcaccccgccctggccaagttcgaggaccacgaggtgggctggctgcccgagacccagccccagggcagcatgaacctggacagcggcagcctgaagctgggcgacgccttcagacccgccagcagaagcagaagcgccagcggcgaggtgctgggcagctggggcggcagcggcggcaccatccccatctag

SEQ ID NO: 12325 - DNA, 780 bp, synthetic construct
  source 1..780: mol_type = other DNA; note = Synthetic coding sequence
atgcccagagccagaagcggcagaagaagcagaggcgccggcggcagagaggagaccttcctgagagtgagagccaacagacagaccagactgaacgccagaatcggcaagatgaagagaagaaagcaggacgagggccagagagagggcagctgcatggccgaggacgacgccgtggacatcgagcacgagaacaacaacagattcgaggagtacgagtggtgcggccagaagagaatcagagccaccaccctgctggagggcggcttcagaggcagcggcttcatcatgtgcagcggcaaggagaaccccgacagcgacgccgacctggacgtggacggcgacgacaccctggagtacggcaagccccagtacaccgaggccgacgtgatcccctgcaccggcgaggagcccggcgaggccaaggagagagaggccctgagaggcgccgtgctgaacggcggcccccccagcaccagaatcacccccgagttcagcaagtgggccagcgacgagatgcccagcaccagcaacggcgagagcagcaagcaggaggccatgcagaagacctgcaagaacagcgacatcgagaagatcaccgaggacagcgccgtgaccaccttcgaggccctgaaggccagagtgagagagctggagagacagctgagcagaggcgacagatacaagtgcctgatctgcatggacagctacagcatgcccctgaccagcatccagtgctggcacgtgcactgcgaggagtgctggctgagaaccctgtag

SEQ ID NO: 12326 - DNA, 369 bp, synthetic construct; identical to SEQ ID NO: 12080
  source 1..369: mol_type = other DNA; note = Synthetic coding sequence

SEQ ID NO: 12327 - DNA, 984 bp, synthetic construct
  source 1..984: mol_type = other DNA; note = Synthetic coding sequence
atggccagcttcctgaagggcgcccacgtgaccatcaacgccagagccgaggaggacgtggagcccgagtgcatcatggagaaggtggccaaggccagcggcgccaactacagcttccacaaggagagcggcagattccaggacgtgggcccccaggcccccgtgggcagcgtgtaccagaagaccaacgccgtgagcgagatcaagagagtgggcaaggacagcttctgggccaaggccgagaaggaggaggagaacagaagactggaggagaagagaagagccgaggaggcccagagacagctggagcaggagagaagagagagagagctgagagaggccgccagaagagagcagagataccaggagcagggcggcgaggccagcccccagagaacctgggagcagcagcaggaggtggtgagcagaaacagaaacgagcaggagagcgccgtgcaccccagagagatcttcaagcagaaggagagagccatgagcaccaccagcatcagcagcccccagcccggcaagctgagaagccccttcctgcagaagcagctgacccagcccgagacccacttcggcagagagcccgccgccgccatcagcagacccagagccgacctgcccgccgaggagcccgcccccagcacccccccctgcctggtgcaggccgaggaggaggccgtgtacgaggagccccccgagcaggagaccttctacgagcagccccccctggtgcagcagcagggcgccggcagcgagcacatcgaccaccacatccagggccagggcctgagcggccagggcctgtgcgccagagccctgtacgactaccaggccgccgacgacaccgagatcagcttcgaccccgagaacctgatcaccggcatcgaggtgatcgacgagggctggtggagaggctacggccccgacggccacttcggcatgttccccgccaactacgtggagctgatcgagtag

SEQ ID NO: 12328 - DNA, 438 bp, synthetic construct
  source 1..438: mol_type = other DNA; note = Synthetic coding sequence
atgcagggcagaatcaccaaggtgctgaacatgaagccccccgagatcctgagcatgatcgaggaggccgccggcaccagaatgtacgagtacaagaagatcgccgcccagaagaccatcgagaagaaggaggccaagctgaaggagatcaagaccatcctggaggaggagatcacccccaccatccagaagctgaaggaggagagaagcagctacctggagtaccagaaggtgatgagagagatcgagcacctgagcagactgtacatcgcctaccagttcctgctggccgaggacaccaaggtgagaagcgccgaggagctgaaggagatgcaggacaaggtgatcaagctgcaggaggagctgagcgagaacgacaagaagatcaaggccctgaaccacgagatcgaggagctggagaagagaaaggacaagtag

SEQ ID NO: 12329 - DNA, 816 bp, synthetic construct
  source 1..816: mol_type = other DNA; note = Synthetic coding sequence
atggagaaggagaccggcatcagccagcagagaaactactacttcacccagagcaagggcgagcccctgcagatcgaccacctggtgttcgtggtgcacggcatcggccccgcctgcgacctgagattcagaagcatcgtgcagtgcgtgaacgacttcagaagcgtgagcctgaacctgctgcagacccacttcaagaaggcccaggagaaccagcagatcggcagagtggagttcctgcccgtgaactggcacagccccctgcacagcaccggcgtggacgtggacctgcagagaatcaccctgcccagcatcaacagactgagacacttcaccaacgacaccatcctggacgtgttcttctacaacagccccacctactgccagaccatcgtggacaccgtggccagcgagatgaacagaatctacaccctgttcctgcagagaaaccccgacttcaagggcggcgtgagcatcgccggccacagcctgggcagcctgatcctgttcgacatcctgaccaaccagaaggacagcctgggcgacatcgacagcgagaaggacagcctgaacatcgtgatggaccagggcgacacccccaccctggaggaggacctgaagaagctgcagctgagcgagttcttcgacatcttcgagaaggagaaggtggacaaggaggccctggccctgtgcaccgacagagacctgcaggagatcggcatccccctgggccccagaaagaacctgagcagcgccgtggccgtgatcctggagatggtgaccatctggatgctggccctgggcagatgcctgtag

SEQ ID NO: 12330 - DNA, 1818 bp, synthetic construct; identical to SEQ ID NO: 11555
  source 1..1818: mol_type = other DNA; note = Synthetic coding sequence

SEQ ID NO: 12331 - DNA, 294 bp, synthetic construct
  source 1..294: mol_type = other DNA; note = Synthetic coding sequence
atgcagaccagcagcagcagaagcgtgcacctgagcgagtggcagaagaactacttcgccatcaccagcggcatctgcaccggccccaaggccgacgcctacagagcccagatcctgagaatccagtacgcctgggccaacagcgagatcagccaggtgtgcgccaccaagctgttcaagaagtacgccgagaagtacagcgccatcatcgacagcgacaacgtggagagcggcctgaacaactacgccgagaacatcctgaccctggccggcagccagcagaccgacagctag

SEQ ID NO: 12332 - DNA, 333 bp, synthetic construct; identical to SEQ ID NO: 10461
  source 1..333: mol_type = other DNA; note = Synthetic coding sequence

SEQ ID NO: 12333 - DNA, 627 bp, synthetic construct
  source 1..627: mol_type = other DNA; note = Synthetic coding sequence
atggagccccccatggagcccagcggcggcgagcaggagcccggcgccgtgagattcctggacctgccctgggaggacgtgctgctgccccacgtgctgaacagagtgcccctgagacagctgctgagactgcagagagtgagcagagccttcagaagcctggtgcagctgcacctggccggcctgagaagattcgacgccgcccaggtgggcccccagatccccagagccgccctggccagactgctgagagacgccgagggcctgcaggagctggccctggccccctgccacgagtggctgagcgacgaggacctggtgcccgtgctggccagaaacccccagctgagaagcgtggccctgggcggctgcggccagctgagcagaagagccctgggcgccctggccgagggctgccccagactgcagagactgagcctggcccactgcgactgggtggacggcctggccctgagaggcctggccgacagatgccccgccctggaggagctggacctgaccgcctgcagacagctgaaggacgaggccatcgtgtacctggcccagagaagaggcgccggcctgagaagcctgagcctggccgtgaacgccaacgtgggcgactag

SEQ ID NO: 12334 - DNA, 1419 bp, synthetic construct
  source 1..1419: mol_type = other DNA; note = Synthetic coding sequence
gtgacccactacaagcagtacccccccaacaccagcaaggtgtacagctacttcgagtgcagagagaagaagaccgagaacagcaagctgagaaaggtgaagtacgaggagaccgtgttctacggcctgcagtacatcctgaacaagtacctgaagggcaaggtggtgaccaaggagaagatccaggaggccaaggacgtgtacaaggagcacttccaggacgacgtggtgaacgagaagggctggaactacatcctggagaagtacgacggccacctgcccatcgagatcaaggccgtgcccgagggcttcgtgatccccagaggcaacgtgctgttcaccgtggagaacaccgaccccgagtgctactggctgaccaactggatcgagaccatcctggtgcagagctggtaccccatcaccgtggccaccaacagcagagagcagaagaagatcctggccaagtacctgctggagaccagcggcaacctggacggcctggagtacaagctgcacgacttcggctacagaggcgtgagcagccaggagaccgccggcatcggcgccagcgcccacctggtgaacttcaagggcaccgacaccgtggccggcctggccctgaacaagaagtactacggcaccaaggaccccgtgcccggctacagcgtgcccgccgccgagcacagcaccatcaccgcctggggcaaggaccacgagaaggacgccttcgagcacatcgtgacccagttcagcagcgtgcccgtgagcgtggtgagcaacagctacgacatctacaacgcctgcgagaagatctggggcgaggacctgagacacctgatcgtgagcagaagcacccaggcccccctgatcatcagacccgacagcggcaaccccctggacaccgtgctgaaggtgctggagatcctgggcaagaagttccccgtgaccgagaacagcaagggctacaagctgctgcccccctacctgagagtgatccagggcgacggcgtggacatcaacaccctgcaggagatcgtggagggcatgaagcagaagatgtggagcatcgagaacatcgccttcggcagcggcggcggcctgctgcagaagctgaccagagacctgctgaactgcagcttcaagtgcagctacgtggtgaccaacggcctgggcatcaacgtgttcaaggaccccgtggccgaccccaacaagagaagcaagaagggcagactgagcctgcacagaacccccgccggcaacttcgtgaccctggaggagggcaagggcgacctggaggagtacggccaggacctgctgcacaccgtgttcaagaacggcaaggtgaccaagagctacagcttcgacgagatcagaaagaacgcccagctgaacatcgagctggaggccgcccaccactag

SEQ ID NO: 12335 - DNA, 519 bp, synthetic construct
  source 1..519: mol_type = other DNA; note = Synthetic coding sequence
tgcaagcagagcaccaagaccgaggagaagctgagacccaccagaaccagcagcgagagcatctacagcagacccggcagcagcatccccggcagccccggccacaccatctacgccaaggtggacaacgagatcctggactacaaggacctggccgccatccccaaggtgaaggccatctacgacatcgagagacccgacctgatcacctacgagcccttctacaccagcggctacgacgacaagcaggagagacagagcctgggcgagagccccagaaccctgagccccacccccagcgccgagggctaccaggacgtgagagacagaatgatccacagaagcaccagccagggcagcatcaacagccccgtgtacagcagacacagctacacccccaccaccagcagaagcccccagcacttccacagacccgaccagggcatcaacatctacagaaagccccccatctacaagcagcacgtgctgttcgaggtgatcctgctgctgctgatctag

SEQ ID NO: 12336 - DNA, 2445 bp, synthetic construct
  source 1..2445: mol_type = other DNA; note = Synthetic coding sequence
atgagactgctggacggcaagcagaccagcagatacagcgagaacgcctgcgagaagaagatcttcagcatctacggccactaccccgtggtgagagccgccctgagaagaaagggctgggtggagaagaagttccacttcctgcccaaggtgatccccgacgtggaggacgagggcgccagagtgaacgacgacacctgcgccaaggtgaaggagaaccaggagatggccctggagaagaccgacaacatccacgacgtgatgagcagactggtgaagaacgagatgccctacctgctgtggaccatcaagagagacatcatcgactaccacagcctgacctacgaccagatgctgaaccactacgccaagaccgccagcttcaccaccaagatcggcctgtgcgtgaacatgagaagcctgccctggtacgtgcccgccaaccccgacagcttcttccccagatgctacagcctgtgcaccgagagcgagcagcaggagttcctggaggacttcagaagaaccatggccagcagcatcctgaagtgggtggtgagccaccagagctgcagcagaagcagcagaagcaagcccagagaccagagagaggaggccggcagcagcgacctgagcagcagacaggacgccgagaacgccgaggccaagctgagaggcctgcccggccagctggtggacatcgcctgcaaggtgtgccaggcctacctgggccagctggagcacgaggacatcgacaccagcgccgacgccgtggaggacctgaccgaggccgagtgggaggacctgacccagcagtactacagcctggtgcacggcgacgccttcatcagcaacagcagaaactacttcagccagtgccaggccctgctgaacagaatcaccagcgtgaacccccagaccgacatcgacggcctgagaaacatctggatcatcaagcccgccgccaagagcagaggcagagacatcgtgtgcatggacagagtggaggagatcctggagctggccgccgccgaccaccccctgagcagagacaacaagtgggtggtgcagaagtacatcgagacccccctgctgatctgcgacaccaagttcgacatcagacagtggttcctggtgaccgactggaaccccctgaccatctggttctacaaggagagctacctgagattcagcacccagagattcagcctggacaagctggacagcgccatccacctgtgcaacaacgccgtgcagaagtacctgaagaacgacgtgggcagaagccccctgctgcccgcccacaacatgtggaccagcaccagattccaggagtacctgcagagacagggcagaggcgccgtgtggggcagcgtgatctaccccagcatgaagaaggccatcgcccacgccatgaaggtggcccaggaccacgtggagcccagaaagaacagcttcgagctgtacggcgccgacttcgtgctgggcagagacttcagaccctggctgatcgagatcaacagcagccccaccatgcaccccagcacccccgtgaccgcccagctgtgcgcccaggtgcaggaggacaccatcaaggtggccgtggacagaagctgcgacatcggcaacttcgagctgctgtggagacagcccgtggtggagcccccccccttcagcggcagcgacctgtgcgtggccggcgtgagcgtgagaagagccagaagacaggtgctgcccgtgtgcaacctgaaggccagcgccagcctgctggacgcccagcccctgaaggccagaggccccagcgccatgcccgaccccgcccagggcccccccagccccgccctgcagagagacctgggcctgaaggaggagaagggcctgcccctggccctgctggcccccctgagaggcgccgccgagagcggcggcgccgcccagcccaccagaaccaaggccgccggcaaggtggagctgcccgcctgcccctgcagacacgtggacagccaggcccccaacaccggcgtgcccgtggcccagcccgccaagagctgggaccccaaccagctgaacgcccaccccctggagcccgtgctgagaggcctgaagaccgccgagggcgccctgagacccccccccggcggcaagggcgagggcaccgtgtgcagcagactgccccaccacggccaccacgtggccgcctgccagaccaccggcaccacctgggacggcggccccggcgtgtgcttcctgagacagctgctggccagcgagctgcccatgggccccggcctgcccagagaccccagagcccccccctgcctggtgtgcagaggcctgctgccccccgccggcccctgcaagagatgcagaagcttctgcgccgccgtgctgcagggcgccagcttcgtgagactgggcggcagaagctgcagccccagaaccccctag

SEQ ID NO: 12337 - DNA, 318 bp, synthetic construct
  source 1..318: mol_type = other DNA; note = Synthetic coding sequence
atggacaagaacatcggcgagcagctgaacaaggcctacgaggccttcagacaggcctgcatggacagagacagcgccgtgaaggagctgcagcagaagaccgagaactacgagcagagaatcagagagcagcaggagcagctgagcctgcagcagaccatcatcgacaagctgaagagccagctgctgctggtgaacagcacccaggacaacaactacggctgcgtgcccctgctggaggacagcgagaccagaaagaacaacctgaccctggaccagccccaggacaaggtgatcagcggcatcgccagagagtag

SEQ ID NO: 12338 - DNA, 816 bp, synthetic construct
  source 1..816: mol_type = other DNA; note = Synthetic coding sequence
atggcccccgtgggcgtggagaagaagctgctgctgggccccaacggccccgccgtggccgccgccggcgacctgaccagcgaggaggaggagggccagagcctgtggagcagcatcctgagcgaggtgagcaccagagccagaagcaagctgcccagcggcaagaacatcctggtgttcgaccacaccagatgcaacgtgtggatcctggacggcgacctgtaccacaagggcctgctgaagttcgccgtgagcgccgagagcctgcccgagaccctggtgatcttcgtggccgacatgagcagaccctggaccgtgatggagagcctgcagaagtgggccagcgtgctgagagagcacatcgacaagatgaagatcccccccgagaagatgagagagctggagagaaagttcgtgaaggacttccaggactacatggagcccgaggagggctgccagggcagcccccagagaagaggccccctgaccagcggcagcgacgaggagaacgtggccctgcccctgggcgacaacgtgctgacccacaacctgggcatccccgtgctggtggtgtgcaccaagtgcgacgccgtgagcgtgctggagaaggagcacgactacagagacgagcacctggacttcatccagagccacctgagaagattctgcctgcagtacggcgccgccctgatctacaccagcgtgaaggaggagaagaacctggacctgctgtacaagtacatcgtgcacaagacctacggcttccacttcaccacccccgccctggtggtggagaaggacgccgtgttcatgtag

SEQ ID NO: 12339 - DNA, 522 bp, synthetic construct
  source 1..522: mol_type = other DNA; note = Synthetic coding sequence
atggccgacagaatgcagatcgtggtgatcctgagcgagttcttcaacaccacctggcaggaggccaactgcgccaactgcctgaccaacaacagcgaggagctgagcaacagcaccgtgtacttcctgaacctgttcaaccacaccctgacctgcttcgagcacaacctgcagggcaacgcccacagcctgctgcagaccaagaactacagcgaggtgtgcaagaactgcagagaggcctacaagaccctgagcagcctgtacagcgagatgcagaagatgaacgagctggagaacaaggccgagcccggcacccacctgtgcatcgacgtggaggacgccatgaacatcaccagaaagctgtggagcagaaccttcaactgcagcgtgccctgcagcgacaccgtgcccgtgatcgccgtgagcgtgttcatcctgttcctgcccgtggtgttctacctgagcagcttcctgcacagcgagcagaagaagagaaagctgatcctgcccaagagactgtag

SEQ ID NO: 12340 - DNA, 435 bp, synthetic construct
  source 1..435: mol_type = other DNA; note = Synthetic coding sequence
tgattcatccactgcaccgacgacagccccgacccctgcatcgagtacgagctggtgctgagaaagtggtgcgagctgatccccggcgccgagttcagatgcttcgtgaaggagaacaagctgatcggcatcagccagagagactacacccagtactacgaccacatcagcaagcagaaggaggagatcagaagatgcatccaggacttcttcaagaagcacatccagtacaagttcctggacgaggacttcgtgttcgacatctacagagacagcagaggcaaggtgtggctgatcgacttcaaccccttcggcgaggtgaccgacagcctgctgttcacctgggaggagctgatcagcgagaacaacctgaacggcgacttcagcgaggtggacgcccaggagcagaagagaaaccagcaggaggacgactag

SEQ ID NO: 12341 - DNA, 978 bp, synthetic construct
  source 1..978: mol_type = other DNA; note = Synthetic coding sequence
tgaatccagggcgaggccagcagaagagccgccggcgagcccgaggccggcagcgactacgtgaagttcagcaaggagaagtacatcctggacagcagccccgagaagctgcacaaggagctggaggaggagctgaagctgagcagcaccgacctgagaagccacgcctggtaccacggcagaatccccagagaggtgagcgagaccctggtgcagagaaacggcgacttcctgatcagagacagcctgaccagcctgggcgactacgtgctgacctgcagatggagaaaccaggccctgcacttcaagatcaacaaggtggtggtgaaggccggcgagagctacacccacatccagtacctgttcgagcaggagagcttcgaccacgtgcccgccctggtgagataccacgtgggcagcagaaaggccgtgagcgagcagagcggcgccatcatctactgccccgtgaacagaaccttccccctgagatacctggaggccagctacggcctgggccagggcagcagcaagcccgccagccccgtgagccccagcggccccaagggcagccacatgaagagaagaagcgtgaccatgaccgacggcctgaccgccgacaaggtgaccagaagcgacggctgccccaccagcaccagcctgcccagacccagagacagcatcagaagctgcgccctgagcatggaccagatccccgacctgcacagccccatgagccccatcagcgagagccccagcagccccgcctacagcaccgtgaccagagtgcacgccgcccccgccgcccccagcgccaccgccctgcccgccagccccgtggccagaagaagcagcgagccccagctgtgccccggcagcgcccccaagacccacggcgagagcgacaagggcccccacaccagccccagccacaccctgggcaaggccagccccagccccagcctgagcagctacagctag

SEQ ID NO: 12342 - DNA, 330 bp, synthetic construct
  source 1..330: mol_type = other DNA; note = Synthetic coding sequence
atgagcagcaagggcagcagcaccgacggcagaaccgacctggccaacggcagcctgagcagcagccccgaggagatgagcggcgccgaggagggcagagagaccagcagcggcatcgaggtggaggccagcgacctgagcctgagcctgaccggcgacgacggcggccccaacagaaccagcaccgagagcagaggcaccgacaccgagagcagcggcgaggacaaggacagcgacagcatggaggacaccggccactacagcatcaacgacgagaacagagtgcacgacagaagcgaggaggaggaggaggaggaggaggaggagtag

SEQ ID NO: 12343 - DNA, 1638 bp, synthetic construct
  source 1..1638: mol_type = other DNA; note = Synthetic coding sequence
gccgccggcgcccccagactgctgggccccggcgccgtgagaggccccgccggcgtgggcagagtggccgccggcgccatggagggcgtgctgtacaagtggaccaactacctgagcggctggcagcccagatggttcctgctgtgcggcggcatcctgagctactacgacagccccgaggacgcctggaagggctgcaagggcagcatccagatggccgtgtgcgagatccaggtgcacagcgtggacaacaccagaatggacctgatcatccccggcgagcagtacttctacctgaaggccagaagcgtggccgagagacagagatggctggtggccctgggcagcgccaaggcctgcctgaccgacagcagaacccagaaggagaaggagttcgccgagaacaccgagaacctgaagaccaagatgagcgagctgagactgtactgcgacctgctggtgcagcaggtggacaagaccaaggaggtgaccaccaccggcgtgagcaacagcgaggagggcatcgacgtgggcaccctgctgaagagcacctgcaacaccttcctgaagaccctggaggagtgcatgcagatcgccaacgccgccttcaccagcgagctgctgtacagaaccccccccggcagcccccagctggccatgctgaagagcagcaagatgaagcaccccatcatccccatccacaacagcctggagagacagatggagctgagcacctgcgagaacggcagcctgaacatggagatcaacggcgaggaggagatcctgatgaagaacaagaacagcctgtacctgaagagcgccgagatcgactgcagcatcagcagcgaggagaacaccgacgacaacatcaccgtgcagggcgagatcagaaaggaggacggcatggagaacctgaagaaccacgacaacaacctgacccagagcggcagcgacagcagctgcagccccgagtgcctgtgggaggagggcaaggaggtgatccccaccttcttcagcaccatgaacaccagcttcagcgacatcgagctgctggaggacagcggcatccccaccgaggccttcctggccagctgctacgccgtggtgcccgtgctggacaagctgggccccaccgtgttcgcccccgtgaagatggacctggtgggcaacatcaagaaggtgaaccagaagtacatcaccaacaaggaggagttcaccaccctgcagaagatcgtgctgcacgaggtggaggccgacgtggcccaggtgagaaacagcgccaccgaggccctgctgtggctgaagagaggcctgaagttcctgaagggcttcctgaccgaggtgaagaacggcgagaaggacatccagaccgccctgaacaacgcctacggcaagaccctgagacagcaccacggctgggtggtgagaggcgtgttcgccctggccctgagagccgcccccagctacgaggacttcgtggccgccctgaccgtgaaggagggcgaccaccagaaggaggccttcagcatcggcatgcagagagacctgagcctgtacctgcccgccatggagaagcagctggccatcctggacaccctgtacgaggtgcacggcctggagagcgacgaggtggtgtag

SEQ ID NO: 12344 - DNA, 522 bp, synthetic construct
  source 1..522: mol_type = other DNA; note = Synthetic coding sequence
atgtacaccctgctgagcggcctgtacaagtacatgttccagaaggacgagtactgcatcctgatcctgggcctggacaacgccggcaagaccaccttcctggagcagagcaagaccagattcaacaagaactacaagggcatgagcctgagcaagatcaccaccaccgtgggcctgaacatcggcaccgtggacgtgggcaaggccagactgatgttctgggacctgggcggccaggaggagctgcagagcctgtgggacaagtactacgccgagtgccacggcgtgatctacgtgatcgacagcaccgacgaggagagactggccgagagcaagcaggccttcgagaaggtggtgaccagcgaggccctgtgcggcgtgcccgtgctggtgctggccaacaagcaggacgtggagacctgcctgagcatccccgacatcaagaccgccttcagcgactgcaccagcaagatcggcagaagagactgcctgacccaggcctgcagcgccctgaccggctag

SEQ ID NO: 12345 - DNA, 729 bp, synthetic construct
  source 1..729: mol_type = other DNA; note = Synthetic coding sequence
atgggcctggtgtgcgtgctgggcgacggcaagaccgagcagaagggcggcgacaagaagagaggcgtgaagagacccagagaggaccacggcagaggctacttcgagtacatcgaggagaacaagtacagcagagccaagagcccccagccccccgtggaggaggaggacgagcacttcgacgacaccgtggtgtgcctggacacctacaactgcgacctgcacttcaagatcagcagagacagactgagcgccagcagcctgaccatggagagcttcgccttcctgtgggccggcggcagagccagctacggcgtgagcaagggcaaggtgtgcttcgagatgaaggtgaccgagaagatccccgtgagacacctgtacaccaaggacatcgacatccacgaggtgagaatcggctggagcctgaccaccagcggcatgctgctgggcgaggaggagttcagctacggctacagcctgaagggcatcaagacctgcaactgcgagaccgaggactacggcgagaagttcgacgagaacgacgtgatcacctgcttcgccaacttcgagagcgacgaggtggagctgagctacgccaagaacggccaggacctgggcgtggccttcaagatcagcaaggaggtgctggccggcagacccctgttcccccacgtgctgtgccacaactgcgccgtggagttcaacttcggccagaaggagaagccctag

SEQ ID NO: 12346 - DNA, 2922 bp, synthetic construct
  source 1..2922: mol_type = other DNA; note = Synthetic coding sequence
agcagcagcgacaaggagagcatcctgaccatcctgaaggtgctgggcgacctgctgagcgtgggcaccgacagaagaatccactacatgatcagcaagggcggcagcgaggccctgctgcagaccctggtggacaccgccagaaccgccccccccgactacgacatcctgctgcccctgttcagactgctggccaaggtgggcctgagagacaagaagatcggcagaaaggccctggagctggaggccctggacgtgaccctgatcctggccagaaagaacctgagccacggccagaacctgctgcactgcctgtgggccctgagagtgttcgccagcagcgtgagcatgggcgccatgctgggcatcaacggcgccatggagctgctgttcaaggtgatcaccccctacaccagaaagagaacccaggccatcagagccgccaccgaggtgctggccgccctgctgaagagcaagagcaacggcagaagagccgtgaacagaggctacgtgaccagcctgctgggcctgcaccaggactggcacagccacgacaccgccaacgcctacgtgcagatcagaagaggcctgctgctgtgcctgagacacatcgccgccctgagaagcggcagagaggccttcctggccgcccagggcatggagatcctgttcagcaccacccagaactgcctggacgacaagagcatggagcccgtgatcagcgtggtgctgcagatcctgagacagtgctaccccaccagccccctgcccctggtgaccgccagcagcgcctacgccttccccgtgcccggctgcatcaccaccgagcccccccacgacctgcccgaggaggacttcgaggacgacggcgacgacgaggtggacaaggacagcgacaccgaggacggcaaggtggaggacgacgacctggagaccgacgtgaacaagctgagcagcaagcccggcctggacagacccgaggaggagctgatgcagtacgaggtgatgtgcctggagctgagctacagcttcgaggagctgcagagcaagctgggcgacgacctgaacagcgagaagacccagtacgccaaccaccaccacatccccgccgccgccagcagcaagcagcactgctacagcaaggaccagagcagctgcggccaggagagagagtacgccgtgcagaccagcctgctgtgcagagtgaagaccggcagaagcaccgtgcacctgggcagcaagaagaaccccggcgtgaacctgtaccagaacgtgcagagcaacagcctgagaagagacagcagcgagagcgagatccccgacatccaggccagccccaaggccgacgcctgggacgtggacgccatcttctgccccagaatgagcgccagcttcagcaacagcaccagaaccagagaggtggtgaaggtgatcgacaagctgctgcagacccacctgaagagagtgcccttccacgacccctacctgtacatggccaaggccagaagaaccagcagcgtggtggacttcaagatgatggccttccccgacgtgtggggccactgccccccccccaccacccagcccatgctggagagaaagtgcggcgtgcagagaatcagaatcttcgaggacatcagaagactgatccagcccagcgacgtgatcaacaaggtggtgttcagcctggacgagccctggcccctgcaggacaacgccagcaactgcctgagattcttcagcaagttcgagagcggcaacctgagaaaggccatccaggtgagagagttcgagtacgacctgctggtgaacgccgacgtgaacagcacccagcaccagcagtggttctacttcaaggtgagcggcatgcaggccgccatcccctaccacttcaacatcatcaactgcgagaagcccaacagccagttcaactacggcatgcagcccaccctgtacagcgtgaaggaggccctgctgggcaagcccacctggatcagaaccggccacgagatctgctactacaagaaccactacagacagagcaccgccgtggccggcggcgccagcggcaagtgctactacaccctgaccttcgccgtgaccttcccccacagcgaggacgtgtgctacctggcctaccactacccctacacctacaccgccctgatgacccacctggacatcctggagaagagcgtgaacctgaaggaggtgtacttcagacaggacgtgctgtgccagaccctgggcggcaacccctgccccctggtgaccatcaccgccatgcccgagagcaacagcgacgagcacctggagcagttcagacacagaccctaccaggtgatcaccgccagagtgcaccccggcgagagcaacgccagctgggtgatgaagggcaccctggagttcctggtgagcagcgaccccgtggccagactgctgagagagaacttcatcttcaagatcatccccatgctgaaccccgacggcgtgatcaacggcaaccacagatgcagcctgagcggcgaggacctgaacagacagtggctgagccccagcgcccacctgcagcccaccatctaccacgccaagggcctgctgtaccacctgagcagcatcggcagaagccccgtggtgagccacttcctgctggtgttctgcgacttccacggccacagccagaagaagaacgtgttcctgtacggctgcagcatcaaggagaccctgtggcaggccgcctgcaccgtgggcaccagcaccatcctggaggaggtgaactacagaaccctgcccaagatcctggacaagctggcccccgccttcaccatgagcagctgcagcttcctggtggagaagagcagagccagcaccgccagagtggtggtgtggagagagatgggcgtgagcagaagctacacctag

SEQ ID NO: 12347 - DNA, 7752 bp, synthetic construct
  source 1..7752: mol_type = other DNA; note = Synthetic coding sequence
tgaagcagcatcaccttcagcgtgaaggtggagggcagacccgtgcccaccgtgcactggctgagagaggaggccgagagaggcgtgctgtggatcggccccgacacccccggctacaccgtggccagcagcgcccagcagcacagcctggtgctgctggacgtgggcagacagcaccagggcacctacacctgcatcgccagcaacgccgccggccaggccctgtgcagcgccagcctgcacgtgagcggcctgcccaaggtggaggagcaggagaaggtgaaggaggccctgatcagcaccttcctgcagggcaccacccaggccatcagcgcccagggcctggagaccgccagcttcgccgacctgggcggccagagaaaggaggagcccctggccgccaaggaggccctgggccacctgagcctggccgaggtgggcaccgaggagttcctgcagaagctgaccagccagatcaccgagatggtgagcgccaagatcacccaggccaagctgcaggtgcccggcggcgacagcgacgaggacagcaagacccccagcgccagccccagacacggcagaagcagacccagcagcagcatccaggagagcagcagcgagagcgaggacggcgacgccagaggcgagatcttcgacatctacgtggtgaccgccgactacctgcccctgggcgccgagcaggacgccatcaccctgagagagggccagtacgtggaggtgctggacgccgcccaccccctgagatggctggtgagaaccaagcccaccaagagcagccccagcagacagggctgggtgagccccgcctacctggacagaagactgaagctgagccccgagtggggcgccgccgaggcccccgagttccccggcgaggccgtgagcgaggacgagtacaaggccagactgagcagcgtgatccaggagctgctgagcagcgagcaggccttcgtggaggagctgcagttcctgcagagccaccacctgcagcacctggagagatgcccccacgtgcccatcgccgtggccggccagaaggccgtgatcttcagaaacgtgagagacatcggcagattccacagcagcagcttcctgcaggagctgcagcagtgcgacaccgacgacgacgtggccatgtgcttcatcaagaaccaggccgccttcgagcagtacctggagttcctggtgggcagagtgcaggccgagagcgtggtggtgagcaccgccatccaggagttctacaagaagtacgccgaggaggccctgctggccggcgaccccagccagcccccccccccccccctgcagcactacctggagcagcccgtggagagagtgcagagataccaggccctgctgaaggagctgatcagaaacaaggccagaaacagacagaactgcgccctgctggagcaggcctacgccgtggtgagcgccctgccccagagagccgagaacaagctgcacgtgagcctgatggagaactaccccggcaccctgcaggccctgggcgagcccatcagacagggccacttcatcgtgtgggagggcgcccccggcgccagaatgccctggaagggccacaacagacacgtgttcctgttcagaaaccacctggtgatctgcaagcccagaagagacagcagaaccgacaccgtgagctacgtgttcagaaacatgatgaagctgagcagcatcgacctgaacgaccaggtggagggcgacgacagagccttcgaggtgtggcaggagagagaggacagcgtgagaaagtacctgctgcaggccagaaccgccatcatcaagagcagctgggtgaaggagatctgcggcatccagcagagactggccctgcccgtgtggagaccccccgacttcgaggaggagctggccgactgcaccgccgagctgggcgagaccgtgaagctggcctgcagagtgaccggcacccccaagcccgtgatcagctggtacaaggacggcaaggccgtgcaggtggacccccaccacatcctgatcgaggaccccgacggcagctgcgccctgatcctggacagcctgaccggcgtggacagcggccagtacatgtgcttcgccgccagcgccgccggcaactgcagcaccctgggcaagatcctggtgcaggtgccccccagattcgtgaacaaggtgagagccagccccttcgtggagggcgaggacgcccagttcacctgcaccatcgagggcgccccctacccccagatcagatggtacaaggacggcgccctgctgaccaccggcaacaagttccagaccctgagcgagcccagaagcggcctgctggtgctggtgatcagagccgccagcaaggaggacctgggcctgtacgagtgcgagctggtgaacagactgggcagcgccagagccagcgccgagctgagaatccagagccccatgctgcaggcccaggagcagtgccacagagagcagctggtggccgccgtggaggacaccaccctggagagagccgaccaggaggtgaccagcgtgctgaagagactgctgggccccaaggcccccggccccagcaccggcgacctgaccggccccggcccctgccccagaggcgcccccgccctgcaggagaccggcagccagccccccgtgaccggcaccagcgaggcccccgccgtgccccccagagtgccccagcccctgctgcacgagggccccgagcaggagcccgaggccatcgccagagcccaggagtggaccgtgcccatcagaatggagggcgccgcctggcccggcgccggcaccggcgagctgctgtgggacgtgcacagccacgtggtgagagagaccacccagagaacctacacctaccaggccatcgacacccacaccgccagaccccccagcatgcaggtgaccatcgaggacgtgcaggcccagaccggcggcaccgcccagttcgaggccatcatcgagggcgacccccagcccagcgtgacctggtacaaggacagcgtgcagctggtggacagcaccagactgagccagcagcaggagggcaccacctacagcctggtgctgagacacgtggccagcaaggacgccggcgtgtacacctgcctggcccagaacaccggcggccaggtgctgtgcaaggccgagctgctggtgctgggcggcgacaacgagcccgacagcgagaagcagagccacagaagaaagctgcacagcttctacgaggtgaaggaggagatcggcagaggcgtgttcggcttcgtgaagagagtgcagcacaagggcaacaagatcctgtgcgccgccaagttcatccccctgagaagcagaaccagagcccaggcctacagagagagagacatcctggccgccctgagccaccccctggtgaccggcctgctggaccagttcgagaccagaaagaccctgatcctgatcctggagctgtgcagcagcgaggagctgctggacagactgtacagaaagggcgtggtgaccgaggccgaggtgaaggtgtacatccagcagctggtggagggcctgcactacctgcacagccacggcgtgctgcacctggacatcaagcccagcaacatcctgatggtgcaccccgccagagaggacatcaagatctgcgacttcggcttcgcccagaacatcacccccgccgagctgcagttcagccagtacggcagccccgagttcgtgagccccgagatcatccagcagaaccccgtgagcgaggccagcgacatctgggccatgggcgtgatcagctacctgagcctgacctgcagcagccccttcgccggcgagagcgacagagccaccctgctgaacgtgctggagggcagagtgagctggagcagccccatggccgcccacctgagcgaggacgccaaggacttcatcaaggccaccctgcagagagccccccaggccagacccagcgccgcccagtgcctgagccacccctggttcctgaagagcatgcccgccgaggaggcccacttcatcaacaccaagcagctgaagttcctgctggccagaagcagatggcagagaagcctgatgagctacaagagcatcctggtgatgagaagcatccccgagctgctgagaggcccccccgacagccccagcctgggcgtggccagacacctgtgcagagacaccggcggcagcagcagcagcagcagcagcagcgacaacgagctggcccccttcgccagagccaagagcctgccccccagccccgtgacccacagccccctgctgcaccccagaggcttcctgagacccagcgccagcctgcccgaggaggccgaggccagcgagagaagcaccgaggcccccgccccccccgccagccccgagggcgccggcccccccgccgcccagggctgcgtgcccagacacagcgtgatcagaagcctgttctaccaccaggccggcgagagccccgagcacggcgccctggcccccggcagcagaagacaccccgccagaagaagacacctgctgaagggcggctacatcgccggcgccctgcccggcctgagagagcccctgatggagcacagagtgctggaggaggaggccgccagagaggagcaggccaccctgctggccaaggcccccagcttcgagaccgccctgagactgcccgccagcggcacccacctggcccccggccacagccacagcctggagcacgacagccccagcacccccagacccagcagcgaggcctgcggcgaggcccagagactgcccagcgcccccagcggcggcgcccccatcagagacatgggccacccccagggcagcaagcagctgcccagcaccggcggccaccccggcaccgcccagcccgagagacccagccccgacagcccctggggccagcccgcccccttctgccaccccaagcagggcagcgccccccaggagggctgcagcccccaccccgccgtggccccctgcccccccggcagcttcccccccggcagctgcaaggaggcccccctggtgcccagcagccccttcctgggccagccccaggccccccccgcccccgccaaggccagcccccccctggacagcaagatgggccccggcgacatcagcctgcccggcagacccaagcccggcccctgcagcagccccggcagcgccagccaggccagcagcagccaggtgagcagcctgagagtgggcagcagccaggtgggcaccgagcccggccccagcctggacgccgagggctggacccaggaggccgaggacctgagcgacagcacccccaccctgcagagaccccaggagcaggccaccatgagaaagttcagcctgggcggcagaggcggctacgccggcgtggccggctacggcaccttcgccttcggcggcgacgccggcggcatgctgggccagggccccatgtgggccagaatcgcctgggccgtgagccagagcgaggaggaggagcaggaggaggccagagccgagagccagagcgaggagcagcaggaggccagagccgagagccccctgccccaggtgagcgccagacccgtgcccgaggtgggcagagcccccaccagaagcagccccgagcccaccccctgggaggacatcggccaggtgagcctggtgcagatcagagacctgagcggcgacgccgaggccgccgacaccatcagcctggacatcagcgaggtggaccccgcctacctgaacctgagcgacctgtacgacatcaagtacctgcccttcgagttcatgatcttcagaaaggtgcccaagagcgcccagcccgagccccccagccccatggccgaggaggagctggccgagttccccgagcccacctggccctggcccggcgagctgggcccccacgccggcctggagatcaccgaggagagcgaggacgtggacgccctgctggccgaggccgccgtgggcagaaagagaaagtggagcagccccagcagaagcctgttccacttccccggcagacacctgcccctggacgagcccgccgagctgggcctgagagagagagtgaaggccagcgtggagcacatcagcagaatcctgaagggcagacccgagggcctggagaaggagggcccccccagaaagaagcccggcctggccagcttcagactgagcggcctgaagagctgggacagagcccccaccttcctgagagagctgagcgacgagaccgtggtgctgggccagagcgtgaccctggcctgccaggtgagcgcccagcccgccgcccaggccacctggagcaaggacggcgcccccctggagagcagcagcagagtgctgatcagcgccaccctgaagaacttccagctgctgaccatcctggtggtggtggccgaggacctgggcgtgtacacctgcagcgtgagcaacgccctgggcaccgtgaccaccaccggcgtgctgagaaaggccgagagacccagcagcagcccctgccccgacatcggcgaggtgtacgccgacggcgtgctgctggtgtggaagcccgtggagagctacggccccgtgacctacatcgtgcagtgcagcctggagggcggcagctggaccaccctggccagcgacatcttcgactgctgctacctgaccagcaagctgagcagaggcggcacctacaccttcagaaccgcctgcgtgagcaaggccggcatgggcccctacagcagccccagcgagcaggtgctgctgggcggccccagccacctggccagcgaggaggagagccagggcagaagcgcccagcccctgcccagcaccaagaccttcgccttccagacccagatccagagaggcagattcagcgtggtgagacagtgctgggagaaggccagcggcagagccctggccgccaagatcatcccctaccaccccaaggacaagaccgccgtgctgagagagtacgaggccctgaagggcctgagacacccccacctggcccagctgcacgccgcctacctgagccccagacacctggtgctgatcctggagctgtgcagcggccccgagctgctgccctgcctggccgagagagccagctacagcgagagcgaggtgaaggactacctgtggcagatgctgagcgccacccagtacctgcacaaccagcacatcctgcacctggacctgagaagcgagaacatgatcatcaccgagtacaacctgctgaaggtggtggacctgggcaacgcccagagcctgagccaggagaaggtgctgcccagcgacaagttcaaggactacctggagaccatggagctgctggagggccagggcgccgtgccccagaccgacatctgggccatcggcgtgaccgccttcatcatgctgagcgccgagtaccccgtgagcagcgagggcgccagagacctgcagagaggcctgagaaagggcctggtgagactgagcagatgctacgccggcctgagcggcggcgccgtggccttcctgagaagcaccctgtgcgcccagccctggggcagaccctgcgccagcagctgcctgcagtgcccctggctgaccgaggagggccccgcctgcagcagacccgcccccgtgaccttccccaccgccagactgagagtgttcgtgagaaacagagagaagagaagagccctgctgtacaagagacacaacctggcccaggtgagatag

SEQ ID NO: 12348 - DNA, 1749 bp, synthetic construct
  source 1..1749: mol_type = other DNA; note = Synthetic coding sequence
atggagaaggccgtgaacgacggcagccacagcgaggagctgttctgccacctgaagaccatcagcgagaaggaggacctgcccagatgcaccagcgagagccacctgagctgcctgaagcaggacatcctgaacgagaagaccgagctggaggccaccctgaaggaggccgagctggtgacccacagcgtggagctgctgctgcccctgttcaaggacaccatcgagaagatcaacttcgagaacgccaacctgagcgccctgaacctgaagatcagcgagcagaaggagatcctgatcaaggagctggacaccttcaagagcgtgaagctggccctggagcacctgctgagaaagagagactacaagcagaccggcgacaacctgagcagcatgctgctggagaacctgaccgacaacgagagcgagaacaccaacctgaagaagaaggtgttcgagaaggaggcccacatccaggagctgagctgcctgttccagagcgagaaggccaacaccctgaaggccaacagattcagccagagcgtgaaggtggtgcacgagagactgcagatccagatccacaagagagaggccgagaacgacaagctgaaggagtacgtgaagagcctggagaccaagatcgccaagtggaacctgcagagcagaatgaacaagaacgaggccatcgtgatgaaggaggccagcagacagaagaccgtggccctgaagaaggccagcaaggtgtacaagcagagactggaccacttcaccggcgccatcgagaagctgaccagccagatcagagaccaggaggccaagctgagcgagaccatcagcgccagcaacgcctggaagagccactacgagaagatcgtgatcgagaagaccgagctggaggtgcagatcgagaccatgaagaagcagatcatcaacctgctggaggacctgaagaagatggaggaccacggcaagaacagctgcgaggagatcctgagaaaggtgcacagcatcgagtacgagaacgagaccctgaacctggagaacaccaagctgaagaccaccctggccgccctgaaggacgaggtggtgagcgtggagaacgagctgagcgagctgcaggaggtggagaagaagcagaagaccctgatcgagatgtacaagacccaggtgcagaagctgcaggaggccgccgagatcgtgaagagcagatgcgagaacctgctgcacaagaacaaccagatcaccaagaccaagaacaagaacgtggagaagatgagaggccagatggagagccacctgaaggagctggagagagtgtgcgacagcctgaccgccgccgagagaagactgcacgagtgccaggtggacggcaaccacaacctgctgaccaagctgagcctggaggaggagaactgcctgatccagctgaagtgcgagaacctgcagcagaagctggagcagatggacgccgagaacaaggagctggagaagaagctggccaaccaggaggagtgcctgaagcacagcaacctgaagttcaaggagaagagcgccgagtacaccgccctggccagacagctggaggccgccctggaggagggcagacagaaggtggccgaggagatcgagaagatgagcagcagagagagcgccctgcagatcaagatcctggacctggagaccgagctgagaaagaagaacgaggagcagaaccagctggtgtgcaagatgaacagcaccaacggctag

SEQ ID NO: 12349 - DNA, 384 bp, synthetic construct
  source 1..384: mol_type = other DNA; note = Synthetic coding sequence
atggtgagcagcggcagaagatggctgagagagcagcagcacagaagatggagactgcactgcctgaagctgcagcccctgagccccgtgcccagcgacatcgagatcagcagaggccagacccccaaggccgtggacgtgctggccaaggagatcggcctgctggccgacgagatcgagatctacggcaagagcaaggccaaggtgagactgagcgtgctggagagactgaaggaccaggccgacggcaagtacgtgctggtggccggcatcacccccacccccctgggcgagggcaagagcaccgtgaccatcggcctggtgcaggccctgaccgcccacctgaacgtgaacagcttcgcctgcctgagacagcccagctag

SEQ ID NO: 12350 - DNA, 1929 bp, synthetic construct
  source 1..1929: mol_type = other DNA; note = Synthetic coding sequence
atgaagatcttctgcagcagagccaaccccaccaccggcagcgtggagtggctggaggaggacgagcactacgactaccaccaggagatcgccagaagcagctacgccgacatgctgcacgacaaggacagagtgttcaagcccatggccgacgccgccgtgaagatcgtggagaagaacggcttcagcgacaagatcaaggtgatcaacaagcacagcaccgaggtgaccgtgggccccgagggcgacatgccctgcagagccaacatcctggtgaccgagctgttcgacaccgagctgatcggcgagggcgccctgcccagctacgagcacgcccacagacacctggtggaggagaactgcgaggccgtgccccacagagccaccgtgtacgcccagctggtggagagcggcagaatgtggagctggaacaagctgttccccatccacgtgcagaccagcctgggcgagcaggtgatcgtgccccccgtggacgtggagagctgccccggcgcccccagcgtgtgcgacatccagctgaaccaggtgagccccgccgacttcaccgtgctgagcgacgtgctgcccatgttcagcatcgacttcagcaagcaggtgagcagcagcgccgcctgccacagcagaagattcgagcccctgaccagcggcagagcccaggtggtgctgagctggtgggacatcgagatggaccccgagggcaagatcaagtgcaccatggcccccttctgggcccacagcgaccccgaggagatgcagtggagagaccactggatgcagtgcgtgtacttcctgccccaggaggagcccgtggtgcagggcagcgccctgtacctggtggcccaccacgacgactactgcgtgtggtacagcctgcagagaaccagccccgagaagaacgagagagtgagacagatgagacccgtgtgcgactgccaggcccacctgctgtggaacagacccagattcggcgagatcaacgaccaggacagaaccgacagatacgtgcaggccctgagaaccgtgctgaagcccgacagcgtgtgcctgtgcgtgagcgacggcagcctgctgagcgtgctggcccaccacctgggcgtggagcaggtgttcaccgtggagagcagcgccgccagccacaagctgctgagaaagatcttcaaggccaaccacctggaggacaagatcaacatcatcgagaagagacccgagctgctgaccaacgaggacctgcagggcagaaaggtgagcctgctgctgggcgagcccttcttcaccaccagcctgctgccctggcacaacctgtacttctggtacgtgagaaccgccgtggaccagcacctgggccccggcgccatggtgatgccccaggccgccagcctgcacgccgtggtggtggagttcagagacctgtggagaatcagaagcccctgcggcgactgcgagggcttcgacgtgcacatcatggacgacatgatcaagagagccctggacttcagagagagcagagaggccgagccccaccccctgtgggagtacccctgcagaagcctgagcgagccctggcagatcctgaccttcgacttccagcagcccgtgcccctgcagcccctgtgcgccgagggcaccgtggagctgagaagacccggccagagccacgccgccgtgctgtggatggagtaccacctgacccccgagtgcaccctgagcaccggcctgctggagcccgccgaccccgagggcggctgctgctggaacccccactgcaagcaggccgtgtacttcttcagccccgcccccgaccccagagccctgctgggcggccccagaaccgtgagctacgccgtggagttccaccccgacaccggcgacatcatcatggagttcagacacgccgacacccccgactag

SEQ ID NO: 12351 - DNA, 300 bp, synthetic construct
  source 1..300: mol_type = other DNA; note = Synthetic coding sequence
atggtggtgaagctgctgagcaacaagagaagccaggccgtgggcatcctgatgagcagcctgcacctggacatgaaggacatccagcacgccgtggtgaacctggacaacagcgtggtggacctggagaccctgcaggccctgtacgagaacagagcccagagcgacgagctggagaagatcgagaagcacggcagaagcagcaaggacaaggagaacgccaagagcctggacaagcccgagcagttcctgtacgagctgagcctgatccccaacttcagcgagagagtgttctgctag

SEQ ID NO: 12352 - DNA, 390 bp, synthetic construct
  source 1..390: mol_type = other DNA; note = Synthetic coding sequence
atgggcggctgcttcagcaagcccaagcccgtggagctgaagatcgaggtggtgctgcccgagaaggagagaggcaaggaggagctgagcgccagcggcaagggcagccccagagcctaccagggcaacggcaccgccagacacttccacaccgaggagagactgagcaccccccacccctaccccagcccccaggactgcgtggaggccgccgtgtgccacgtgaaggacctggagaacggccagatgagagaggtggagctgggctggggcaaggtgctgctggtgaaggacaacggcgagttccacgccctgggccacaagtgcccccactacggcgcccccctggtgaagggcgtgctgagcagaggcagagtgagatgcccctag

SEQ ID NO: 12353 - DNA, 453 bp, synthetic construct
  source 1..453: mol_type = other DNA; note = Synthetic coding sequence
atgaacctggccgagatctgcgacaacgccaagaagggcagagagtacgccctgctgggcaactacgacagcagcatggtgtactaccagggcgtgatgcagcagatccagagacactgccagagcgtgagagaccccgccatcaagggcaagtggcagcaggtgagacaggagctgctggaggagtacgagcaggtgaagagcatcgtgagcaccctggagagcttcaagatcgacaagccccccgacttccccgtgagctgccaggacgagcccttcagagaccccgccgtgtggcccccccccgtgcccgccgagcacagagcccccccccagatcagaagacccaacagagaggtgagacccctgagaaaggagatggccggcgtgggcgccagaggccccgtgggcagagcccaccccatcagcaagagcgagaagcccagcacctag

SEQ ID NO: 12354 - DNA, 498 bp, synthetic construct
  source 1..498: mol_type = other DNA; note = Synthetic coding sequence
atgggcgtgaaccagagcgtgggcttcccccccgtgaccggcccccacctggtgggctgcggcgacgtgatggagggccagaacctgcagggcagcttcttcagactgttctacccctgccagaaggccgaggagaccatggagcagcccctgtggatccccagatacgagtactgcaccggcctggccgagtacctgcagttcaacaagagatgcggcggcctgctgttcaacctggccgtgggcagctgcagactgcccgtgagctggaacggccccttcaagaccaaggacagcggctaccccctgatcatcttcagccacggcctgggcgccttcagaaccctgtacagcgccttctgcatggagctggccagcagaggcttcgtggtggccgtgcccgagcacagagacagaagcgccgccaccacctacttctgcaagcaggcccccgaggagaaccagcccaccaacgagagcctgcaggaggagtggtag

SEQ ID NO: 12355 - DNA, 270 bp, synthetic construct; identical to SEQ ID NO: 11466
  source 1..270: mol_type = other DNA; note = Synthetic coding sequence

SEQ ID NO: 12356 - DNA, 6009 bp, synthetic construct
  source 1..6009: mol_type = other DNA; note = Synthetic coding sequence
atggaggagagaaagcacgagaccatgaaccccgcccacgtgctgttcgacagattcgtgcaggccaccacctgcaagggcaccctgaaggccttccaggagctgtgcgaccacctggagctgaagcccaaggactacagaagcttctaccacaagctgaagagcaagctgaactactggaaggccaaggccctgtgggccaagctggacaagagaggcagccacaaggactacaagaagggcaaggcctgcaccaacaccaagtgcctgatcatcggcgccggcccctgcggcctgagaaccgccatcgacctgagcctgctgggcgccaaggtggtggtgatcgagaagagagacgccttcagcagaaacaacgtgctgcacctgtggcccttcaccatccacgacctgagaggcctgggcgccaagaagttctacggcaagttctgcgccggcgccatcgaccacatcagcatcagacagctgcagctgatcctgctgaaggtggccctgatcctgggcatcgagatccacgtgaacgtggagttccagggcctgatccagccccccgaggaccaggagaacgagagaatcggctggagagccctggtgcaccccaagacccaccccgtgagcgagtacgagttcgaggtgatcatcggcggcgacggcagaagaaacaccctggagggcttcagaagaaaggagttcagaggcaagctggccatcgccatcaccgccaacttcatcaacagaaacaccaccgccgaggccaaggtggaggagatcagcggcgtggccttcatcttcaaccagaagttcttccaggagctgagagaggccaccggcatcgacctggagaacatcgtgtactacaaggacgacacccactacttcgtgatgaccgccaagaagcagagcctgctggacaagggcgtgatcctgcacgactacgccgacaccgagctgctgctgagcagagagaacgtggaccaggaggccctgctgagctacgccagagaggccgccgacttcagcacccagcagcagctgcccagcctggacttcgccatcaaccactacggccagcccgacgtggccatgttcgacttcacctgcatgtacgccagcgagaacgccgccctggtgagagagcagaacggccaccagctgctggtggccctggtgggcgacagcctgctggagcccttctggcccatgggcaccggcatcgccagaggcttcctggccgccatggacagcgcctggatggtgagaagctggagcctgggcaccagccccctggaggtgctggccgagagagagagcatctacagactgctgccccagaccacccccgagaacgtgagcaagaacttcagccagtacagcatcgaccccgtgaccagataccccaacatcaacgtgaacttcctgagacccagccaggtgagacacctgtacgacaccggcgagaccaaggacatccacctggagatggagagcctggtgaacagcagaaccacccccaagctgaccagaaacgagagcgtggccagaagcagcaagctgctgggctggtgccagagacagaccgacggctacgccggcgtgaacgtgaccgacctgaccatgagctggaagagcggcctggccctgtgcgccatcatccacagatacagacccgacctgatcgacttcgacagcctggacgagcagaacgtggagaagaacaaccagctggccttcgacatcgccgagaaggagctgggcatcagccccatcatgaccggcaaggagatggccagcgtgggcgagcccgacaagctgagcatggtgatgtacctgacccagttctacgagatgttcaaggacagcctgcccagcagcgacaccctggacctgaacgccgaggagaaggccgtgctgatcgccagcaccagaagccccatcagcttcctgagcaagctgggccagaccatcagcagaaagagaagccccaaggacaagaaggagaaggacctggacggcgccggcaagagaagaaagaccagccagagcgaggaggaggaggcccccagaggccacagaggcgagagacccaccctggtgagcaccctgaccgacagaagaatggacgtggccgtgggcaaccagaacaaggtgaagtacatggccacccagctgctggccaagttcgaggagaacgcccccgcccagagcatcggcatcagaagacagggcagcatgaagaaggagttcccccagaacctgggcggcagcgacacctgctacttctgccagaagagagtgtacgtgatggagagactgagcgccgagggcaagttcttccacagaagctgcttcaagtgcgagtactgcgccaccaccctgagactgagcgcctacgcctacgacatcgaggacggcaagttctactgcaagccccactactgctacagactgagcggctacgcccagagaaagagacccgccgtggcccccctgagcggcaaggaggccaagggccccctgcaggacggcgccaccaccgacgccaacggcagagccaacgccgtggccagcagcaccgagagaacccccggcagcggcgtgaacggcctggaggagcccagcatcgccaagagactgagaggcacccccgagagaatcgagctggagaactacagactgagcctgagacaggccgaggccctgcaggaggtgcccgaggagacccaggccgagcacaacctgagcagcgtgctggacaccggcgccgaggaggacgtggccagcagcagcagcgagagcgagatggaggaggagggcgaggaggaggaggaggagcccagactgccccccagcgacctgggcggcgtgccctggaaggaggccgtgagaatccacgccctgctgaagggcaagagcgaggaggagctggaggccagcaagagcttcggccccggcaacgaggaggaggaggaggaggaggaggagtacgaggaggaggaggaggaggactacgacgaggaggaggaggagagcagcgaggccggcaaccagagactgcagcaggtgatgcacgccgccgaccccctggagatccaggccgacgtgcactggacccacatcagagagagagaggaggaggagagaatggcccccgccagcgagagcagcgccagcggcgcccccctggacgagaacgacctggaggaggacgtggacagcgagcccgccgagatcgagggcgaggccgccgaggacggcgaccccggcgacaccggcgccgagctggacgacgaccagcactggagcgacagccccagcgacgccgacagagagctgagactgccctgccccgccgagggcgaggccgagctggagctgagagtgagcgaggacgaggagaagctgcccgccagccccaagcaccaggagagaggccccagccaggccaccagccccatcagaagcccccaggagagcgccctgctgttcatccccgtgcacagccccagcaccgagggcccccagctgccccccgtgcccgccgccacccaggagaagagccccgaggagagactgttccccgagcccctgctgcccaaggagaagcccaaggccgacgcccccagcgacctgaaggccgtgcacagccccatcagaagccagcccgtgaccctgcccgaggccagaacccccgtgagccccggcagcccccagccccagccccccgtggccgccagcacccccccccccagccccctgcccatctgcagccagccccagcccagcaccgaggccaccgtgcccagccccacccagagccccatcagattccagcccgcccccgccaagaccagcacccccctggcccccctgcccgtgcagagccagagcgacaccaaggacagactgggcagccccctggccgtggacgaggccctgagaagaagcgacctggtggaggagttctggatgaagagcgccgagatcagaagaagcctgggcctgacccccgtggacagaagcaagggccccgagcccagcttccccacccccgccttcagacccgtgagcctgaagagctacagcgtggagaagagcccccaggacgagggcctgcacctgctgaagcccctgagcatccccaagagactgggcctgcccaagcccgagggcgagcccctgagcctgcccacccccagaagccccagcgacagagagctgagaagcgcccaggaggagagaagagagctgagcagcagcagcggcctgggcctgcacggcagcagcagcaacatgaagaccctgggcagccagagcttcaacaccagcgacagcgccatgctgaccccccccagcagccccccccccccccccccccccggcgaggagcccgccaccctgagaagaaagctgagagaggccgagcccaacgccagcgtggtgcccccccccctgcccgccacctggatgagaccccccagagagcccgcccagccccccagagaggaggtgagaaagagcttcgtggagagcgtggaggagatccccttcgccgacgacgtggaggacacctacgacgacaagaccgaggacagcagcctgcaggagaagttcttcaccccccccagctgctggcccagacccgagaagcccagacacccccccctggccaaggagaacggcagactgcccgccctggagggcaccctgcagccccagaagagaggcctgcccctggtgagcgccgaggccaaggagctggccgaggagagaatgagagccagagagaagagcgtgaagagccaggccctgagagacgccatggccagacagctgagcagaatgcagcagatggagctggccagcggcgcccccagacccagaaaggccagcagcgcccccagccagggcaaggagagaagacccgacagccccaccagacccaccctgagaggcagcgaggagcccaccctgaagcacgaggccaccagcgaggaggtgctgagcccccccagcgacagcggcggccccgacggcagcttcaccagcagcgagggcagcagcggcaagagcaagaagagaagcagcctgttcagccccagaagaaacaagaaggagaagaagagcaagggcgagggcagaccccccgagaagcccagcagcaacctgctggaggaggccgccgccaagcccaagagcctgtggaagagcgtgttcagcggctacaagaaggacaagaagaagaaggccgacgacaagagctgccccagcacccccagcagcggcgccaccgtggacagcggcaagcacagagtgctgcccgtggtgagagccgagctgcagctgagaagacagctgagcttcagcgaggacagcgacctgagcagcgacgacgtgctggagaagagcagccagaagagcagaagagagcccagaacctacaccgaggaggagctgaacgccaagctgaccagaagagtgcagaaggccgccagaagacaggccaagcaggaggagctgaagagactgcacagagcccagatcatccagagacagctgcagcaggtggaggagagacagagaagactggaggagagaggcgtggccgtggagaaggccctgagaggcgaggccggcatgggcaagaaggacgaccccaagctgatgcaggagtggttcaagctggtgcaggagaagaacgccatggtgagatacgagagcgagctgatgatcttcgccagagagctggagctggaggacagacagagcagactgcagcaggagctgagagagagaatggccgtggaggaccacctgaagaccgaggaggagctgagcgaggagaagcagatcctgaacgagatgctggaggtggtggagcagagagacagcctggtggccctgctggaggagcagagactgagagagagagaggaggacaaggacctggaggccgccatgctgagcaagggcttcagcctgaactggagctag

SEQ ID NO: 12357 - DNA, 540 bp, synthetic construct
  source 1..540: mol_type = other DNA; note = Synthetic coding sequence
atgagcagcaacgagtgcttcaagtgcggcagaagcggccactgggccagagagtgccccaccggcggcggcagaggcagaggcatgagaagcagaggcagaggcggcttcaccagcgacagaggcttccagttcgtgagcagcagcctgcccgacatctgctacagatgcggcgagagcggccacctggccaaggactgcgacctgcaggaggacgtggaggcctgctacaactgcggcagaggcggccacatcgccaaggactgcaaggagcccaagagagagagagagcagtgctgctacaactgcggcaagcccggccacctggccagagactgcgaccacgccgacgagcagaagtgctacagctgcggcgagttcggccacatccagaaggactgcaccaaggtgaagtgctacagatgcggcgagaccggccacgtggccatcaactgcagcaagaccagcgaggtgaactgctacagatgcggcgagagcggccacctggccagagagtgcaccatcgaggccaccgcctag

SEQ ID NO: 12358 - DNA, 1140 bp, synthetic construct
  source 1..1140: mol_type = other DNA; note = Synthetic coding sequence
gccagagccgtgcccgtgggcagcggcctgagaggcctgcagagaaccctgcccctggtggtgatcctgggcgccaccggcaccggcaagagcaccctggccctgcagctgggccagagactgggcggcgagatcgtgagcgccgacagcatgcagccccaggagatgggcaccgagaaggtgatcgacagaaaggtggagctggagaaggaggacggcctggtgctgcacaagagactgagccaggtggaccccgagatggccgccaagctgcacccccacgacaagagaaaggtggccagaagcctgcaggtgttcgaggagaccggcatcagccacagcgagttcctgcacagacagcacaccgaggagggcggcggccccctgggcggccccctgaagttcagcaacccctgcatcctgtggctgcacgccgaccaggccgacgagagactggacaagagagtggacgacatgctggccgccggcctgctggaggagctgagagacttccacagaagatacaaccagaagaacgtgagcgagaacagccaggactaccagcacggcatcttccagagcatcggcttcaaggagttccacgagtacctgatcaccgagggcaagtgcaccctggagaccagcaaccagctgctgaagaagggcatcgaggccctgaagcaggtgaccaagagatacgccagaaagcagaacagatgggtgaagaacagattcctgagcagacccggccccatcgtgccccccgtgtacggcctggaggtgagcgacgtgagcaagtgggaggagagcgtgctggagcccgccctggagatcgtgcagagcttcatccagggccacaagcccaccgccacccccatcaagatgccctacaacgaggccgagaacaagagaagctaccacctgtgcgacctgtgcgacagaatcatcatcggcgacagagagtgggccgcccacatcaagagcaagagccacctgaaccagctgaagaagagaagaagactggacagcgacgccgtgaacaccatcgagagccagagcgtgagccccgaccacaacaaggagcccaaggagaagggcagccccggccagaacgaccaggagctgaagtgcagcgtgtag

SEQ ID NO: 12359 - DNA, 483 bp, synthetic construct; identical to SEQ ID NO: 10977
  source 1..483: mol_type = other DNA; note = Synthetic coding sequence

SEQ ID NO: 12360 - DNA, 816 bp, synthetic construct
  source 1..816: mol_type = other DNA; note = Synthetic coding sequence
atgaacctggagaagctgagcaagcccgagctgctgaccctgttcagcatcctggagggcgagctggaggccagagacctggtgatcgaggccctgaaggcccagcacagagacaccttcatcgaggagagatacggcaagtacaacatcagcgaccccctgatggccctgcagagagacttcgagaccctgaaggagaagaacgacggcgagaagcagcccgtgtgcaccaaccccctgagcatcctgaaggtggtgatgaagcagtgcaagaacatgcaggagagaatgctgagccagctggccgccgccgagagcagacacagaaaggtgatcctggacctggaggaggagagacagagacacgcccaggacaccgccgagggcgacgacgtgacctacatgctggagaaggagagagagagactgacccagcagctggagttcgagaagagccaggtgaagaagttcgagaaggagcagaagaagctgagcagccagctggaggaggagagaagcagacacaagcagctgagcagcatgctggtgctggagtgcaagaaggccaccaacaaggccgccgaggagggccagaaggccggcgagctgagcctgaagctggagaaggagaagagcagagtgagcaagctggaggaggagctggccgccgagagaaagagaggcctgcagaccgaggcccaggtggagaagcagctgagcgagttcgacatcgagagagagcagctgagagccaagctgaacagagaggagaacagaaccaagaccctgaaggaggagatggagagcctgaagtag

SEQ ID NO: 12361 - DNA, 1482 bp, synthetic construct
  source 1..1482: mol_type = other DNA; note = Synthetic coding sequence
atggaccaggactacgagagaagactgctgagacagatcgtgatccagaacgagaacaccatgcccagagtgaccgagatgagaagaaccctgacccccgccagcagccccgtgagcagccccagcaagcacggcgacagattcatccccagcagagccggcgccaactggagcgtgaacttccacagaatcaacgagaacgagaagagccccagccagaacagaaaggccaaggacgccaccagcgacaacggcaaggacggcctggcctacagcgccctgctgaagaacgagctgctgggcgccggcatcgagaaggtgcaggacccccagaccgaggacagaagactgcagcccagcacccccgagaagaagggcctgttcacctacagcctgagcaccaagagaagcagccccgacgacggcaacgacgtgagcccctacagcctgagccccgtgagcaacaagagccagaagctgctgagaagccccagaaagcccaccagaaagatcagcaagatccccttcaaggtgctggacgcccccgagctgcaggacgacttctacctgaacctggtggactggagcagcctgaacgtgctgagcgtgggcctgggcacctgcgtgtacctgtggagcgcctgcaccagccaggtgaccagactgtgcgacctgagcgtggagggcgacagcgtgaccagcgtgggctggagcgagagaggcaacctggtggccgtgggcacccacaagggcttcgtgcagatctgggacgccgccgccggcaagaagctgagcatgctggagggccacaccgccagagtgggcgccctggcctggaacgccgagcagctgagcagcggcagcagagacagaatgatcctgcagagagacatcagaaccccccccctgcagagcgagagaagactgcagggccacagacaggaggtgtgcggcctgaagtggagcaccgaccaccagctgctggccagcggcggcaacgacaacaagctgctggtgtggaaccacagcagcctgagccccgtgcagcagtacaccgagcacctggccgccgtgaaggccatcgcctggagcccccaccagcacggcctgctggccagcggcggcggcaccgccgacagatgcatcagattctggaacaccctgaccggccagcccctgcagtgcatcgacaccggcagccaggtgtgcaacctggcctggagcaagcacgccaacgagctggtgagcacccacggctacagccagaaccagatcctggtgtggaagtaccccagcctgacccaggtggccaagctgaccggccacagctacagagtgctgtacctggccatgagccccgacggcgaggccatcgtgaccggcgccggcgacgagaccctgagattctggaacgtgttcagcaagaccagaagcaccaaggagagcgtgagcgtgctgaacctgttcaccagaatcagatag

SEQ ID NO: 12362 - DNA, 552 bp, synthetic construct
  source 1..552: mol_type = other DNA; note = Synthetic coding sequence
atgaagaaggagcacgtgctgcactgccagttcagcgcctggtaccccttcttcagaggcgtgaccatcaagagcgtgatcctgcccctgccccagaacgtgaaggactacctgctggacgacggcaccctggtggtgagcggcagagacgacccccccacccacagccagcccgacagcgacgacgaggccgaggagatccagtggagcgacgacgagaacaccgccaccctgaccgacgcctactggatcgccatgaacagcagcctgaagtgcaagaccctgagcgacatcttcctgctgttcaagagcagcgacttcatcaccagagacttcacccagcccttcatccactgcaccgacgacagccccgacccctgcatcgagtacgagctggtgctgagaaagtggtgcgagctgatccccggcgccgagttcagatgcttcgtgaaggagaacaagctgatcggcatcagccagagagactacacccagtactacgaccacatcagcaagcagaaggaggagatcagaagatgcatccaggactag

SEQ ID NO: 12363 - DNA, 672 bp, synthetic construct; identical to SEQ ID NO: 10373
  source 1..672: mol_type = other DNA; note = Synthetic coding sequence

SEQ ID NO: 12364 - DNA, 348 bp, synthetic construct
  source 1..348: mol_type = other DNA; note = Synthetic coding sequence
atgcccatcctgctgttcctgatcgacaccagcgccagcatgaaccagagaagccacctgggcaccacctacctggacaccgccaagggcgccgtggagaccttcatgaagctgagagccagagaccccgccagcagaggcgacagatacatgctggtgaccttcgaggagcccccctacgccatcaaggccggctggaaggagaaccacgccaccttcatgaacgagctgaagaacctgcaggccgagggcctgaccaccctgggccagagcctgagaaccgccttcgacctgctgaacctgaacagactggtgaccggcatcgacaactacggccaggtgggctag

SEQ ID NO: 12365 - DNA, 390 bp, synthetic construct; identical to SEQ ID NO: 10956
  source 1..390: mol_type = other DNA; note = Synthetic coding sequence

SEQ ID NO: 12366 - DNA, 2676 bp, synthetic construct
  source 1..2676: mol_type = other DNA; note = Synthetic coding sequence
atggtggcccccgtgctggagaccagccacgtgttctgctgccccaacagagtgagaggcgtgctgaactggagcagcggccccagaggcctgctggccttcggcaccagctgcagcgtggtgctgtacgaccccctgaagagagtggtggtgaccaacctgaacggccacaccgccagagtgaactgcatccagtggatctgcaagcaggacggcagccccagcaccgagctggtgagcggcggcagcgacaaccaggtgatccactgggagatcgaggacaaccagctgctgaaggccgtgcacctgcagggccacgagggccccgtgtacgccgtgcacgccgtgtaccagagaagaaccagcgaccccgccctgtgcaccctgatcgtgagcgccgccgccgacagcgccgtgagactgtggagcaagaagggccccgaggtgatgtgcctgcagaccctgaacttcggcaacggcttcgccctggccctgtgcctgagcttcctgcccaacaccgacgtgacctggaagaccggccaggtggagagaggcagagcctggaagccccccgccagcctggccctgtgcagcagaagctgcgacagcatggtgagctgctacgccagcatcctgtgcaaggccctgtggaaggagaagctgcacaccttctggcaccacaacagaatcagcttcctgcccagcgccttcagacccatccccatcctggcctgcggcaacgacgactgcagaatccacatcttcgcccagcagaacgaccagttccagaaggtgctgagcctgtgcggccacgaggactggatcagaggcgtggagtgggccgccttcggcagagacctgttcctggccagctgcagccaggactgcctgatcagaatctggaagctgtacatcaagagcaccagcctggagacccaggacgacgacaacatcagactgaaggagaacaccttcaccatcgagaacgagagcgtgaagatcgccttcgccgtgaccctggagaccgtgctggccggccacgagaactgggtgaacgccgtgcactggcagcccgtgttctacaaggacggcgtgctgcagcagcccgtgagactgctgagcgccagcatggacaagaccatgatcctgtgggcccccgacgaggagagcggcgtgtggctggagcaggtgagagtgggcgaggtgggcggcaacaccctgggcttctacgactgccagttcaacgaggacggcagcatgatcatcgcccacgccttccacggcgccctgcacctgtggaagcagaacaccgtgaaccccagagagtggacccccgagatcgtgatcagcggccacttcgacggcgtgcaggacctggtgtgggaccccgagggcgagttcatcatcaccgtgggcaccgaccagaccaccagactgttcgccccctggaagagaaaggaccagagccaggtgacctggcacgagatcgccagaccccagatccacggctacgacctgaagtgcctggccatgatcaacagattccagttcgtgagcggcgccgacgagaaggtgctgagagtgttcagcgcccccagaaacttcgtggagaacttctgcgccatcaccggccagagcctgaaccacgtgctgtgcaaccaggacagcgacctgcccgagggcgccaccgtgcccgccctgggcctgagcaacaaggccgtgttccagggcgacatcgccagccagcccagcgacgaggaggagctgctgaccagcaccggcttcgagtaccagcaggtggccttccagcccagcatcctgaccgagccccccaccgaggaccacctgctgcagaacaccctgtggcccgaggtgcagaagctgtacggccacggctacgagatcttctgcgtgacctgcaacagcagcaagaccctgctggccagcgcctgcaaggccgccaagaaggagcacgccgccatcatcctgtggaacaccaccagctggaagcaggtgcagaacctggtgttccacagcctgaccgtgacccagatggccttcagccccaacgagaagttcctgctggccgtgagcagagacagaacctggagcctgtggaagaagcaggacaccatcagccccgagttcgagcccgtgttcagcctgttcgccttcaccaacaagatcaccagcgtgcacagcagaatcatctggagctgcgactggagccccgacagcaagtacttcttcaccggcagcagagacaagaaggtggtggtgtggggcgagtgcgacagcaccgacgactgcatcgagcacaacatcggcccctgcagcagcgtgctggacgtgggcggcgccgtgaccgccgtgagcgtgtgccccgtgctgcaccccagccagagatacgtggtggccgtgggcctggagtgcggcaagatctgcctgtacacctggaagaagaccgaccaggtgcccgagatcaacgactggacccactgcgtggagaccagccagagccagagccacaccctggccatcagaaagctgtgctggaagaactgcagcggcaagaccgagcagaaggaggccgagggcgccgagtggctgcacttcgccagctgcggcgaggaccacaccgtgaagatccacagagtgaacaagtgcgccctgtag

SEQ ID NO: 12367 - DNA, 573 bp, synthetic construct
  source 1..573: mol_type = other DNA; note = Synthetic coding sequence
atgggccccctgcccagaaccgtggagctgttctacgacgtgctgagcccctacagctggctgggcttcgagatcctgtgcagataccagaacatctggaacatcaacctgcagctgagacccagcctgatcaccggcatcatgaaggacagcggcaacaagccccccggcctgctgcccagaaagggcctgtacatggccaacgacctgaagctgctgagacaccacctgcagatccccatccacttccccaaggacttcctgagcgtgatgctggagaagggcagcctgagcgccatgagattcctgaccgccgtgaacctggagcaccccgagatgctggagaaggccagcagagagctgtggatgagagtgtggagcagaaacgaggacatcaccgagccccagagcatcctggccgccgccgagaaggccggcatgagcgccgagcaggcccagggcctgctggagaagatcgccacccccaaggtgaagaaccagctgaaggagaccaccgaggccgcctgcagatacggcgagagaagcggctgggccctgtacctgcagccctag

SEQ ID NO: 12368 - DNA, 1482 bp, synthetic construct
  source 1..1482: mol_type = other DNA; note = Synthetic coding sequence
atgatgaagagacagctgcacagaatgagacagctggcccagaccggcagcctgggcagaacccccgagaccgccgagttcctgggcgaggacctgctgcaggtggagcagagactggagcccgccaagagagccgcccacaacatccacaagagactgcaggcctgcctgcagggccagagcggcgccgacatggacaagagagtgaagaagctgcccctgatggccctgagcaccaccatggccgagagcttcaaggagctggaccccgacagcagcatgggcaaggccctggagatgagctgcgccatccagaaccagctggccagaatcctggccgagttcgagatgaccctggagagagacgtgctgcagcccctgagcagactgagcgaggaggagctgcccgccatcctgaagcacaagaagagcctgcagaagctggtgagcgactggaacaccctgaagagcagactgagccaggccaccaagaacagcggcagcagccagggcctgggcggcagccccggcagccacagccacaccaccatggccaacaaggtggagaccctgaaggaggaggaggaggagctgaagagaaaggtggagcagtgcagagacgagtacctggccgacctgtaccacttcgtgaccaaggaggacagctacgccaactacttcatcagactgctggagatccaggccgactaccacagaagaagcctgagcagcctggacaccgccctggccgagctgagagagaaccacggccaggccgaccacagccccagcatgaccgccacccacttccccagagtgtacggcgtgagcctggccacccacctgcaggagctgggcagagagatcgccctgcccatcgaggcctgcgtgatgatgctgctgagcgagggcatgaaggaggagggcctgttcagactggccgccggcgccagcgtgctgaagagactgaagcagaccatggccagcgacccccacagcctggaggagttctgcagcgacccccacgccgtggccggcgccctgaagagctacctgagagagctgcccgagcccctgatgaccttcgacctgtacgacgactggatgagagccgccagcctgaaggagcccggcgccagactgcaggccctgcaggaggtgtgcagcagactgccccccgagaacctgagcaacctgagatacctgatgaagttcctggccagactggccgaggagcaggaggtgaacaagatgacccccagcaacatcgccatcgtgctgggccccaacctgctgtggccccccgagaaggagggcctggagtacagcggcgccatcagcgcccactgcaacctgagactgcccggcagcagcgacagcagcgccagcgcctgccaggtggccggcaccaccggcaccagacccagctggatgcagcccccctgcctgcccagcagatggtgggccagcagcagaagatag

SEQ ID NO: 12369 - DNA, 45 bp, synthetic construct
  source 1..45: mol_type = other DNA; note = Synthetic coding sequence
atggccatggcccccagccccagcctggtgcaggtgtacacctag

SEQ ID NO: 12370 - DNA, 828 bp, synthetic construct
  source 1..828: mol_type = other DNA; note = Synthetic coding sequence
atgagcgccgaggtgaaggtgaccggccagaaccaggagcagttcctgctgctggccaagagcgccaagggcgccgccctggccaccctgatccaccaggtgctggaggcccccggcgtgtacgtgttcggcgagctgctggacatgcccaacgtgagagagctggccgagagcgacttcgccagcaccttcagactgctgaccgtgttcgcctacggcacctacgccgactacctggccgaggccagaaacctgccccccctgaccgaggcccagaagaacaagctgagacacctgagcgtggtgaccctggccgccaaggtgaagtgcatcccctacgccgtgctgctggaggccctggccctgagaaacgtgagacagctggaggacctggtgatcgaggccgtgtacgccgacgtgctgagaggcagcctggaccagagaaaccagagactggaggtggactacagcatcggcagagacatccagagacaggacctgagcgccatcgccagaaccctgcaggagtggtgcgtgggctgcgaggtggtgctgagcggcatcgaggagcaggtgagcagagccaaccagcacaaggagcagcagctgggcctgaagcagcagatcgagagcgaggtggccaacctgaagaagaccatcaaggtgaccaccgccgccgccgccgccgccaccagccaggaccccgagcagcacctgaccgagctgagagagcccgcccccggcaccaaccagagacagcccagcaagaaggccagcaagggcaagggcctgagaggcagcgccaagatctggagcaagagcaactag

SEQ ID NO: 12371 - DNA, 1506 bp, synthetic construct
  source 1..1506: mol_type = other DNA; note = Synthetic coding sequence
atggccgcccccgagcccgcccccagaagagccagagagagagagagagagagagaggacgagagcgaggacgagagcgacatcctggaggagagcccctgcggcagatggcagaagagaagagagcaggtgaaccagggcaacatgcccggcctgcagagcaccttcctggccatggacaccgaggagggcgtggaggtggtgtggaacgagctgcacttcggcgacagaaaggccttcgccgcccacgaggagaagatccagaccgtgttcgagcagctggtgctggtggaccaccccaacatcgtgaagctgcacaagtactggctggacaccagcgaggcctgcgccagagtgatcttcatcaccgagtacgtgagcagcggcagcctgaagcagttcctgaagaagaccaagaagaaccacaaggccatgaacgccagagcctggaagagatggtgcacccagatcctgagcgccctgagcttcctgcacgcctgcagcccccccatcatccacggcaacctgaccagcgacaccatcttcatccagcacaacggcctgatcaagatcggcagcgtgtggcacagaatcttcagcaacgccctgcccgacgacctgagaagccccatcagagccgagagagaggagctgagaaacctgcacttcttcccccccgagtacggcgaggtggccgacggcaccgccgtggacatcttcagcttcggcatgtgcgccctggagatggccgtgctggagatccagaccaacggcgacaccagagtgaccgaggaggccatcgccagagccagacacagcctgagcgaccccaacatgagagagttcatcctgtgctgcctggccagagaccccgccagaagacccagcgcccacagcctgctgttccacagagtgctgttcgaggtgcacagcctgaagctgctggccgcccactgcttcatccagcaccagtacctgatgcccgagaacgtggtggaggagaagaccaaggccatggacctgcacgccgtgctggccgagctgcccagacccagaagaccccccctgcagtggagatacagcgaggtgagcttcatggagctggacaagttcctggaggacgtgagaaacggcatctaccccctgatgaacttcgccgccaccagacccctgggcctgcccagagtgctggcccccccccccgaggaggtgcagaaggccaagacccccacccccgagcccttcgacagcgagaccagaaaggtgatccagatgcagtgcaacctggagagaagcgaggacaaggccagatggcacctgaccctgctgctggtgctggaggacagactgcacagacagctgacctacgacctgctgcccaccgacagcgcccaggacctggccagcgagctggtgcactacggcttcctgcacgaggacgacagaatgaagctggccgccttcctggagagcaccttcctgaagtacagaggcacccaggcctag

SEQ ID NO: 12372 - DNA, 36 bp, synthetic construct
  source 1..36: mol_type = other DNA; note = Synthetic coding sequence
atgaccgcccccagctgcgccttccccgtgcagtag

SEQ ID NO: 12373 - DNA, 534 bp, synthetic construct
  source 1..534: mol_type = other DNA; note = Synthetic coding sequence
atgctgctggacaagaacgtgcccaaccccagaatcaagctgatcgacttcggcatcgcccacaagatcgaggccggcaacgagttcaagaacatcttcggcacccccgagttcgtggcccccgagatcgtgaactacgagcccctgggcctggaggccgacatgtggagcatcggcgtgatcacctacatcctgctgagcggcgccagccccttcctgggcgagaccaagcaggagaccctgaccaacatcagcgccgtgaactacgacttcgacgaggagtacttcagcaacaccagcgagctggccaaggacttcatcagaagactgctggtgaaggaccccaagagaagaatgaccatcgcccagagcctggagcacagctggatcaaggccatcagaagaagaaacgtgagaggcgaggacagcggcagaaagcccgagagaagaagactgaagaccaccagactgaaggagtacaccatcaagagccacagcagcgccagccccatcgtggcccccgtggacgcctag

SEQ ID NO: 12374 - DNA, 615 bp, synthetic construct
  source 1..615: mol_type = other DNA; note = Synthetic coding sequence
atgggcgacaagaagagccccaccagacccaagagacagcccaagcccagcagcgacgagggctactgggactgcagcgtgtgcaccttcagaaacagcgccgaggccttcaagtgcatgatgtgcgacgtgagaaagggcaccagcaccagaagcaccctgttcgaggtgatcgtgagcgccagcagaaccaaggagcccctgaagttccccatcagcggcagaaagcccagacccgtgagccagctggtggcccagcaggtgacccagcagttcgtgccccccacccagagcaagaaggagaagaaggacaaggtggagaaggagaagagcgagaaggagaccaccagcaagaagaacagccacaagaagaccagacccagactgaagaacgtggacagaagcagcgcccagcacctggaggtgaccgtgggcgacctgaccgtgatcatcaccgacttcaaggagaagaccaagagcccccccgccagcagcgccgccagcgccgaccagcacagccagagcggcagcagcagcgacaacaccgagagaggcatgagcagaagcagcagccccagaggcgaggccagcagcctgaacggcgagagccactag

SEQ ID NO: 12375 - DNA, 1350 bp, synthetic construct; identical to SEQ ID NO: 10423
  source 1..1350: mol_type = other DNA; note = Synthetic coding sequence

SEQ ID NO: 12376 - DNA, 153 bp, synthetic construct
  source 1..153: mol_type = other DNA; note = Synthetic coding sequence
aagaccggcctgaccggcagccccagcagcctgtgggacctgctgagagagatgttcgtggtgtgcagcaaggagcagctgcagagcggcggcaagtacagccaccaggtgtgggcccccttcagccccctggccagcggcgccgccttctag

SEQ ID NO: 12377 - DNA, 4386 bp, synthetic construct
  source 1..4386: mol_type = other DNA; note = Synthetic coding sequence
atgcagagagagctggtgtacgccagaggcgacggccccggcgcccccagacccggcagcaccgcccaccccccccacgccatccccaacagcccccccagcacccccgtgccccacagcatgccccccagccccagcagaatcccctacggcggcaccagaagcatggtggtgcccggcaacgccaccatccccagagacagaatcagcagcctgcccgtgagcagacccatcagccccagccccagcgccatcctggagagaagagacgtgaagcccgacgaggacatgagcggcaagaacatcgccatgtacagaaacgagggcttctacgccgacccctacctgtaccacgagggcagaatgagcatcgccagcagccacggcggccaccccctggacgtgcccgaccacatcatcgcctaccacagaaccgccatcagaagcgccagcgcctactgcaaccccagcatgcaggccgagatgcacatggagcagagcctgtacagacagaagagcagaaagtaccccgacagccacctgcccaccctgggcagcaagaccccccccgccagcccccacagagtgagcgacctgagaatgatcgacatgcacgcccactacaacgcccacggccccccccacaccatgcagcccgacagagccagccccagcagacaggccttcaagaaggagcccggcaccctggtgtacatcgagaagcccagaagcgccgccggcctgagcagcctggtggacctgggcccccccctgatggagaagcaggtgttcgcctacagcaccgccaccatccccaaggacagagagaccagcgagaagatgatgaagaccaccgccaacagaaaccacaccgacagcgccggcaccccccacgtgagcggcggcaagatgctgagcgccctggagagcaccgtgccccccagccagcccccccccgtgggcaccagcgccatccacatgagcctgctggagatgagaagaagcgtggccgagctgagactgcagctgcagcagatgagacagctgcagctgcagaaccaggagctgctgagagccatgatgaagaaggccgagctggagatcagcggcaaggtgatggagaccatgaagagactggaggaccccgtgcagagacagagagtgctggtggagcaggagagacagaagtacctgcacgaggaggagaagatcgtgaagaagctgtgcgagctggaggacttcgtggaggacctgaagaaggacagcaccgccgccagcagactggtgaccctgaaggacgtggaggacggcgccttcctgctgagacaggtgggcgaggccgtggccaccctgaagggcgagttccccaccctgcagaacaagatgagagccatcctgagaatcgaggtggaggccgtgagattcctgaaggaggagccccacaagctggacagcctgctgaagagagtgagaagcatgaccgacgtgctgaccatgctgagaagacacgtgaccgacggcctgctgaagggcaccgacgccgcccaggccgcccagtacatggccatggagaaggccaccgccgccgaggtgctgaagagccaggaggaggccgcccacaccagcggccagcccttccacagcaccggcgcccccggcgacgccaagagcgaggtggtgcccctgagcggcatgatggtgagacacgcccagagcagccccgtggtgatccagcccagccagcacagcgtggccctgctgaaccccgcccagaacctgccccacgtggccagcagccccgccgtgccccaggaggccaccagcaccctgcagatgagccaggccccccagagcccccagatccccatgaacggcagcgccatgcagagcctgttcatcgaggagatccacagcgtgagcgccaagaacagagccgtgagcatcgagaaggccgagaagaagtgggaggagaagagacagaacctggaccactacaacggcaaggagttcgagaagctgctggaggaggcccaggccaacatcatgaagagcatccccaacctggagatgccccccgccaccggccccctgcccagaggcgacgcccccgtggacaaggtggagctgagcgaggacagccccaacagcgagcaggacctggagaagctgggcggcaagagcccccccccccccccccccccccccagaagaagctacctgcccggcagcggcctgaccaccaccagaagcggcgacgtggtgtacaccggcagaaaggagaacatcaccgccaaggccagcagcgaggacgccggccccagcccccagaccagagccaccaagtaccccgccgaggagcccgccagcgcctggacccccagccccccccccgtgaccaccagcagcagcaaggacgaggaggaggaggaggaggagggcgacaagatcatggccgagctgcaggccttccagaagtgcagcttcatggacgtgaacagcaacagccacgccgagcccagcagagccgacagccacgtgaaggacaccagaagcggcgccaccgtgccccccaaggagaagaagaacctggagttcttccacgaggacgtgagaaagagcgacgtggagtacgagaacggcccccagatggagttccagaaggtgaccaccggcgccgtgagacccagcgacccccccaagtgggagagaggcatggagaacagcatcagcgacgccagcagaaccagcgagtacaagaccgagatcatcatgaaggagaacagcatcagcaacatgagcctgctgagagacagcagaaactacagccaggagaccgtgcccaaggccagcttcggcttcagcggcatcagccccctggaggacgagatcaacaagggcagcaagatcagcggcctgcagtacagcatccccgacaccgagaaccagaccctgaactacggcaagaccaaggagatggagaagcagaacaccgacaagtgccacgtgagcagccacaccagactgaccgagagcagcgtgcacgacttcaagaccgaggaccaggaggtgatcaccaccgacttcggccaggtggtgctgagacccaaggaggccagacacgccaacgtgaaccccaacgaggacggcgagagcagcagcagcagccccaccgaggagaacgccgccaccgacaacatcgccttcatgatcaccgagaccaccgtgcaggtgctgagcagcggcgaggtgcacgacatcgtgagccagaagggcgaggacatccagaccgtgaacatcgacgccagaaaggagatgacccccagacaggagggcaccgacaacgaggaccccgtggtgtgcctggacaagaagcccgtgatcatcatcttcgacgagcccatggacatcagaagcgcctacaagagactgagcaccatcttcgaggagtgcgacgaggagctggagagaatgatgatggaggagaagatcgaggaggaggaggaggaggagaacggcgacagcgtggtgcagaacaacaacaccagccagatgagccacaagaaggtggcccccggcaacctgagaaccggccagcaggtggagaccaagagccagccccacagcctggccaccgagaccagaaaccccggcggccaggagatgaacagaaccgagctgaacaagttcagccacgtggacagccccaacagcgagtgcaagggcgaggacgccaccgacgaccagttcgagagccccaagaagaagttcaagttcaagttccccaagaagcagctggccgccctgacccaggccatcagaaccggcaccaagaccggcaagaagaccctgcaggtggtggtgtacgaggaggaggaggaggacggcaccctgaagcagcacaaggaggccaagagattcgagatcgccagaagccagcccgaggacacccccgagaacaccgtgagaagacaggagcagcccagcatcgagagcaccagccccatcagcagaaccgacgagatcagaaagaacacctacagaaccctggacagcctggagcagaccatcaagcagctggagaacaccatcagcgagatgagccccaaggccctggtggacaccagctgcagcagcaacagagacagcgtggccagcagcagccacatcgcccaggaggccagccccagacccctgctggtgcccgacgagggccccaccgccctggagccccccaccagcatccccagcgccagcagaaagggcagcagcggcgccccccagaccagcagaatgcccgtgcccatgagcgccaagaacagacccggcaccctggacaagcccggcaagcagagcaagctgcaggaccccagacagtacagacagtag

SEQ ID NO: 12378 - DNA, 2118 bp, synthetic construct
  source 1..2118: mol_type = other DNA; note = Synthetic coding sequence
atgctgaccctgctggccgaggacagagccgtgcccagcgcccccaccggccccggccccctgctggagttcgccctgcacgaggacctgctgaccagagtgctgacctggcagctgcagtgggacgagctgggcgacggcgtggaggagagaagagccgagcagctgaagctgttcgagatgctggtgagcgaggccagacagcccctgctgagacacggccccgtgagagaggccctgctgaccctgctggacgcctgcggcagacccgtgcccagcagccccgccctggacgagggcctggtgctgctgctgagccagctgtgcgtgtgcgtggcccaggagcccagcctgctggagttcttcctgcagcccccccccgagcccggcgccgcccccagactgctgctgttcagcagactggtgcccttcgtgcacagagagggcaccctgggccagcaggccagagacgccctgctgctgctgatggccctgagcgccggcagccccaccgtgggcagatacatcgccgaccacagctacttctgccccgtgctggccaccggcctgagcgccctgtacagcagcctgcccagaaagatcgaggtgcccggcgacgactggcactgcctgagaagagaggactggctgggcgtgcccgccctggccctgttcatgagcagcctggagttctgcaacgccgtgatccaggtggcccaccccctggtgcagaagcagctggtggactacatccacaacggcttcctggtgcccgtgatgggccccgccctgcacaagaccagcgtggaggagatgatcgccagcaccgcctacctggagctgttcctgagaagcatcagcgagcccgccctgctgagaaccttcctgagattcctgctgctgcacagacacgacacccacaccatcctggacaccctggtggccagaatcggcagcaacagcagactgtgcatggtgagcctgagcctgttcagaaccctgctgaacctgagctgcgaggacgtgctgctgcagctggtgctgagatacctggtgccctgcaaccacgtgatgctgagccagaagcccgccgtgagagacgtggacctgtacggcagagccgccgacaagttcctgagcctgatccccagatgctgcagacaccacgcccccagcccccccagacccgagcacgccagctgggccagaggccccggcagccccagcgtggacagcagcagcgtgaccaccgtgcccagacccagcacccccagcagactggccctgttcctgagacagcagagcctgggcggcagcgagagccccggccccgccccctgcagccccggcctgagcgccagccccgccagcagccccggcagaagacccacccccgccgaggagcccggcgagctggaggacaactacctggagtacctgagagaggccagaagaggcgtggacagatgcgtgagagcctgcagaacctggagcgccccctacgacggcgagagacccagccccgagcccagccccttcggcagcagaaccaagaagagaagcctgctgcccgaggaggacagaaacaacgtgggcgagggcgaggaggaggagctgggcagaagaggcagagccggcggcgccggcgagggccccggccacctgccccccccccagctgaacggcgtgcccggcagctggcccgagggcgccaagaaggtgagactggtgcccaaggagggcgccggcgagctgctggagggcatcagcgagggcatggccggcctggagggcttcggccaggagctgagagagctggaggtggccctgagcaacggcggcaccggcagcgagagccccctggagccccccctgcccctggaggaggaggaggcctacgagagcttcacctgcccccccgagccccccggccccttcctgagcagccccctgagaaccctgaaccagctgcccagccagcccttcaccggccccttcatggccgtgctgttcgccaagctggagaacatgctgcagaacagcgccctgagctgcagcacccccacctggagcagcagccccgtgagcagcccctgctgcagatgctgggccctgtag

SEQ ID NO: 12379 - DNA, 804 bp, synthetic construct
  source 1..804: mol_type = other DNA; note = Synthetic coding sequence
atgatgagaggctacatcaagaaggtgctgaagaacaccagctaccacgtgaaccagtacctgttcatccagcacggctggagcggcagcggcgaccagagcgtgctgtacagctgcaacctgatgagaatggtgaccagaaccaagaagatcttcgtgggcggcctgagcgccaacaccgtggtggaggacgtgaagcagtacttcgagcagttcggcaaggtggaggacgccatgctgatgttcgacaagaccaccaacagacacagaggcttcggcttcgtgaccttcgagaacgaggacgtggtggagaaggtgtgcgagatccacttccacgagatcaacaacaagatggtggagtgcaagaaggcccagcccaaggaggtgatgttcccccccggcaccagaggcagagccagaggcctgccctacaccatggacgccttcatgctgggcatgggcatgctgggctaccccaacttcgtggccacctacggcagaggctaccccggcttcgcccccagctacggctaccagttccccggcttccccgccgccgcctacggccccgtggccgccgccgccgtggccgccgccagaggcagcggcagcaaccccgccagacccggcggcttccccggcgccaacagccccggccccgtggccgacctgtacggccccgccagccaggacagcggcgtgggcaactacatcagcgccgccagcccccagcccggcagcggcttcggccacggcatcgccggccccctgatcgccaccgccttcaccaacggctaccactag

SEQ ID NO: 12380 - DNA, 483 bp, synthetic construct
  source 1..483: mol_type = other DNA; note = Synthetic coding sequence
atgagcagccccctggccagcctgagcaagaccagaaaggtgcccctgcccagcgagcccatgaaccccggcagaagaggcatcagaatctacggcgacgtgcccgccagccacgacagcgagctgatggccttcatgaccagaaagctgtgggacctggagcagcaggtgaaggcccagaccgacgagatcctgagcaaggaccagaagatcgccgccctggaggacctggtgcagaccctgagaccccaccccgccgaggccaccctgcagagacaggaggagctggagaccatgtgcgtgcagctgcagagacaggtgagagagatggagagattcctgagcgactacggcctgcagtgggtgggcgagcccatggaccaggaggacagcgagagcaagaccgtgagcgagcacggcgagagagactggatgaccgccaagaagttctggaagcccggcggcctgatcggcgccccctag

SEQ ID NO: 12381 - DNA, 462 bp, synthetic construct
  source 1..462: mol_type = other DNA; note = Synthetic coding sequence
tgaagcgtgcagagccccgcccagcagcaggtgcccgccagacccggcgcccccagcgtgcaggtgcccagccccttcctgctgcagaaccagtacgagcccgtgcagccccactggttctactgcaaggaggtggagtacaagcagctgtggatgcccttcagcgtgttcgacagcctgaacctggaggagatctacaacagcgtgcagcccgaccccgagagcgtggtgctgggcaccgacggcggcagatacgacgtgtacctgtacgacagaatcagaaaggccgcctactgggaggaggagcccgccgaggtgagaagatgcacctggttctacaagggcgacaccgacagcagattcatcccctacaccgaggagttcagcgagaagctggaggtgagagtgctgtacttcttcatgagcttcttcaagaagtgcagaagctacatccactggtag

SEQ ID NO: 12382 - DNA, 1062 bp, synthetic construct
  source 1..1062: mol_type = other DNA; note = Synthetic coding sequence
atggagcaggagctggagcagctggcccagctgcccagcagcaagaacagcctgctgaaggacgccatggcccccggcacccccaagagcctgctgctgagcgccagcatcaagagagagggcgagagccccaccgccagcccccacagcagcgccaccgacgacctgcaccacagcgacagataccagaccttcctgagagtgagagccaacagacagaccagactgaacgccagaatcggcaagatgaagagaagaaagcaggacgagggccaggtgtgccccctgtgcaacagacccctggccggcagcgagcaggagatgagcagacacgtggagcactgcctgagcaagagagagggcagctgcatggccgaggacgacgccgtggacatcgagcacgagaacaacaacagattcgaggagtacgagtggtgcggccagaagagaatcagagccaccaccctgctggagggcggcttcagaggcagcggcttcatcatgtgcagcggcaaggagaaccccgacagcgacgccgacctggacgtggacggcgacgacaccctggagtacggcaagccccagtacaccgaggccgacgtgatcccctgcaccggcgaggagcccggcgaggccaaggagagagaggccctgagaggcgccgtgctgaacggcggcccccccagcaccagaatcacccccgagttcagcaagtgggccagcgacgagatgcccagcaccagcaacggcgagagcagcaagcaggaggccatgcagaagacctgcaagaacagcgacatcgagaagatcaccgaggacagcgccgtgaccaccttcgaggccctgaaggccagagtgagagagctggagagacagctgagcagaggcgacagatacaagtgcctgatctgcatggacagctacagcatgcccctgaccagcatccagtgctggcacgtgcactgcgaggagtgctggctgagaaccctgggcgccaagaagctgtgcccccagtgcaacaccatcaccgcccccggcgacctgagaagaatctacctgtag

SEQ ID NO: 12383 - DNA, 1782 bp, synthetic construct; identical to SEQ ID NO: 10388
  source 1..1782: mol_type = other DNA; note = Synthetic coding sequence

SEQ ID NO: 12384 - DNA, 363 bp, synthetic construct
  source 1..363: mol_type = other DNA; note = Synthetic coding sequence
ctggccctgcagatcagcgagaacctgttcagcaacaaggtgctgaacgccctgaagcccgagaaggacgtggacggcgtgaccgacatcaacctgggcaagctggtgagaggcgacgcccacgagtgcttcgtgagccccgtggccaaggccgtgatcgagctgctggagaagagcggcgtgaacctggacggcaagaagatcctggtggtgggcgcccacggcagcctggaggccgccctgcagtgcctgttccagagaaagggcagcatgaccatgagcatccagtggaagaccagacagctgcagagcaagaccgagagcagaagcgtgaccagactggagtgcagaagagtgatctag

SEQ ID NO: 12385 - DNA, 1167 bp, synthetic construct
  source 1..1167: mol_type = other DNA; note = Synthetic coding sequence
atgagcggcaccttcctgatcagaaagccccagctgctgcagggcgtgtacgccatgggcttcaacagacccagcaagatccaggagaacgccctgcccatgatgctggccgagcccccccagaacctgatcgcccagagccagagcggcaccggcaagaccgccgccttcgtgctggccatgctgagcagagtggagcccagcgacagatacccccagtgcctgtgcctgagccccacctacgagctggccctgcagaccggcaaggtgatcgagcagatgggcaagttctaccccgagctgaagctggcctacgccgtgagaggcaacaagctggagagaggccagaagatcagcgagcagatcgtgatcggcacccccggcaccgtgctggactggtgcagcaagctgaagttcatcgaccccaagaagatcaaggtgttcgtgctggacgaggccgacgtgatgatcgccacccagggccaccaggaccagagcatcagaatccagagaatgctgcccagaaactgccagatgctgctgttcagcgccaccttcgaggacagcgtgtggaagttcgcccagaaggtggtgcccgaccccaacgtgatcaagctgaagagagaggaggagaccctggacaccatcaagcagtactacgtgctgtgcagcagcagagacgagaagttccaggccctgtgcaacctgtacggcgccatcaccatcgcccaggccatgatcttctgccacaccagaaagaccgccagctggctggccgccgagctgagcaaggagggccaccaggtggccctgctgagcggcgagatgatggtggagcagagagccgccgtgatcgagagattcagagagggcaaggagaaggtgctggtgaccaccaacgtgtgcgccagaggcatcgacgtggagcaggtgagcgtggtgatcaacttcgacctgcccgtggacaaggacggcaaccccgacaacgagacctacctgcacagaatcggcagaaccggcagattcggcaagagaggcctggccgtgaacatggtggacagcaagcacagcatgaacatcctgaacagaatccaggagcacttcaacaagaagatcgagagactggacaccgacgacctggacgagatcgagaagatcgccaactag

SEQ ID NO: 12386 - DNA, 1821 bp, synthetic construct
  source 1..1821: mol_type = other DNA; note = Synthetic coding sequence
ctgagacagtgctacaactacaactgccccagcttcctggccgccgccctggccagagccaccagcgacgaggtgctgcagagcgacctgagcgcccactacatccccaaggagaccgacggcaccgagggcaccgtggagatcgagaccgtgaagctggccagaagcgtgttcagcaagctgcacgagatctgctgcagctgggtgaaggacttccccctgagaagaagaccccagctgtactacgagaccagcatccacgccatcaagaacatgagaaagctgttctacaagcacatcagcaagaagaagaagaagagaaagaagagagactgggaccaggaggagcaggcctacttcgccgtgttcgacggccacggcggcgtggacgccgccatctacgccagcatccacctgcacgtgaacctggtgagacaggagatgttcccccacgaccccgccgaggccctgtgcagagccttcagagtgaccgacgagagattcgtgcagaaggccgccagagagagcctgagatgcggcaccaccggcgtggtgaccttcatcagaggcaacatgctgcacgtggcctgggtgggcgacagccaggtgatgctggtgagaaagggccaggccgtggagctgatgaagccccacaagcccgacagagaggacgagaagcagagaatcgaggccctgggcggctgcgtggtgtggttcggcgcctggagagtgaacggcagcctgagcgtgagcagagccatcggcgacgccgagcacaagccctacatctgcggcgacgccgacagcgccagcaccgtgctggacggcaccgaggactacctgatcctggcctgcgacggcttctacgacaccgtgaaccccgacgaggccgtgaaggtggtgagcgaccacctgaaggagaacaacggcgacagcagcatggtggcccacaagctggtggccagcgccagagacgccggcagcagcgacaacatcaccgtgatcgtggtgttcctgagagacatgaacaaggccgtgaacgtgagcgaggagagcgactggaccgagaacagcttccagggcggccaggaggacggcggcgacgacaaggagaaccacggcgagtgcaagagaccctggccccagcaccagtgcagcgcccccgccgacctgggctacgacggcagagtggacagcttcaccgacagaaccagcctgagccccggcagccagatcaacgtgctggaggaccccggctacctggacctgacccagatcgaggccagcaagccccacagcgcccagttcctgctgcccgtggagatgttcggccccggcgcccccaagaaggccaacctgatcaacgagctgatgatggagaagaagagcgtgcagagcagcctgcccgagtggagcggcgccggcgagttccccaccgccttcaacctgggcagcaccggcgagcagatctacagaatgcagagcctgagccccgtgtgcagcggcctggagaacgagcagttcaagagccccggcaacagagtgagcagactgagccacctgagacaccactacagcaagaagtggcacagattcagattcaaccccaagttctacagcttcctgagcgcccaggagcccagccacaagatcggcaccagcctgagcagcctgaccggcagcggcaagagaaacagaatcagaagcagcctgccctggagacagaacagctggaagggctacagcgagaacatgagaaagctgagaaagacccacgacatcccctgccccgacctgccctggagctacaagatcgagtag

SEQ ID NO: 12387 - DNA, 678 bp, synthetic construct
  source 1..678: mol_type = other DNA; note = Synthetic coding sequence
atggagaacctgctgcaggccaccaagagccacgtggacaaggtgatcatgaagctgggcaagaccaacgccaaggccgtgagcgagatgagacagaagatctggaacaacatgcccaaggaccaccccgaccacgagctgatcgaccccttccccgtgcccctggtgatcatcggcagcaagtacgacgtgttccaggacttcgagagcgagaagagaaaggtgatctgcaagaccctgagattcgtggcccactactacggcgccagcctgatgttcaccagcaagagcgaggccctgctgctgaagatcagaggcgtgatcaaccagctggccttcggcatcgacaagagcaagagcatctgcgtggaccagaacaagcccctgttcatcaccgccggcctggacagcttcggccagatcggcagcccccccgtgcccgagaacgacatcggcaagctgcacgcccacagccccatggagctgtggaagaaggtgtacgagaagctgttcccccccaagagcatcaacaccctgaaggacatcaaggaccccgccagagacccccagtacgccgagaacgaggtggacgagatgagaatccagaaggacctggagctggagcagtacaagagaagcagcagcaagagctggaagcagatcgagctggacagctag

SEQ ID NO: 12388 - DNA, 621 bp, synthetic construct
  source 1..621: mol_type = other DNA; note = Synthetic coding sequence
atgggcttcagcaacatggaggacgacggccccgaggaggaggagagagtggccgagccccaggccaacttcaacaccccccaggccctgagattcgaggagctgctggccaacctgctgaacgagcagcaccagatcgccaaggagctgttcgagcagctgaagatgaagaagcccagcgccaagcagcagaaggaggtggagaaggtgaagccccagtgcaaggaggtgcaccagaccctgatcctggaccccgcccagagaaagagactgcagcagcagatgcagcagcacgtgcagctgctgacccagatccacctgctggccacctgcaaccccaacctgaaccccgaggccagcagcaccagaatctgcctgaaggagctgggcaccttcgcccagagcagcatcgccctgcaccaccagtacaaccccaagttccagaccctgttccagccctgcaacctgatgggcgccatgcagctgatcgaggacttcagcacccacgtgagcatcgactgcagcccccacaagaccgtgaagaagaccgccaacgagttcccctgcctgcccaagcaggtggcctggatcctggccaccagcaaggtgttcatgtactag

SEQ ID NO: 12389 - DNA, 468 bp, synthetic construct
  source 1..468: mol_type = other DNA; note = Synthetic coding sequence
atgggcaaggactactacaagatcctgggcatccccagcggcgccaacgaggacgagatcaagaaggcctacagaaagatggccctgaagtaccaccccgacaagaacaaggagcccaacgccgaggagaagttcaaggagatcgccgaggcctacgacgtgctgagcgaccccaagaagagaggcctgtacgaccagtacggcgaggagggcctgaagaccggcggcggcaccagcggcggcagcagcggcagcttccactacaccttccacggcgacccccacgccaccttcgccagcttcttcggcggcagcaaccccttcgacatcttcttcgccagcagcagaagcaccagacccttcagcggcttcgaccccgacgacatggacgtggacgaggacgaggaccccttcggcgccttcggcagattcggcttcaacggcctgagcagaggccccagaagatag

SEQ ID NO: 12390 - DNA, 246 bp, synthetic construct
  source 1..246: mol_type = other DNA; note = Synthetic coding sequence
atgagcatcagcagcgacgaggtgaacttcctggtgtacagatacctgcaggagagcggcttcagccacagcgccttcaccttcggcatcgagagccacatcagccagagcaacatcaacggcgccctggtgccccccgccgccctgatcagcatcatccagaagggcctgcagtacgtggaggccgaggtgagcatcaacgaggacggcaccctgttcgacggcagacccatcgagagcctgtag

SEQ ID NO: 12391 - DNA, 1248 bp, synthetic construct
  source 1..1248: mol_type = other DNA; note = Synthetic coding sequence
atggcccccgtgggcgtggagaagaagctgctgctgggccccaacggccccgccgtggccgccgccggcgacctgaccagcgaggaggaggagggccagagcctgtggagcagcatcctgagcgaggtgagcaccagagccagaagcaagctgcccagcggcaagaacatcctggtgttcggcgaggacggcagcggcaagaccaccctgatgaccaagctgcagggcgccgagcacggcaagaagggcagaggcctggagtacctgtacctgagcgtgcacgacgaggacagagacgtggtgaaggacttccaggactacatggagcccgaggagggctgccagggcagcccccagagaagaggccccctgaccagcggcagcgacgaggagaacgtggccctgcccctgggcgacaacgtgctgacccacaacctgggcatccccgtgctggtggtgtgcaccaagtgcgacgccgtgagcgtgctggagaaggagcacgactacagagacgagcacctggacttcatccagagccacctgagaagattctgcctgcagtacggcgccgccctgatctacaccagcgtgaaggaggagaagaacctggacctgctgtacaagtacatcgtgcacaagacctacggcttccacttcaccacccccgccctggtggtggagaaggacgccgtgttcatccccgccggctgggacaacgagaagaagatcgccatcctgcacgagaacttcaccaccgtgaagcccgaggacgcctacgaggacttcatcgtgaagccccccgtgagaaagctggtgcacgacaaggagctggccgccgaggacgagcaggtgttcctgatgaagcagcagagcctgctggccaagcagcccgccacccccaccagagccagcgagagccccgccagaggccccagcggcagccccagaacccagggcagaggcggccccgccagcgtgcccagcagcagccccggcaccagcgtgaagaagcccgaccccaacatcaagaacaacgccgccagcgagggcgtgctggccagcttcttcaacagcctgctgagcaagaagaccggcagccccggcagccccggcgccggcggcgtgcagagcaccgccaagaagagcggccagaagaccgtgctgagcaacgtgcaggaggagctggacagaatgaccagaaagcccgacagcatggtgaccaacagcagcaccgagaacgaggcctag

SEQ ID NO: 12392 - DNA, 1929 bp, synthetic construct
  source 1..1929: mol_type = other DNA; note = Synthetic coding sequence
atgagaagcatcacccagggcgcctgcagattcatctgggaggacaagggctacatcagcggcgaccacatcaacctggtgagcagcagcctgagcagcttccccatcctgcagagaagcagcgaggagaagatcctgtacagcgacagactgagcctggagagacagaagctgaccgtgtgccccatcatcaacggcgaggaccacctgagactgctgaacttccagcacaacttcatcaccagaatccagaacatcagcaacctgcagaagctgatcagcctggacctgtacgacaaccagatcgaggagatcagcggcctgagcaccctgagatgcctgagagtgctgctgctgggcaagaacagaatcaagaagatcagcaacctggagaacctgaagagcctggacgtgctggacctgcacggcaaccagatcaccaagatcgagaacatcaaccacctgtgcgagctgagagtgctgaacctggccagaaacttcctgagccacgtggacaacctgaacggcctggacagcctgaccgagctgaacctgagacacaaccagatcaccttcgtgagagacgtggacaacctgccctgcctgcagcacctgttcctgagcttcaacaacatcagcagcttcgacagcgtgagctgcctggccgacagcagcagcctgagcgacatcaccttcgacggcaaccccatcgcccaggagagctggtacaagcacaccgtgctgcagaacatgatgcagctgagacagctggacatgaagagaatcaccgaggaggagagaagaatggccagcgtgctggccaagaaggaggaggagaagaagagagagagccacaagcagagcctgctgaaggagaagaagagactgaccatcaacaacgtggccagacagtgggacctgcagcagcagagagtggccaacatcgccaccaacgaggacagaaaggacagcgacagcccccaggacccctgccagatcgacggcagcaccctgagcgccttccccgaggagaccggccccctggacagcggcctgaacaacgccctgcagggcctgagcgtgatcgacacctacctggtggaggtggacggcgacaccctgagcctgtacggcagcggcgccctggagagcctggacagaaactggagcgtgcagaccgccggcatgatcaccaccgtgagcttcaccttcatcgagttcgacgagatcgtgcaggtgctgcccaagctgaagatcaagttccccaacagcctgcacctgaagttcaaggagaccaacctggtgatgctgcagcagttcaacgccctggcccagctgagaagaatcgaccagctgaccatcgacccccagggcaaccccgtggtgaacttcaccctgtggaagtactacgtgctgttcagactgagccacttcagcatgcagaagatcaacggcaccgaggtgacccagaacgacatgatcatggccgagagactgttcggcatcctggcccacgtggccagcagcgagctgccccagtacagactgatcagcatcctgggcgacgccagaaagaagcagttcagatacctgctggagagcaagggcaagaagcccggcatcatcaacgaggagaacaacgacagcaagagactggtgggcgagaacaccaacagagccaccctgaactacaccaccagagacttctacaacgagaagctggaggagatcaaggagaagaagaagttctgcaagacctacatcgaggacctggtgaaggaggccaccgagatcaacatgaagaacgaggccctgcagaagctgtggccccagatgttcatcgagctggtgagagacgccgtgatcgagatcagaaacaagaacagctacatgaagctgtgcctgcagcagatcaccgaccagaagtag

SEQ ID NO: 12393 - DNA, 432 bp, synthetic construct
  source 1..432: mol_type = other DNA; note = Synthetic coding sequence
agactgggcagatacgaggtggagaagagatgcgccgtggagaaggaggactacgacctggccaaggagaagaagcagcagatggagcagtacagagccgaggtgtacgagcagctggagctgcacagcctgctggacgccgagctgcacagcgccgtggaccccctgctgcccgccaccgacccccaccccaagatcaacgccgagagcctgccctacgacgagagacccctgcccgccatcagaaagcactacggcgaggccgtggtggagcccgagatgagcaacgccgacatcagcgacgccagaagaggcggcatgctgggcgagcccgagcccctgaccgagaaggccctgagagaggccagcagcgccatcgacgtgctgggcgagaccctggtggccgaggcctactgcaagacctggagctag

SEQ ID NO: 12394 - DNA, 1842 bp, synthetic construct; identical to SEQ ID NO: 9548
  source 1..1842: mol_type = other DNA; note = Synthetic coding sequence

SEQ ID NO: 12395 - DNA, 552 bp, synthetic construct
  source 1..552: mol_type = other DNA; note = Synthetic coding sequence
atgggccccctgcccagaaccgtggagctgttctacgacgtgctgagcccctacagctggctgggcttcgagatcctgtgcagataccagaacatctggaacatcaacctgcagctgagacccagcctgatcaccggcatcatgaaggacagcggcagcctgagcgccatgagattcctgaccgccgtgaacctggagcaccccgagatgctggagaaggccagcagagagctgtggatgagagtgtggagcagaaacgaggacatcaccgagccccagagcatcctggccgccgccgagaaggccggcatgagcgccgagcaggcccagggcctgctggagaagatcgccacccccaaggtgaagaaccagctgaaggagaccaccgaggccgcctgcagatacggcgccttcggcctgcccatcaccgtggcccacgtggacggccagacccacatgctgttcggcagcgacagaatggagctgctggcccacctgctgggcgagaagtggatgggccccatcccccccgccgtgaacgccagactgtag

SEQ ID NO: 12396 - DNA, 306 bp, synthetic construct
  source 1..306: mol_type = other DNA; note = Synthetic coding sequence
gagggcaccagcggcaagaccgccctgcacctggccgtggagacccaggagagaggcctggtgcagttcctgctgcaggccggcgcccaggtggacgccagaatgctgaacggctgcacccccctgcacctggccgccggcagaggcctgatgggcatcagcagcaccctgtgcaaggccggcgccgacagcctgctgagaaacgtggaggacgagaccccccaggacctgaccgaggagagcctggtgctgctgcccttcgacgacctgaagatcagcggcaagctgctgctgtgcaccgactag

SEQ ID NO: 12397 - DNA, 14586 bp, synthetic construct
  source 1..14586: mol_type = other DNA; note = Synthetic coding sequence
atggccaccatgatcccccccgtgaagctgaagtggctggagcacctgaacagcagctggatcaccgaggacagcgagagcatcgccaccagagagggcgtggccgtgctgtacagcaagctggtgagcaacaaggaggtggtgcccctgccccagcaggtgctgtgcctgaagggcccccagctgcccgacttcgagagagagagcctgagcagcgacgagcaggaccactacctggacgccctgctgagcagccagctggccctggccaagatggtgtgcagcgacagccccttcgccggcgccctgagaaagagactgctggtgctgcagagagtgttctacgccctgagcaacaagtaccacgacaagggcaaggtgaagcagcagcagcacagccccgagagcagcagcggcagcgccgacgtgcacagcgtgagcgagagacccagaagcagcaccgacgccctgatcgagatgggcgtgagaaccggcctgagcctgctgttcgccctgctgagacagagctggatgatgcccgtgagcggccccggcctgagcctgtgcaacgacgtgatccacaccgccatcgaggtggtgagcagcctgccccccctgagcctggccaacgagagcaagatcccccccatgggcctggactgcctgagccaggtgaccaccttcctgaagggcgtgaccatccccaacagcggcgccgacaccctgggcagaagactggccagcgagctgctgctgggcctggccgcccagagaggcagcctgagatacctgctggagtggatcgagatggccctgggcgccagcgccgtggtgcacaccatggagaagggcaagctgctgagcagccaggagggcatgatcagcttcgactgcttcatgaccatcctgatgcagatgagaagaagcctgggcagcagcgccgacagaagccagtggagagagcccaccagaaccagcgacggcctgtgcagcctgtacgaggccgccctgtgcctgttcgaggaggtgtgcagaatggccagcgactacagcagaacctgcgccagccccgacagcatccagaccggcgacgcccccatcgtgagcgagacctgcgaggtgtacgtgtggggcagcaacagcagccaccagctggtggagggcacccaggagaagatcctgcagcccaagctggcccccagcttcagcgacgcccagaccatcgaggccggccagtactgcaccttcgtgatcagcaccgacggcagcgtgagagcctgcggcaagggcagctacggcagactgggcctgggcgacagcaacaaccagagcaccctgaagaagctgaccttcgagccccacagaagcatcaagaaggtgagcagcagcaagggcagcgacggccacaccctggccttcaccaccgagggcgaggtgttcagctggggcgacggcgactacggcaagctgggccacggcaacagcagcacccagaagtaccccaagctgatccagggccccctgcagggcaaggtggtggtgtgcgtgagcgccggctacagacacagcgccgccgtgaccgaggacggcgagctgtacacctggggcgagggcgacttcggcagactgggccacggcgacagcaacagcagaaacatccccaccctggtgaaggacatcagcaacgtgggcgaggtgagctgcggcagcagccacaccatcgccctgagcaaggacggcagaaccgtgtggagcttcggcggcggcgacaacggcaagctgggccacggcgacaccaacagagtgtacaagcccaaggtgatcgaggccctgcagggcatgttcatcagaaaggtgtgcgccggcagccagagcagcctggccctgaccagcaccggccaggtgtacgcctggggctgcggcgcctgcctgggctgcggcagcagcgaggccaccgccctgagacccaagctgatcgaggagctggccgccaccagaatcgtggacgtgagcatcggcgacagccactgcctggccctgagccacgacaacgaggtgtacgcctggggcaacaacagcatgggccagtgcggccagggcaacagcaccggccccatcaccaagcccaagaaggtgagcggcctggacggcatcgccatccagcagatcagcgccggcaccagccacagcctggcctggaccgccctgcccagagacagacaggtggtggcctggcacagaccctactgcgtggacctggaggagagcaccttcagccacctgagaagcttcctggagagatactgcgacaagatcaacagcgagatcccccccctgcccttccccagcagcagagagcaccacagcttcctgaagctgtgcctgaagctgctgagcaaccacctggccctggccctggccggcggcgtggccaccagcatcctgggcagacaggccggccccctgagaaacctgctgttcagactgatggacagcaccgtgcccgacgagatccaggaggtggtgatcgagaccctgagcgtgggcgccaccatgctgctgccccccctgagagagagaatggagctgctgcacagcctgctgccccagggccccgacagatgggagagcctgagcaagggccagagaatgcagctggacatcatcctgaccagcctgcaggaccacacccacgtggccagcctgctgggctacagcagccccagcgacgccgccgacctgagcagcgtgtgcaccggctacggcaacctgagcgaccagccctacggcacccagagctgccaccccgacacccacctggccgagatcctgatgaagaccctgctgagaaacctgggcttctacaccgaccaggccttcggcgagctggagaagaacagcgacaagttcctgctgggcaccagcagcagcgagaacagccagcccgcccacctgcacgagctgctgtgcagcctgcagaagcagctgctggccttctgccacatcaacaacatcagcgagaacagcagcagcgtggccctgctgcacaagcacctgcagctgctgctgccccacgccaccgacatctacagcagaagcgccaacctgctgaaggagagcccctggaacggcagcgtgggcgagaagctgagagacgtgatctacgtgagcgccgccggcagcatgctgtgccagatcgtgaacagcctgctgctgctgcccgtgagcgtggccagacccctgctgagctacctgctggacctgctgccccccctggactgcctgaacagactgctgcccgccgccgacctgctggaggaccaggagctgcagtggcccctgcacggcggccccgagctgatcgaccccgccggcctgcccctgccccagcccgcccagagctgggtgtggctggtggacctggagagaaccatcgccctgctgatcggcagatgcctgggcggcatgctgcagggcagccccgtgagccccgaggagcaggacaccgcctactggatgaagacccccctgttcagcgacggcgtggagatggacaccccccagctggacaagtgcatgagctgcctgctggaggtggccctgagcggcaacgaggagcagaagcccttcgactacaagctgagacccgagatcgccgtgtacgtggacctggccctgggctgcagcaaggagcccgccagaagcctgtggatcagcatgcaggactacgccgtgagcaaggactgggacagcgccaccctgagcaacgagagcctgctggacaccgtgagcagattcgtgctggccgccctgctgaagcacaccaacctgctgagccaggcctgcggcgagagcagataccagcccggcaagcacctgagcgaggtgtacagatgcgtgtacaaggtgagaagcagactgctggcctgcaagaacctggagctgatccagaccagaagcagcagcagagacagatggatcagcgagaaccaggacagcgccgacgtggacccccaggagcacagcttcaccagaaccatcgacgaggaggccgagatggaggagcaggccgagagagacagagaggagggccaccccgagcccgaggacgaggaggaggagagagagcacgaggtgatgaccgccggcaagatcttccagtgcttcctgagcgccagagaggtggccagaagcagagacagagacagaatgaacagcggcgccggcagcggcgccagagccgacgacccccccccccagagccagcaggagagaagagtgagcaccgacctgcccgagggccaggacgtgtacaccgccgcctgcaacagcgtgatccacagatgcgccctgctgatcctgggcgtgagccccgtgatcgacgagctgcagaagagaagagaggagggccagctgcagcagcccagcaccagcgccagcgagggcggcggcctgatgaccagaagcgagagcctgaccgccgagagcagactggtgcacaccagccccaactacagactgatcaagagcagaagcgagagcgacctgagccagcccgagagcgacgaggagggctacgccctgagcggcagaagaaacgtggacctggacctggccgccagccacagaaagagaggccccatgcacagccagctggagagcctgagcgacagctgggccagactgaagcacagcagagactggctgtgcaacagcagctacagcttcgagagcgacttcgacctgaccaagagcctgggcgtgcacaccctgatcgagaacgtggtgagcttcgtgagcggcgacgtgggcaacgcccccggcttcaaggagcccgaggagagcatgagcaccagcccccaggccagcatcatcgccatggagcagcagcagctgagagccgagctgagactggaggccctgcaccagatcctggtgctgctgagcggcatggaggagaagggcagcatcagcctggccggcagcagactgagcagcggcttccagagcagcaccctgctgaccagcgtgagactgcagttcctggccggctgcttcggcctgggcaccgtgggccacaccggcggcaagggcgagagcggcagactgcaccactaccaggacggcatcagagccgccaagagaaacatccagatcgagatccaggtggccgtgcacaagatctaccagcagctgagcgccaccctggagagagccctgcaggccaacaagcaccacatcgaggcccagcagagactgctgctggtgaccgtgttcgccctgagcgtgcactaccagcccgtggacgtgagcctggccatcagcaccggcctgctgaacgtgctgagccagctgtgcggcaccgacaccatgctgggccagcccctgcagctgctgcccaagaccggcgtgagccagctgagcaccgccctgaaggtggccagcaccagactgctgcagatcctggccatcaccaccggcacctacgccgacaagctgagccccaaggtggtgcagagcctgctggacctgctgtgcagccagctgaagaacctgctgagccagaccggcgtgctgcacatggccagcttcggcgagggcgagcaggaggacggcgaggaggaggagaagaaggtggacagcagcggcgagaccgagaagaaggacttcagagccgccctgagaaagcagcacgccgccgagctgcacctgggcgacttcctggtgttcctgagaagagtggtgagcagcaaggccatccagagcaagatggccagccccaagtggaccgaggtgctgctgaacatcgccagccagaagtgcagcagcggcatccccctggtgggcaacctgagaaccagactgctggccctgcacgtgctggaggccgtgctgcccgcctgcgagagcggcgtggaggacgaccagatggcccagatcgtggagagactgttcagcctgctgagcgactgcatgtgggagacccccatcgcccaggccaagcacgccatccagatcaaggagaaggagcaggagatcaagctgcagaagcagggcgagctggaggaggaggacgagaacctgcccatccaggaggtgagcttcgaccccgagaaggcccagtgctgcctggtggagaacggccagatcctgacccacggcagcggcggcaagggctacggcctggccagcaccggcgtgaccagcggctgctaccagtggaagttctacatcgtgaaggagaacagaggcaacgagggcacctgcgtgggcgtgagcagatggcccgtgcacgacttcaaccacagaaccaccagcgacatgtggctgtacagagcctacagcggcaacctgtaccacaacggcgagcagaccctgaccctgagcagcttcacccagggcgacttcatcacctgcgtgctggacatggaggccagaaccatcagcttcggcaagaacggcgaggagcccaagctggccttcgaggacgtggacgccgccgagctgtacccctgcgtgatgttctacagcagcaaccccggcgagaaggtgaagatctgcgacatgcagatgagaggcacccccagagacctgctgcccggcgaccccatctgcagccccgtggccgccgtgctggccgaggccaccatccagctgatcagaatcctgcacagaaccgacagatggacctactgcatcaacaagaagatgatggagagactgcacaagatcaagatctgcatcaaggagagcggccagaagctgaagaagagcagaagcgtgcagagcagagaggagaacgagatgagagaggagaaggagagcaaggaggaggagaagggcaagcacaccagacacggcctggccgacctgagcgagctgcagctgagaaccctgtgcatcgaggtgtggcccgtgctggccgtgatcggcggcgtggacgccggcctgagagtgggcggcagatgcgtgcacaagcagaccggcagacacgccaccctgctgggcgtggtgaaggagggcagcaccagcgccaaggtgcagtgggacgaggccgagatcaccatcagcttccccaccttctggagccccagcgacacccccctgtacaacctggagccctgcgagcccctgcccttcgacgtggccagattcagaggcctgaccgccagcgtgctgctggacctgacctacctgaccggcgtgcacgaggacatgggcaagcagagcaccaagagacacgagaagaagcacagacacgagagcgaggagaagggcgacgtggagcagaagcccgagagcgagagcgccctggacatgagaaccggcctgaccagcgacgacgtgaagagccagagcaccaccagcagcaagagcgagaacgagatcgccagcttcagcctggaccccaccctgcccagcgtggagagccagcaccagatcaccgagggcaagagaaagaaccacgagcacatgagcaagaaccacgacgtggcccagagcgagatcagagccgtgcagctgagctacctgtacctgggcgccatgaagagcctgagcgccctgctgggctgcagcaagtacgccgagctgctgctgatccccaaggtgctggccgagaacggccacaacagcgactgcgccagcagccccgtggtgcacgaggacgtggagatgagagccgccctgcagttcctgatgagacacatggtgaagagagccgtgatgagaagccccatcaagagagccctgggcctggccgacctggagagagcccaggccatgatctacaagctggtggtgcacggcctgctggaggaccagttcggcggcaagatcaagcaggagatcgaccagcaggccgaggagagcgaccccgcccagcaggcccagacccccgtgaccaccagccccagcgccagcagcaccaccagcttcatgagcagcagcctggaggacaccaccaccgccaccacccccgtgaccgacaccgagaccgtgcccgccagcgagagccccggcgtgatgcccctgagcctgctgagacagatgttcagcagctaccccaccaccaccgtgctgcccaccagaagagcccagaccccccccatcagcagcctgcccaccagccccagcgacgaggtgggcagaagacagagcctgaccagccccgacagccagagcgccagacccgccaacagaaccgccctgagcgaccccagcagcagactgagcaccagcccccccccccccgccatcgccgtgcccctgctggagatgggcttcagcctgagacagatcgccaaggccatggaggccaccggcgccagaggcgaggccgacgcccagaacatcaccgtgctggccatgtggatgatcgagcaccccggccacgaggacgaggaggagccccagagcggcagcaccgccgacagcagacccggcgccgccgtgctgggcagcggcggcaagagcaacgacccctgctacctgcagagccccggcgacatccccagcgccgacgccgccgagatggaggagggcttcagcgagagccccgacaacctggaccacaccgagaacgccgccagcggcagcggccccagcgccagaggcagaagcgccgtgaccagaagacacaagttcgacctggccgccagaaccctgctggccagagccgccggcctgtacagaagcgtgcaggcccacagaaaccagagcagaagagagggcatcagcctgcagcaggaccccggcgccctgtacgacttcaacctggacgaggagctggagatcgacctggacgacgaggccatggaggccatgttcggccaggacctgaccagcgacaacgacatcctgggcatgtggatccccgaggtgctggactggcccacctggcacgtgtgcgagagcgaggacagagaggaggtggtggtgtgcgagctgtgcgagtgcagcgtggtgagcttcaaccagcacatgaagagaaaccaccccggctgcggcagaagcgccaacagacagggctacagaagcaacggcagctacgtggacggctggttcggcggcgagtgcggcagcggcaacccctactacctgctgtgcggcacctgcagagagaagtacctggccatgaagaccaagagcaagagcaccagcagcgagagatacaagggccaggcccccgacctgatcggcaagcaggacagcgtgtacgaggaggactgggacatgctggacgtggacgaggacgagaagctgaccggcgaggaggagttcgagctgctggccggccccctgggcctgaacgacagaagaatcgtgcccgagcccgtgcagttccccgacagcgaccccctgggcgccagcgtggccatggtgaccgccaccaacagcatggaggagaccctgatgcagatcggctgccacggcagcgtggagaagagcagcagcggcagaatcaccctgggcgagcaggccgccgccctggccaacccccacgacagagtggtggccctgagaagagtgaccgccgccgcccaggtgctgctggccagaaccatggtgatgagagccctgagcctgctgagcgtgagcggcagcagctgcagcctggccgccggcctggagagcctgggcctgaccgacatcagaaccctggtgagactgatgtgcctggccgccgccggcagagccggcctgagcaccagccccagcgccatggccagcaccagcgagagaagcagaggcggccacagcaaggccaacaagcccatcagctgcctggcctacctgagcaccgccgtgggctgcctggccagcaacgcccccagcgccgccaagctgctggtgcagctgtgcacccagaacctgatcagcgccgccaccggcgtgaacctgaccaccgtggacgacagcatccagagaaagttcctgcccagcttcctgagaggcatcgccgaggagaacaagctggtgaccagccccaacttcgtggtgacccaggccctggtggccctgctggccgacaagggcgccaagctgagacccaactacgacaagagcgaggtggagaagaagggccccctggagctggccaacgccctggccgcctgctgcctgagcagcagactgagcagccagcacagacagtgggccgcccagcagctggtgagaaccctggccgcccacgacagagacaaccagaccaccctgcagaccctggccgacatgggcggcgacctgagaaagtgcagcttcatcaagctggaggcccaccagaacagagtgatgacctgcgtgtggtgcaacaagaagggcctgctggccaccagcggcaacgacggcaccatcagagtgtggaacgtgaccaagaagcagtacagcctgcagcagacctgcgtgttcaacagactggagggcgacgccgaggagagcctgggcagccccagcgaccccagcttcagccccgtgagctggagcatcagcggcaagtacctggccggcgccctggagaagatggtgaacatctggcaggtgaacggcggcaagggcctggtggacatccagccccactgggtgagcgccctggcctggcccgaggagggccccgccaccgcctggagcggcgagagccccgagctgctgctggtgggcagaatggacggcagcctgggcctgatcgaggtggtggacgtgagcaccatgcacagaagagagctggagcactgctacagaaaggacgtgagcgtgacctgcatcgcctggttcagcgaggacagacccttcgccgtgggctacttcgacggcaagctgctgctgggcaccaaggagcccctggagaagggcggcatcgtgctgatcgacgcccacaaggacaccctgatcagcatgaagtgggaccccaccggccacatcctgatgacctgcgccaaggaggacagcgtgaagctgtggggcagcatcagcggctgctggtgctgcctgcacagcctgtgccaccccagcatcgtgaacggcatcgcctggtgcagactgcccggcaagggcagcaagctgcagctgctgatggccaccggctgccagagcggcctggtgtgcgtgtggagaatcccccaggacaccacccagaccaacgtgaccagcgccgagggctggtgggagcaggagagcaactgccaggacggctacagaaagagcagcggcgccaagtgcgtgtaccagctgagaggccacatcacccccgtgagaaccgtggccttcagcagcgacggcctggccctggtgagcggcggcctgggcggcctgatgaacatctggagcctgagagacggcagcgtgctgcagaccgtggtgatcggcagcggcgccatccagaccaccgtgtggatccccgaggtgggcgtggccgcctgcagcaacagaagcaaggacgtgctggtggtgaactgcaccgccgagtgggccgccgccaaccacgtgctggccacctgcagaaccgccctgaagcagcagggcgtgctgggcctgaacatggccccctgcatgagagccttcctggagagactgcccatgatgctgcaggagcagtacgcctacgagaagccccacgtggtgtgcggcgaccagctggtgcacagcccctacatgcagtgcctggccagcctggccgtgggcctgcacctggaccagctgctgtgcaacccccccgtgcccccccaccaccagaactgcctgcccgaccccgccagctggaaccccaacgagtgggcctggctggagtgcttcagcaccaccatcaaggccgccgaggccctgaccaacggcgcccagttccccgagagcttcaccgtgcccgacctggagcccgtgcccgaggacgagctggtgttcctgatggacaacagcaagtggatcaacggcatggacgagcagatcatgagctgggccaccagcagacccgaggactggcacctgggcggcaagtgcgacgtgtacctgtggggcgccggcagacacggccagctggccgaggccggcagaaacgtgatggtgcccgccgccgcccccagcttcagccaggcccagcaggtgatctgcggccagaactgcaccttcgtgatccaggccaacggcaccgtgctggcctgcggcgagggcagctacggcagactgggccagggcaacagcgacgacctgcacgtgctgaccgtgatcagcgccctgcagggcttcgtggtgacccagctggtgaccagctgcggcagcgacggccacagcatggccctgaccgagagcggcgaggtgttcagctggggcgacggcgactacggcaagctgggccacggcaacagcgacagacagagaagacccagacagatcgaggccctgcagggcgaggaggtggtgcagatgagctgcggcttcaagcacagcgccgtggtgaccagcgacggcaagctgttcaccttcggcaacggcgactacggcagactgggcctgggcaacaccagcaacaagaagctgcccgagagagtgaccgccctggagggctaccagatcggccaggtggcctgcggcctgaaccacaccctggccgtgagcgccgacggcagcatggtgtgggccttcggcgacggcgactacggcaagctgggcctgggcaacagcaccgccaagagcagcccccagaagatcgacgtgctgtgcggcatcggcatcaagaaggtggcctgcggcacccagttcagcgtggccctgaccaaggacggccacgtgtacaccttcggccaggacagactgatcggcctgcccgagggcagagccagaaaccacaacagaccccagcagatccccgtgctggccggcgtgatcatcgaggacgtggccgtgggcgccgagcacaccctggccctggccagcaacggcgacgtgtacgcctggggcagcaacagcgagggccagctgggcctgggccacaccaaccacgtgagagagcccaccctggtgaccggcctgcagggcaagaacgtgagacagatcagcgccggcagatgccacagcgccgcctggaccgccccccccgtgccccccagagcccccggcgtgagcgtgcccctgcagctgggcctgcccgacaccgtgcccccccagtacggcgccctgagagaggtgagcatccacaccgtgagagccagactgagactgctgtaccacttcagcgacctgatgtacagcagctggagactgctgaacctgagccccaacaaccagaacagcaccagccactacaacgccggcacctggggcatcgtgcagggccagctgagacccctgctggcccccagagtgtacaccctgcccatggtgagaagcatcggcaagaccatggtgcagggcaagaactacggcccccagatcaccgtgaagagaatcagcaccagaggcagaaagtgcaagcccatcttcgtgcagatcgccagacaggtggtgaagctgaacgccagcgacctgagactgcccagcagagcctggaaggtgaagctggtgggcgagggcgccgacgacgccggcggcgtgttcgacgacaccatcaccgagatgtgccaggagctggagaccggcatcgtggacctgctgatccccagccccaacgccaccgccgaggtgggctacaacagagacagattcctgttcaaccccagcgcctgcctggacgagcacctgatgcagttcaagttcctgggcatcctgatgggcgtggccatcagaaccaagaagcccctggacctgcacctggcccccctggtgtggaagcagctgtgctgcgtgcccctgaccctggaggacctggaggaggtggacctgctgtacgtgcagaccctgaacagcatcctgcacatcgaggacagcggcatcaccgaggagagcttccacgagatgatccccctggacagcttcgtgggccagagcgccgacggcaagatggtgcccatcatccccggcggcaacagcatccccctgaccttcagcaacagaaaggagtacgtggagagagccatcgagtacagactgcacgagatggacagacaggtggccgccgtgagagagggcatgagctggatcgtgcccgtgcccctgctgagcctgctgaccgccaagcagctggagcagatggtgtgcggcatgcccgagatcagcgtggaggtgctgaagaaggtggtgagatacagagaggtggacgagcagcaccagctggtgcagtggttctggcacaccctggaggagttcagcaacgaggagagagtgctgttcatgagattcgtgagcggcagaagcagactgcccgccaacaccgccgacatcagccagagattccagatcatgaaggtggacagaccctacgacagcctgcccaccagccagacctgcttcttccagctgagactgcccccctacagcagccagctggtgatggccgagagactgagatacgccatcaacaactgcagaagcatcgacatggacaactacatgctgagcagaaacgtggacaacgccgagggcagcgacaccgactactag

SEQ ID NO: 12398 - DNA, 3633 bp, synthetic construct; identical to SEQ ID NO: 10739
  source 1..3633: mol_type = other DNA; note = Synthetic coding sequence

SEQ ID NO: 12399 - DNA, 579 bp, synthetic construct; identical to SEQ ID NO: 11225
  source 1..579: mol_type = other DNA; note = Synthetic coding sequence

SEQ ID NO: 12400 - DNA, 1803 bp, synthetic construct; identical to SEQ ID NO: 11130
  source 1..1803: mol_type = other DNA; note = Synthetic coding sequence

SEQ ID NO: 12401 - DNA, 1197 bp, synthetic construct
  source 1..1197: mol_type = other DNA; note = Synthetic coding sequence
atgctgagaagaaagcccagcaacgccagcgagaaggagttcaacctggacgacaacatccccgaggacgacagcggcgtgcccacccccgaggacgccggcaagagcggcaagaagctgggcaagaagtggagagccgtgatcagcagaaccatgaacagaaagatgggcaagatgatggtgaaggccctgagcgaggagatggccgacaccctggaggagggcagcgccagccccaccagccccgactacagcctggacagccccggccccgagaagatggccctggccttcagcgagcaggaggagcacgagctgcccgtgctgagcagacaggccagcaccggcagcgagctgtgcagccccagccccggcagcggcagcttcggcgaggagccccccgccccccagtacaccggccccttctgcggcagagccagagtgcacaccgacttcacccccagcccctacgaccacgacagcctgaagctgcaggtgagaagcgccagcggcctgctgtggagcctggccggctgcgcccagaagggcagctggaccgagcccggctacgacagcgtgagcggcggccagggccccccctaccccctgagcctggcccccttcagcagccccctgccccagcagaagggcgacgtgatccagatcatcgagaagccccccgtgggcacctggctgggcctgctgaacggcaaggtgggcagcttcaagttcatctacgtggacgtgctgcccgaggaggccgtgggccacgccagacccagcagaagacagagcaagggcaagagacccaagcccaagaccctgcacgagctgctggagagaatcggcctggaggagcacaccagcaccctgctgctgaacggctaccagaccctggaggacttcaaggagctgagagagacccacctgaacgagctgaacatcatggacccccagcacagagccaagctgctgaccgccgccgagctgctgctggactacgacaccggcagcgaggaggccgaggagggcgccgagagcagccaggagcccgtggcccacaccgtgagcgagcccaaggtggacatccccagagacagcggctgcttcgagggcagcgagagcggcagagacgacgccgagctggccggcaccgaggagcagctgcagggcctgagcctggccggcgccccctag

SEQ ID NO: 12402 - DNA, 1002 bp, synthetic construct
  source 1..1002: mol_type = other DNA; note = Synthetic coding sequence
atgggcaccagaaagaaggtgcacgccttcgtgagagtgaagcccaccgacgacttcgcccacgagatgatcagatacggcgacgacaagagaagcatcgacatccacctgaagaaggacatcagaagaggcgtggtgaacaaccagcagaccgactggagcttcaagctggacggcgtgctgcacgacgccagccaggacctggtgtacgagaccgtggccaaggacgtggtgagccaggccctggacggctacaacggcaccatcatgtgctacggccagaccggcgccggcaagacctacaccatgatgggcgccaccgagaactacaagcacagaggcatcctgcccagagccctgcagcaggtgttcagaatgatcgaggagagacccacccacgccatcaccgtgagagtgagctacctggagatctacaacgagagcctgttcgacctgctgagcaccctgccctacgtgggccccagcgtgacccccatgaccatcgtggagaacccccagggcgtgttcatcaagggcctgagcgtgcacctgaccagccaggaggaggacgccttcagcctgctgttcgagggcgagaccaacagaatcatcgccagccacaccatgaacaagaacagcagcagaagccactgcatcttcaccatctacctggaggcccacagcagaaccctgagcgaggagaagtacatcaccagcaagatcaacctggtggacctggccggcagcgagagactgggcaagagcggcagcgagggccaggtgctgaaggaggccacctacatcaacaagagcctgagcttcctggagcaggccatcatcgccctgggcgaccagaagagagaccacatccccttcagacagtgcaagctgacccacgccctgaaggacagcctgggcggcaactgcaacatggtgctggtgaccaacatctacggcgaggccgcccagctggaggagaccggcagcagactgtggctgtag

SEQ ID NO: 12403 - DNA, 1248 bp, synthetic construct; identical to SEQ ID NO: 10184
  source 1..1248: mol_type = other DNA; note = Synthetic coding sequence

SEQ ID NO: 12404 - DNA, 3108 bp, synthetic construct
  source 1..3108: mol_type = other DNA; note = Synthetic coding sequence
atgagcgagcaggagagaatccaggagtgcctgagaaaggagatcagaagcctgctgatcagcaccaaggacggcctgagcccccaggagctggagaaggagtacctgctgatggtgggcaaccacctgcccctgagaatcctgggctacagaagcaccatggagctggtgctggacatgcccgacgtggtgagagtgtgccccggcgccggcggcaccgtgatcctgaaggccatccccgacgagagcaccaagggcatcgccagcctggtggccaagcagagaagcagccacaagctgagaaacagcatgcacaagggcagacccagcatctacagcggccccagaagccacagaagagtgccctacagaggcagagtggcccccatcctgcccgccgtggtgaagagcgagctgaaggacctgctggccctgagccccgtgctgctgagcgacttcgagaaggccttcgccaagagattcggcagaagcttccagtacatgcagtacggcttcctgagcatgttcgaggtgctgaacgccgccagcgacgtgatcagcgtggagcagaccagagccggcagcctgctgatgctgaagaagagcgtgaccgaggagaagcccagaggctgccccgccggcaagatcttcacccagcccttcagaatgaagcagggcagctacagcaccggcttccccgtggccaagccctgcttcagccagcccaccagcaacatggagccccccaagcagatcatgagcatggagaagaccagcaagctgaacgtggtggagaccagcagactgaaccacaccgagaagctgaaccagctggagaacaccttcaagagcgtgatcgcccagatcggccccggcggcaccatcagcagcgagctgaagcacaagatcaagttcgtggtgagcaagttccccgagggcctgttcatcagcaagctgctgggcgagtacgaggtgatcttcaaggagcagctgagccccaagaagctgggcttcctgaacgtgaccgagctggtgggcgccctgagcgacatcctgcacgtggagttcagaaagggccaccaggacctgctggtgttcgacgccgacaagaagcccctgccccccgtgcagagcgacaagaagatcgaggccaaggcctgcgtgagcagcccccccagaaacagcctgagcaccgccgccgtgaaggagaccgtgtggaactgccccagcaagaagcagaaggagccccagcagaagatctgcaagaagcccaacctggtggtgaagcccctgcagctgcaggtggagaccaacaagagcgagctgaacctggccatggccaaccacgacatcccccccgacgccgtgcccaacaagaagctgtgcagactgccccccctggacaccagcagcctgatcggcgtgttcgtggagtacatcatcagccccagccagttctacatcagaatctacagcagagacagcagcgagctgctggaggacatgatgatcgagatgagaagatgctacagcaaccagctggtgagcgacagatacgtgatgcccgagtgcttcatccagcccggccacctgtgctgcgtgagaatcagcgaggacaagtggtggtacagagtgatcatccacagagtgctggagaagcaggaggtggaggtgttctaccccgacttcggcaacatcggcatcgtgcagaagagcagcctgagattcctgaagtgctgctacaccaagctgcccgcccaggccatcccctgcagcctggcctgggtgagacccgtggaggagcactggaccagcaaggccatcctgcagttccagaagctgtgcggcctgaagcccctggtgggcgtggtggacgagtacgtggacggcatcctgaacatcttcctgtgcgacaccagcagcaacgaggacgtgtacttccaccacgtgctgagaaccgagggccacgccatcgtgtgcagagagaacatcagcagcaagggcttcagcgagctgaaccccctggccctgtacaccaccagcagcggcggccccgaggacatcgtgctgaccgagctgggctaccccagccagcagcactacttcaacgaggacagaaagatcagcccccagagcaaggagagcgagctgagaatcctgcaggacatcaacgacgagaagagcctgagccacctgaagagcgagagcaaggagcccctgaaggacagcgagttcgagagcctgaagacctgcaacaagagcttcgaggaggaccccaagtggagcaaccccgagcccaacgacctgaaggaggagaacgaggacgagatccccaccggcatgccctgcctggagagcgtgaccatcggcgacgacatctgggacgagaactggctgcccctgcaggccaagatgggcaagggcggcgacgccgccagccacctgttcaccgccagcctgggcggcaagaaccagtacagcagctgcaaggagatgccccagaaggactggtgcttcagcacccccaaggacacctgggacgacagctggcagcccagcggcctggtgaacggcaccaaggtggaggtgcacaagcccgaggtgctgggcgcccaggagaagaacaccggcaccaacagaacccagaagcagctggacatcaacggcagcagcgacagcagcaccctgcccaagctggaggagttctgcaccagcctgacccagagcgagcagagcgccgacggcagccagagcgagcccaacaacagccagacccagcccaagcagatccagctgagcaccgccgccccctgcagcaccaccgccgtggacgacagcgccgagaagcccagcggcagcgtggagagcagccccgagatcctgaagaacgaggacttcagcagcagcagagccatcaccctgtacaaggacaagagacaggagagcgtggaccagctgagcctgatcctgagctacgagtgccagatcagccagaagctgtacatccccagaagcaccgccaccgccgccctgggcgccgccgccagactggccaccagcagaagcctgctgcactggtaccccagcgtgaagagaatggaggcctag

SEQ ID NO: 12405 - DNA, 660 bp, synthetic construct
  source 1..660: mol_type = other DNA; note = Synthetic coding sequence
atgggcggcgcccagctggagctgcccagcggcgccagacccggcgtgtgcgtgagaagaagcttcagagcccacgccggcgaccagcccagaagaccccccggccccatccccgtgcccggcaccatgaagcaggagagcgccgcccccaacaccccccccaccagccagagccccacccccagcgcccagttccccagaaacgacggcgacccccaggccctgtggatcttcggctacggcagcctggtgtggagacccgacttcgcctacagcgacagcagagtgggcttcgtgagaggctacagcagaagattctggcagggcgacaccttccacagaggcagcgacaagatgcccggcagagtggtgaccctgctggaggaccacgagggctgcacctggggcgtggcctaccaggtgcagggcgagcagaaccccggctacctgggccccgcccccgaggaggccatcgccacccagatcctggcctgcagaggcttcagcggccacaacctggagtacctgctgagactggccgacttcatgcagctgtgcggcccccaggcccaggacgagcacctggccgccatcgtggacgccgtgggcaccatgctgccctgcttctgccccaccgagcaggccctggccctggtgtag

SEQ ID NO: 12406 - DNA, 2382 bp, synthetic construct; identical to SEQ ID NO: 10175
  source 1..2382: mol_type = other DNA; note = Synthetic coding sequence

SEQ ID NO: 12407 - DNA, 1842 bp, synthetic construct; identical to SEQ ID NO: 9548
  source 1..1842: mol_type = other DNA; note = Synthetic coding sequence

SEQ ID NO: 12408 - DNA, 582 bp, synthetic construct
  source 1..582: mol_type = other DNA; note = Synthetic coding sequence
atggccagagccggccccagactggtgctgagcgaggaggccgtgagagccaagagcggcctgggcccccacagagacctggccgagctgcagagcctgagcatccccggcacctaccaggagaagatcacccacctgggccacagcctgatgagcctgaccggcctgaagagcctggacctgagcagaaacagcctggtgagcctggagggcatccagtacctgaccgccctggagagcctgaacctgtactacaactgcatcagcagcctggccgaggtgttcagactgcacgccctgaccgagctggtggacgtggacttcagactgaaccccgtggtgaaggtggagcccgactacagactgttcgtggtgcacctgctgcccaagctgcagcagctggacgacagacccgtgagagccagcgagagaaaggccagcagactgcacttcgccagcgaggacagcctggacagcaaggagagcgtgcccgccagcctgaaggagggcagaatccagaccagcgtggagcccgccgtgggcaccgtgcccgtgtggggcctgtgggaggccggcccctag

SEQ ID NO: 12409 - DNA, 177 bp, synthetic construct
  source 1..177: mol_type = other DNA; note = Synthetic coding sequence
atgtacttcaactacaagagcgtgtgcggcagctgcggcttcggcagctgctacggctgcggctacggctgcatccacagcacccactgcggctgcaacggctactacggctgctacgagaacaagtacagcgtgatcgacgacctgatcttcttcgccagcaagaagtgccactag

SEQ ID NO: 12410 - DNA, 585 bp, synthetic construct
  source 1..585: mol_type = other DNA; note = Synthetic coding sequence
atgaacggcagagccgacttcagagagcccaacgccgaggtgcccagacccatcccccacatcggccccgactacatccccaccgaggaggagagaagagtgttcgccgagtgcaacgacgagagcttctggttcagaagcgtgcccctggccgccaccagcatgctgatcacccagggcctgatcagcaagggcatcctgagcagccaccccaagtacggcagcatccccaagctgatcctggcctgcatcatgggctacttcgccggcaagctgagctacgtgaagacctgccaggagaagttcaagaagctggagaacagccccctgggcgaggccctgagaagcggccaggccagaagaagcagcccccccggccactactaccagaagagcaagtacgacagcagcgtgagcggccagagcagcttcgtgaccagccccgccgccgacaacatcgagatgctgccccactacgagcccatccccttcagcagcagcatgaacgagagcgcccccaccggcatcaccgaccacatcgtgcaggtgaaggtgaacaagtacggcgacacctgggacgagtag

SEQ ID NO: 12411 - DNA, 2421 bp, synthetic construct
  source 1..2421: mol_type = other DNA; note = Synthetic coding sequence
atgagcagcagccccgtgaacgtgaagaagctgaaggtgagcgagctgaaggaggagctgaagaagagaagactgagcgacaagggcctgaaggccgagctgatggagagactgcaggccgccctggacgacgaggaggccggcggcagacccgccatggagcccggcaacggcagcctggacctgggcggcgacagcgccggcagaagcggcgccggcctggagcaggaggccgccgccggcggcgacgaggaggaggaggaggaggaggaggaggaggagggcatcagcgccctggacggcgaccagatggagctgggcgaggagaacggcgccgccggcgccgccgacagcggccccatggaggaggaggaggccgccagcgaggacgagaacggcgacgaccagggcttccaggagggcgaggacgagctgggcgacgaggaggagggcgccggcgacgagaacggccacggcgagcagcagccccagccccccgccacccagcagcagcagccccagcagcagagaggcgccgccaaggaggccgccggcaagagcagcggccccaccagcctgttcgccgtgaccgtggccccccccggcgccagacagggccagcagcaggccggcggcgacggcaagaccgagcagaagggcggcgacaagaagagaggcgtgaagagacccagagaggaccacggcagaggctacttcgagtacatcgaggagaacaagtacagcagagccaagagcccccagccccccgtggaggaggaggacgagcacttcgacgacaccgtggtgtgcctggacacctacaactgcgacctgcacttcaagatcagcagagacagactgagcgccagcagcctgaccatggagagcttcgccttcctgtgggccggcggcagagccagctacggcgtgagcaagggcaaggtgtgcttcgagatgaaggtgaccgagaagatccccgtgagacacctgtacaccaaggacatcgacatccacgaggtgagaatcggctggagcctgaccaccagcggcatgctgctgggcgaggaggagttcagctacggctacagcctgaagggcatcaagacctgcaactgcgagaccgaggactacggcgagaagttcgacgagaacgacgtgatcacctgcttcgccaacttcgagagcgacgaggtggagctgagctacgccaagaacggccaggacctgggcgtggccttcaagatcagcaaggaggtgctggccggcagacccctgttcccccacgtgctgtgccacaactgcgccgtggagttcaacttcggccagaaggagaagccctacttccccatccccgaggagtacaccttcatccagaacgtgcccctggaggacagagtgagaggccccaagggccccgaggagaagaaggactgcgaggtggtgatgatgatcggcctgcccggcgccggcaagaccacctgggtgaccaagcacgccgccgagaaccccggcaagtacaacatcctgggcaccaacaccatcatggacaagatgatggtggccggcttcaagaagcagatggccgacaccggcaagctgaacaccctgctgcagagagccccccagtgcctgggcaagttcatcgagatcgccgccagaaagaagagaaacttcatcctggaccagaccaacgtgagcgccgccgcccagagaagaaagatgtgcctgttcgccggcttccagagaaaggccgtggtggtgtgccccaaggacgaggactacaagcagagaacccagaagaaggccgaggtggagggcaaggacctgcccgagcacgccgtgctgaagatgaagggcaacttcaccctgcccgaggtggccgagtgcttcgacgagatcacctacgtggagctgcagaaggaggaggcccagaagctgctggagcagtacaaggaggagagcaagaaggccctgccccccgagaagaagcagaacaccggcagcaagaagagcaacaagaacaagagcggcaagaaccagttcaacagaggcggcggccacagaggcagaggcggcttcaacatgagaggcggcaacttcagaggcggcgcccccggcaacagaggcggctacaacagaagaggcaacatgccccagagaggcggcggcggcggcggcagcggcggcatcggctacccctaccccagagcccccgtgttccccggcagaggcagctacagcaacagaggcaactacaacagaggcggcatgcccaacagaggcaactacaaccagaacttcagaggcagaggcaacaacagaggctacaagaaccagagccagggctacaaccagtggcagcagggccagttctggggccagaagccctggagccagcactaccaccagggctactactag

SEQ ID NO: 12412 - DNA, 651 bp, synthetic construct
  source 1..651: mol_type = other DNA; note = Synthetic coding sequence
atgagcaccgtggacctggccagagtgggcgcctgcatcctgaagcacgccgtgaccggcgaggccgtggagctgagaagcctgtggagagagcacgcctgcgtggtggccggcctgagaagattcggctgcgtggtgtgcagatggatcgcccaggacctgagcagcctggccggcctgctggaccagcacggcgtgagactggtgggcgtgggccccgaggccctgggcctgcaggagttcctggacggcgactacttcgccggcgagctgtacctggacgagagcaagcagctgtacaaggagctgggcttcaagagactgtggacccaggccagccccgagttcggccaggccacctggtgcctgagaagatacaacagcctgagcatcctgcccgccgccctgggcaagcccgtgagagacgtggccgccaaggccaaggccgtgggcatccagggcaacctgagcggcgacctgctgcagagcggcggcctgctggtggtgagcaagggcggcgacaaggtgctgctgcacttcgtgcagaagagccccggcgactacgtgcccaaggagcacatcctgcaggtgctgggcatcagcgccgaggtgtgcgccagcgaccccccccagtgcgacagagaggtgtag

SEQ ID NO: 12413 - DNA, 1191 bp, synthetic construct
  source 1..1191: mol_type = other DNA; note = Synthetic coding sequence
atgttctggaagttcgacctgcacaccagcagccacctggacaccctgctggagagagaggacctgagcctgcccgagctgctggacgaggaggacgtgctgcaggagtgcaaggtggtgaacagaaagctgctggacttcctgctgcagcccccccacctgcaggccatggtggcctgggtgacccaggagccccccgacagcggcgaggagagactgagatacaagtaccccagcgtggcctgcgagatcctgaccagcgacgtgccccagatcaacgacgccctgggcgccgacgagagcctgctgaacagactgtacggcttcctgcagagcaccggcagcctgaaccccctgctggccagcttcttcagcaaggtgatgggcatcctgatcaacagaaagaccgaccagctggtgagcttcctgagaaagaaggacgacttcgtggacctgctgctgcagcacatcggcaccagcgccatcatggacctgctgctgagactgctgacctgcgtggagagaccccagctgagacaggacgtggtgaactggctgaacgaggagaagatcgtgcagagactgatcgagcagatccaccccagcaaggacgagaaccagcacagcaacgccagccagagcctgtgcgacatcatcagactgagcagagagcagatgatccaggtgcaggacagccccgtgcccaccgacgcccccaccagccccagagtgagcggcgaggaggagctgcacaccggcccccccgccccccagggccccctgagcgtgccccagggcctgcccacccagagcctggccagcccccccgccagagacgccctgcagctgagaagccaggaccccaccccccccagcgccccccaggaggccaccgagggcagcaaggtgaccgagcccagcgccccctgccaggccctggtgagcatcggcgacctgcaggccaccttccacggcatcagaagcgcccccagcagcagcgacagcgccaccagagaccccagcaccagcgtgcccgccagcggcgcccaccagcccccccagaccaccgagggcgagaagagccccgagcccctgggcctgccccagagccagagcgcccaggccctgacccccccccccatccccaacggcagcgcccccgagggccccgccagccccggcagccagtag

SEQ ID NO: 12414 - DNA, 2178 bp, synthetic construct
  source 1..2178: mol_type = other DNA; note = Synthetic coding sequence
atgggcaccagaaagaaggtgcacgccttcgtgagagtgaagcccaccgacgacttcgcccacgagatgatcagatacggcgacgacaagagaagcatcgacatccacctgaagaaggacatcagaagaggcgtggtgaacaaccagcagaccgactggagcttcaagctggacggcgtgctgcacgacgccagccaggacctggtgtacgagaccgtggccaaggacgtggtgagccaggccctggacggctacaacggcaccatcatgtgctacggccagaccggcgccggcaagacctacaccatgatgggcgccaccgagaactacaagcacagaggcatcctgcccagagccctgcagcaggtgttcagaatgatcgaggagagacccacccacgccatcaccgtgagagtgagctacctggagatctacaacgagagcctgttcgacctgctgagcaccctgccctacgtgggccccagcgtgacccccatgaccatcgtggagaacccccagggcgtgttcatcaagggcctgagcgtgcacctgaccagccaggaggaggacgccttcagcctgctgttcgagggcgagaccaacagaatcatcgccagccacaccatgaacaagaacagcagcagaagccactgcatcttcaccatctacctggaggcccacagcagaaccctgagcgaggagaagtacatcaccagcaagatcaacctggtggacctggccggcagcgagagactgggcaagagcggcagcgagggccaggtgctgaaggaggccacctacatcaacaagagcctgagcttcctggagcaggccatcatcgccctgggcgaccagaagagagaccacatccccttcagacagtgcaagctgacccacgccctgaaggacagcctgggcggcaactgcaacatggtgctggtgaccaacatctacggcgaggccgcccagctggaggagaccctgagcagcctgagattcgccagcagaatgaagctggtgaccaccgagcccgccatcaacgagaagtacgacgccgagagaatggtgaagaacctggagaaggagctggccctgctgaagcaggagctggccatccacgacagcctgaccaacagaaccttcgtgacctacgaccccatggacgagatccagatcgccgagatcaacagccaggtgagaagatacctggagggcaccctggacgagatcgacatcatcagcctgagacagatcaaggaggtgttcaaccagttcagagtggtgctgagccagcaggagcaggaggtggagagcaccctgagaagaaagtacaccctgatcgacagaaacgacttcgccgccatcagcgccatccagaaggccggcctggtggacgtggacggccacctggtgggcgagcccgagggccagaacttcggcctgggcgtggcccccttcagcaccaagcccggcaagaaggccaagagcaagaagaccttcaaggagcccctgagacccgacaccccccccagcaagcccgtggccttcgaggagttcaagaacgagcagggcagcgagatcaacagaatcttcaaggagaacaagagcatcctgaacgagagaagaaagagagccagcgagaccacccagcacatcaacgccatcaagagagagatcgacgtgaccaaggaggccctgaacttccagaagagcctgagagagaagcagggcaagtacgagaacaagggcctgatgatcatcgacgaggaggagttcctgctgatcctgaagctgaaggacctgaagaagcagtacagaagcgagtaccaggacctgagagacctgagagccgagatccagtactgccagcacctggtggaccagtgcagacacagactgctgatggagttcgacatctggtacaacgagagcttcgtgatccccgaggacatgcagatggccctgaagcccggcggcagcatcagacccggcatggtgcccgtgaacagaatcgtgagcctgggcgaggacgaccaggacaagttcagccagctgcagcagagagtgctgcccgagggccccgacagcatcagcttctacaacgccaaggtgaagatcgagcagaagcacaactacctgaagaccatgatgggcctgcagcaggcccacagaaagtag

SEQ ID NO: 12415 - DNA, 282 bp, synthetic construct
  source 1..282: mol_type = other DNA; note = Synthetic coding sequence
atggccgccgccaccggcgaccccggcctgagcaagctgcagttcgcccccttcagcagcgccctggacgtgggcttctggcacgagctgacccagaagaagctgaacgagtacagactggacgaggcccccaaggacatcaagggctactactacaacggcgacagcgccggcctgcccgccagactgaccctggagttcagcgccttcgacatgagcgcccccacccccgccagatgctgccccgccatcggcaccctgtacaacaccaacaccctgtag

SEQ ID NO: 12416 - DNA, 333 bp, synthetic construct
  source 1..333: mol_type = other DNA; note = Synthetic coding sequence
atgggcaagaagcagaacaagaagaaggtggaggaggtgctggaggaggaggaggaggagtacgtggtggagaaggtgctggacagaagagtggtgaagggcaaggtggagtacctgctgaagtggaagggcttcagcgacgaggacaacacctgggagcccgaggagaacctggactgccccgacctgatcgccgagttcctgcagagccagaagaccgcccacgagaccgacaagagcgagggcggcaagagaaaggccgacagcgacagcgaggacaagggcgaggagagcaagcccaagaagaagaaggaggagagcgagaagccctag

SEQ ID NO: 12417 - DNA, 270 bp, synthetic construct
  source 1..270: mol_type = other DNA; note = Synthetic coding sequence
atgagctactaccagagacccttcagccccagcgcctacagcctgcccgccagcctgaacagcagcatcgtgatgcagcacggcaccagcctggacagcaccgacacctacccccagcacgcccagagcctggacggcaccaccagcagcagcatccccctgtacagaagcagcgaggaggagaagagagtgaccgtgatcaaggccccccactaccccggcatcggccccgtggacgagagcggcatccccaccgccatcagaacctag

SEQ ID NO: 12418 - DNA, 1269 bp, synthetic construct
  source 1..1269: mol_type = other DNA; note = Synthetic coding sequence
atggagagaaaggacttcgagacctggctggacaacatcagcgtgaccttcctgagcctgaccgacctgcagaagaacgagaccctggaccacctgatcagcctgagcggcgccgtgcagctgagacacctgagcaacaacctggagaccctgctgaagagagacttcctgaagctgctgcccctggagctgagcttctacctgctgaagtggctggacccccagaccctgctgacctgctgcctggtgagcaagcagtggaacaaggtgatcagcgcctgcaccgaggtgtggcagaccgcctgcaagaacctgggctggcagatcgacgacagcgtgcaggacgccctgcactggaagaaggtgtacctgaaggccatcctgagaatgaagcagctggaggaccacgaggccttcgagaccagcagcctgatcggccacagcgccagagtgtacgccctgtactacaaggacggcctgctgtgcaccggcagcgacgacctgagcgccaagctgtgggacgtgagcaccggccagtgcgtgtacggcatccagacccacacctgcgccgccgtgaagttcgacgagcagaagctggtgaccggcagcttcgacaacaccgtggcctgctgggagtggagcagcggcgccagaacccagcacttcagaggccacaccggcgccgtgttcagcgtggactacaacgacgagctggacatcctggtgagcggcagcgccgacttcaccgtgaaggtgtgggccctgagcgccggcacctgcctgaacaccctgaccggccacaccgagtgggtgaccaaggtggtgctgcagaagtgcaaggtgaagagcctgctgcacagccccggcgactacatcctgctgagcgccgacaagtacgagatcaagatctggcccatcggcagagagatcaactgcaagtgcctgaagaccctgagcgtgagcgaggacagaagcatctgcctgcagcccagactgcacttcgacggcaagtacatcgtgtgcagcagcgccctgggcctgtaccagtgggacttcgccagctacgacatcctgagagtgatcaagacccccgagatcgccaacctggccctgctgggcttcggcgacatcttcgccctgctgttcgacaacagatacctgtacatcatggacctgagaaccgagagcctgatcagcagatggcccctgcccgagtacagaaagagcaagagaggcagcagcttcctggccggcgagcaccccggctag

SEQ ID NO: 12419 - DNA, 1179 bp, synthetic construct
  source 1..1179: mol_type = other DNA; note = Synthetic coding sequence
atgagcgccctggccggcgaggacgtgtggagatgccccggctgcggcgaccacatcgcccccagccagatctggtacagaaccgtgaacgagacctggcacggcagctgcttcagaagaagcaacagcatcagcaagagccccggccccagcagccccaaggagcccctgctgttcagcagagacatcagcagaagcgagagcctgagatgcagcagcagctacagccagcagatcttcagaccctgcgacctgatccacggcgaggtgctgggcaagggcttcttcggccaggccatcaaggtgacccacaaggccaccggcaaggtgatggtgatgaaggagctgatcagatgcgacgaggagacccagaagaccttcctgaccgaggtgaaggtgatgagaagcctggaccaccccaacgtgctgaagttcatcggcgtgctgtacaaggacaagaagctgaacctgctgaccgagtacatcgagggcggcaccctgaaggacttcctgagaagcatggaccccttcccctggcagcagaaggtgagattcgccaagggcatcgccagcggcatggcctacctgcacagcatgtgcatcatccacagagacctgaacagccacaactgcctgatcaagctggacaagaccgtggtggtggccgacttcggcctgagcagactgatcgtggaggagagaaagagagcccccatggagaaggccaccaccaagaagagaaccctgagaaagaacgacagaaagaagagatacaccgtggtgggcaacccctactggatggcccccgagatgctgaacggcaagagctacgacgagaccgtggacatcttcagcttcggcatcgtgctgtgcgagatcatcggccaggtgtacgccgaccccgactgcctgcccagaaccctggacttcggcctgaacgtgaagctgttctgggagaagttcgtgcccaccgactgcccccccgccttcttccccctggccgccatctgctgcagactggagcccgagagcagacccgccttcagcaagctggaggacagcttcgaggccctgagcctgtacctgggcgagctgggcatccccctgcccgccgagctggaggagctggaccacaccgtgagcatgcagtacggcctgaccagagacagccccccctag

SEQ ID NO: 12420 - DNA, 480 bp, synthetic construct; identical to SEQ ID NO: 11816
  source 1..480: mol_type = other DNA; note = Synthetic coding sequence

SEQ ID NO: 12421 - DNA, 3585 bp, synthetic construct
  source 1..3585: mol_type = other DNA; note = Synthetic coding sequence
atgttcagcctggacagcttcagaaaggacagagcccagcacagacagagacagtgcaagctgcccccccccagactgccccccatgtgcgtgaaccccacccccggcggcaccatcagcagagccagcagagacctgctgaaggagttcccccagcccaagaacctgctgaacagcgtgatcggcagagccctgggcatcagccacgccaaggacaagctggtgtacgtgcacaccaacggccccaagaagaagaaggtgaccctgcacatcaagtggcccaagagcgtggaggtggagggctacggcagcaagaagatcgacgccgagagacaggccgccgccgccgcctgccagctgttcaagggctggggcctgctgggccccagaaacgagctgttcgacgccgccaagtacagagtgctggccgacagattcggcagccccgccgacagctggtggagacccgagcccaccatgccccccaccagctggagacagctgaaccccgagagcatcagacccggcggccccggcggcctgagcagaagcctgggcagagaggaggaggaggacgaggaggaggagctggaggagggcaccatcgacgtgaccgacttcctgagcatgacccagcaggacagccacgcccccctgagagacagcagaggcagcagcttcgagatgaccgacgacgacagcgccatcagagccctgacccagttccccctgcccaagaacctgctggccaaggtgatccagatcgccaccagcagcagcaccgccaagaacctgatgcagttccacaccgtgggcaccaagaccaagctgagcaccctgaccctgctgtggccctgccccatgaccttcgtggccaagggcagaagaaaggccgaggccgagaacaaggccgccgccctggcctgcaagaagctgaagagcctgggcctggtggacagaaacaacgagcccctgacccacgccatgtacaacctggccagcctgagagagctgggcgagacccagagaagaccctgcaccatccaggtgcccgagcccatcctgagaaagatcgagaccttcctgaaccactaccccgtggagagcagctggatcgcccccgagctgagactgcagagcgacgacatcctgcccctgggcaaggacagcggccccctgagcgaccccatcaccggcaagccctacgtgcccctgctggaggccgaggaggtgagactgagccagagcctgctggagctgtggagaagaagaggccccgtgtggcaggaggccccccagctgcccgtggacccccacagagacaccatcctgaacgccatcgagcagcaccccgtggtggtgatcagcggcgacaccggctgcggcaagaccaccagaatcccccagctgctgctggagagatacgtgaccgagggcagaggcgccagatgcaacgtgatcatcacccagcccagaagaatcagcgccgtgagcgtggcccagagagtgagccacgagctgggccccagcctgagaagaaacgtgggcttccaggtgagactggagagcaagccccccagcagaggcggcgccctgctgttctgcaccgtgggcatcctgctgagaaagctgcagagcaaccccagcctggagggcgtgagccacgtgatcgtggacgaggtgcacgagagagacgtgaacaccgacttcctgctgatcctgctgaagggcctgcagagactgaaccccgccctgagactggtgctgatgagcgccaccggcgacaacgagagattcagcagatacttcggcggctgccccgtgatcaaggtgcccggcttcatgtaccccgtgaaggagcactacctggaggacatcctggccaagctgggcaagcaccagtacctgcacagacacagacaccacgagagcgaggacgagtgcgccctggacctggacctggtgaccgacctggtgctgcacatcgacgccagaggcgagcccggcggcatcctgtgcttcctgcccggctggcaggagatcaagggcgtgcagcagagactgcaggaggccctgggcatgcacgagagcaagtacctgatcctgcccgtgcacagcaacatccccatgatggaccagaaggccatcttccagcagccccccgtgggcgtgagaaagatcgtgctggccaccaacatcgccgagaccagcatcaccatcaacgacatcgtgcacgtggtggacagcggcctgcacaaggaggagagatacgacctgaagaccaaggtgagctgcctggagaccgtgtgggtgagcagagccaacgtgatccagagaagaggcagagccggcagatgccagagcggcttcgcctaccacctgttccccagaagcagactggagaagatggtgcccttccaggtgcccgagatcctgagaacccccctggagaacctggtgctgcaggccaagatccacatgcccgagaagaccgccgtggagttcctgagcaaggccgtggacagccccaacatcaaggccgtggacgaggccgtgatcctgctgcaggagatcggcgtgctggaccagagagagtacctgaccaccctgggccagagactggcccacatcagcaccgaccccagactggccaaggccatcgtgctggccgccatcttcagatgcctgcaccccctgctggtggtggtgagctgcctgaccagagaccccttcagcagcagcctgcagaacagagccgaggtggacaaggtgaaggccctgctgagccacgacagcggcagcgaccacctggccttcgtgagagccgtggccggctgggaggaggtgctgagatggcaggacagaagcagcagagagaactacctggaggagaacctgctgtacgcccccagcctgagattcatccacggcctgatcaagcagttcagcgagaacatctacgaggccttcctggtgggcaagcccagcgactgcaccctggccagcgcccagtgcaacgagtacagcgaggaggaggagctggtgaagggcgtgctgatggccggcctgtaccccaacctgatccaggtgagacagggcaaggtgaccagacagggcaagttcaagcccaacagcgtgacctacagaaccaagagcggcaacatcctgctgcacaagagcaccatcaacagagaggccaccagactgagaagcagatggctgacctacttcatggccgtgaagagcaacggcagcgtgttcgtgagagacagcagccaggtgcaccccctggccgtgctgctgctgaccgacggcgacgtgcacatcagagacgacggcagaagagccaccatcagcctgagcgacagcgacctgctgagactggagggcgacagcagaaccgtgagactgctgaaggagctgagaagagccctgggcagaatggtggagagaagcctgagaagcgagctggccgccctgccccccagcgtgcaggaggagcacggccagctgctggccctgctggccgagctgctgagaggcccctgcggcagcttcgacgtgagaaagaccgccgacgactag

SEQ ID NO: 12422 - DNA, 207 bp, synthetic construct
  source 1..207: mol_type = other DNA; note = Synthetic coding sequence
atgagctactaccagagacccttcagccccagcgcctacagcctgcccgccagcctgaacagcagcatcgtgatgcagcacggcaccagcctggacagcaccgacacctacccccagcacgcccagagcctggacggcaccaccagcagcagcatccccctgtacagaagcagcgaggaggagaagagagtgaccgtgatcaagtag

SEQ ID NO: 12423 - DNA, 1419 bp, synthetic construct
  source 1..1419: mol_type = other DNA; note = Synthetic coding sequence
atgagcagaagagtggtgagacagagcaagttcagacacgtgttcggccaggccgccaaggccgaccaggcctacgaggacatcagagtgagcaaggtgacctgggacagcagcttctgcgccgtgaaccccaagttcctggccatcatcgtggaggccggcggcggcggcgccttcatcgtgctgcccctggccaagaccggcagagtggacaagaactaccccctggtgaccggccacaccgcccccgtgctggacatcgactggtgcccccacaacgacaacgtgatcgccagcgccagcgacgacaccaccatcatggtgtggcagatccccgactacacccccatgagaaacatcaccgagcccatcatcaccctggagggccacagcaagagagtgggcatcctgagctggcaccccaccgccagaaacgtgctgctgagcgccggcggcgacaacgtgatcatcatctggaacgtgggcaccggcgaggtgctgctgagcctggacgacatgcaccccgacgtgatccacagcgtgtgctggaacagcaacggcagcctgctggccaccacctgcaaggacaagaccctgagaatcatcgaccccagaaagggccaggtggtggccgagcaggccagaccccacgagggcgccagacccctgagagccgtgttcaccgccgacggcaagctgctgagcaccggcttcagcagaatgagcgagagacagctggccctgtgggaccccaacaacttcgaggagcccgtggccctgcaggagatggacaccagcaacggcgtgctgctgcccttctacgaccccgacagcagcatcgtgtacctgtgcggcaagggcgacagcagcatcagatacttcgagatcaccgacgagccccccttcgtgcactacctgaacaccttcagcagcaaggagccccagagaggcatgggcttcatgcccaagagaggcctggacgtgagcaagtgcgagatcgccagattctacaagctgcacgagagaaagtgcgagcccatcatcatgaccgtgcccagaaagagcgacctgttccaggacgacctgtaccccgacacccccggccccgagcccgccctggaggccgacgagtggctgagcggccaggacgccgagcccgtgctgatcagcctgagagacggctacgtgccccccaagcacagagagctgagagtgaccaagagaaacatcctggacgtgagaccccccagcggccccagaagaagccagagcgccagcgacgcccccctgagccagcagcacaccctggagaccctgctggaggagatcaaggccctgagagagagagtgcaggcccaggagcagagaatcaccgccctggagaacatgctgtgcgagctggtggacggcaccgactag

SEQ ID NO: 12424 - DNA, 390 bp, synthetic construct
  source 1..390: mol_type = other DNA; note = Synthetic coding sequence
atcctgcacagcctggtgcagaccggcatctgcgtgatcaccctggccgagagccaccccgtgctgcagagcggcaagaccatcaagagcatcagctaccagatcagcaccaactgcagcagactgcagaacaaggtgagcggcaagttcaagagaggcgcccagttcctgaccgagctggcccccctgtgcaagatctactgcagcgacggcgaggagtacaccgtgagcagctgcgtgagaggcagactgatggaggtgaacgagaacatcctgcacaagcccagcatcctgcaggagaagcccagcaccgagggctacatcgccgtggtgctgcccaagttcgaggagagcaagagcatcaccgagggcctgctgacccagaagtag

SEQ ID NO: 12425 - DNA, 735 bp, synthetic construct
  source 1..735: mol_type = other DNA; note = Synthetic coding sequence
atggtgcaccaggacaactgcagctaccaggcccagaagaacgagagagagagcatcagacagaagctggccctgggcagcttcttcgacgacggccccggcatctacaccagctgcagcaagagcggcaagcccagcctgagcagcagactgcagagcggcatgaacctgcagatctgcttcgtgaacgacagcggcagcgacaaggacagcgacgccgacgacagcaagaccgagaccagcctggacacccccctgagccccatgagcaagcagagcagcagctacagcgacagagacaccaccgaggaggagagcgagagcctggacgacatggacttcctgaccagacagaagaagctgcaggccgaggccaagatggccctggccatggccaagcccatggccaagatgcaggtggaggtggagaagcagaacagaaagaagagccccgtggccgacctgctgccccacatgccccacatcagcgagtgcctgatgaagagaagcctgaagcccaccgacctgagagacatgaccatcggccagctgcaggtgatcgtgaacgacctgcacagccagatcgagagcctgaacgaggagctggtgcagctgctgctgatcagagacgagctgcacaccgagcaggacgccatgctggtggacatcgaggacctgaccagacacgccgagagccagcagaagcacatggccgagaagatgcccgccaagtag

SEQ ID NO: 12426 - DNA, 1620 bp, synthetic construct; identical to SEQ ID NO: 10018
  source 1..1620: mol_type = other DNA; note = Synthetic coding sequence

SEQ ID NO: 12427 - DNA, 441 bp, synthetic construct
  source 1..441: mol_type = other DNA; note = Synthetic coding sequence
atgttcgagatcctgaccagcgagttcagctaccagcacagcctgagcatcctggtggaggagttcctgcagagcaaggagctgagagccaccgtgacccagatggagcaccaccacctgttcagcaacatcctggacgtgctgggcgccagccagagattcttcgaggacctggagcagagacacaaggcccaggtgctggtggaggacatcagcgacatcctggaggagcacgccgagaagcacttccacccctacatcgcctactgcagcaacgaggtgtaccagcagagaaccctgcagaagctgatcagcagcaacgccgccttcagagaggccctgagagagatcgagagaagacccgcctgcggcggcctgcccatgctgagcttcctgatcctgcccatgcagagagtgaccagactgcccctgctgatgtag

SEQ ID NO: 12428 - DNA, 483 bp, synthetic construct; identical to SEQ ID NO: 10977
  source 1..483: mol_type = other DNA; note = Synthetic coding sequence

SEQ ID NO: 12429 - DNA, 303 bp, synthetic construct
  source 1..303: mol_type = other DNA; note = Synthetic coding sequence
atgagctactaccagagacccttcagccccagcgcctacagcctgcccgccagcctgaacagcagcatcgtgatgcagcacggcaccagcctggacagcaccgacacctacccccagcacgcccagagcctggacggcaccaccagcagcagcatccccctgtacagaagcagcgaggaggagaagagagtgaccgtgatcaaggccccccactaccccggcatcggccccgtggacgagagcggcatccccaccgccatcagaaccaccgtggacagacccaaggactggtacaagacctag

SEQ ID NO: 12430 - DNA, 369 bp, synthetic construct; identical to SEQ ID NO: 12080
  source 1..369: mol_type = other DNA; note = Synthetic coding sequence

SEQ ID NO: 12431 - DNA, 633 bp, synthetic construct
  source 1..633: mol_type = other DNA; note = Synthetic coding sequence
atggtgagcatgagcgtgcccgactgcctgagcatcatgacctacgtgagccagtactacaaccacttctgcagccccggccaggccggcgtgagcccccccagaaagggcctggccccctgcagcccccccagcgtggcccccacccccgtggagcccgaggacgtggcccagggcgaggagctgagcagcggcagcctgagcgagcagggcaccggccagacccccagcagcacctgcgccgcctgccagcagcacgtgcacctggtgcagagatacctggccgacggcagactgtaccacagacactgcttcagatgcagaagatgcagcagcaccctgctgcccggcgcctacgagaacggccccgaggagggcaccttcgtgtgcgccgagcactgcgccagactgggccccggcaccagaagcggcaccagacccggccccttcagccagcccaagcagcagcaccagcagcagctggccgaggacgccaaggacgtgcccggcggcggccccagcagcagcgcccccgccggcgccgaggccgacggccccaaggccagccccgaggccagaccccagatccccaccaagcccagagtgcccggcaagctgcaggagctggcctag

SEQ ID NO: 12432 - DNA, 390 bp, synthetic construct; identical to SEQ ID NO: 10956
  source 1..390: mol_type = other DNA; note = Synthetic coding sequence

SEQ ID NO: 12433 - DNA, 621 bp, synthetic construct
  source 1..621: mol_type = other DNA; note = Synthetic coding sequence
atggccctgaacgtggcccccgtgagagacaccaagtggctgaccctggaggtgtgcagacagttccagagaggcacctgcagcagaagcgacgaggagtgcaagttcgcccacccccccaagagctgccaggtggagaacggcagagtgatcgcctgcttcgacagcctgaagggcagatgcagcagagagaactgcaagtacctgcacccccccacccacctgaagacccagctggagatcaacggcagaaacaacctgatccagcagaagaccgccgccgccatgctggcccagcagatgcagttcatgttccccggcacccccctgcaccccgtggccttcccccccggcgccctgcaccccctgcccaagagacaggccctggagaagagcaacggcaccagcgccgtgttcaaccccagcgtgctgcactaccagcaggccctgaccagcgcccagctgcagcagcacgccgccttcatccccaccgacaacagcgagatcatcagcagaaacggcatggagtgccaggagagcgccctgagaatcaccaagcactgctactgcacctactaccccgtgagcagcagcatcgagctgccccagaccgcctgctag

SEQ ID NO: 12434 - DNA, 978 bp, synthetic construct
  source 1..978: mol_type = other DNA; note = Synthetic coding sequence
atgcagcagcccgtgagagccggcgacatcggcgtgagcagagtgcagacccaccacaacgccagccccttcagcgtgcccaagaagcaggacgagagccccatgatcggcgacggcgaggactacttcctgagcctgttcggcgacagcaagaagctgaccgcccacagcaactacacccagaagaccctgaagtacttcagcatgatcctggaggaggtgggccagttcaccagcagcagcctgggcgacgtggagatcgccgaggtgaacgtgaagggcctgttcgtgaagctgatcaacagcagcctggacaaggagatggccatcggcgaccacatcctgcagcagaacgtgaacggccagaccatcagcctgtacagattcctgcccaacatcgtgatgcaggccaacagcaccgtgaccgtgtgggccgccgccagcgaggccaagcaccagccccccagcgacttcctgtggaaggagcaggacaagttcagagccagccccgactgcatcaccatcctgtgcaagcccaacggccaggccatcgcctggtacacccccatccactggaagcaggcctgggagaagctggacgccgacgtggagttcaacagatgcagcgtggtgagccccaccttcagaaagagagtgttccagtggaccgccagcaccgccaccatcaccaaggagaagcaggaccagcccaagaaggacatcagcaactaccaggtggagcaggcccaggtgctgctgaagagagagaaggagatcccccccaccgtgttccccaacagaagcccctggtgccagaacccctacgtgagcgcccacccctactgccccctgatcgagccccacaacaccagcaccgccggcggcagactggacagacagcccagaaccagaagcaccagacccaacagagccagcggcagcaagaagaagaagaccagcgagagccagaagcagtag

SEQ ID NO: 12435 - DNA, 1257 bp, synthetic construct
  source 1..1257: mol_type = other DNA; note = Synthetic coding sequence
atgagagagatcgtgcacatccaggccggccagtgcggcaaccagatcggcaccaagttctgggaggtgatcagcgacgagcacggcatcgaccccgccggcggctacgtgggcgacagcgccctgcagctggagagaatcaacgtgtactacaacgagagcagcagccagaagtacgtgcccagagccgccctggtggacctggagcccggcaccatggacagcgtgagaagcggccccttcggccagctgttcagacccgacaacttcatcttcggccagaccggcgccggcaacaactgcctgcagggcttccagctgacccacagcctgggcggcggcaccggcagcggcatgggcaccctgctgatcagcaagatcagagaggagttccccgacagaatcatgaacaccttcagcgtgatgcccagccccaaggtgagcgacaccgtggtggagccctacaacgccaccctgagcgtgcaccagctggtggagaacaccgacgagacctactgcatcgacaacgaggccctgtacgacatctgcttcagaaccctgaagctgaccacccccacctacggcgacctgaaccacctggtgagcgccaccatgagcggcgtgaccaccagcctgagattccccggccagctgaacgccgacctgagaaagctggccgtgaacatggtgcccttccccagactgcacttcttcatgcccggcttcgcccccctgaccagcagaggcagccagcagtacagagccctgaccgtgcccgagctgacccagcagatgttcgacgccagaaacatgatggccgcctgcgaccccagacacggcagatacctgaccgtggccaccgtgttcagaggccccatgagcatgaaggaggtggacgagcagatgctggccatccagagcaagaacagcagctacttcgtggagtggatccccaacaacgtgaaggtggccgtgtgcgacatcccccccagaggcctgaagatggccagcaccttcatcggcaacagcaccgccatccaggagctgttcaagagaatcagcgagcagttcagcgccatgttcagaagaaaggccttcctgcactggttcaccggcgagggcatggacgagatggagttcaccgaggccgagagcaacatgaacgacctggtgagcgagtaccagcagtaccaggacgccaccgccaacgacggcgaggaggccttcgaggacgaggaggaggagatcgacggctag

SEQ ID NO: 12436 - DNA, 270 bp, synthetic construct
  source 1..270: mol_type = other DNA; note = Synthetic coding sequence
atggacgtgctgagccccctgagcttcatcaaggtgagccacgtgagaatgcagggcatcctgctgctggtgttcgccaagtaccagcacctgccctacatccagatcctgagcaccaagagcacccccaccggcctgttcggctactggggcaacaagggcggcgtgaacatctgcctgaagctgtacggctactacgtgagcatcatcaactgccacctgcccccccacatcagcaacaactaccagagactggagcacttcgactag

SEQ ID NO: 12437 - DNA, 180 bp, synthetic construct; identical to SEQ ID NO: 9329
  source 1..180: mol_type = other DNA; note = Synthetic coding sequence

SEQ ID NO: 12438 - DNA, 864 bp, synthetic construct
  source 1..864: mol_type = other DNA; note = Synthetic coding sequence
atggacgagaccgagatcggcagctgcttcggcagatacggcagcgtgaaggaggtgaagatcatcaccaacagaaccggcgtgagcaagggctacggcttcgtgagcttcgtgaacgacgtggacgtgcagaagatcgtgggcagccagatccacttccacggcaagaagctgaagctgggccccgccatcagaaagcagaagctgtgcgccagacacgtgcagcccagacccctggtggtgaacccccccccccccccccagttccagaacgtgtggagaaaccccaacaccgagacctacctgcagccccagatcacccccaaccccgtgacccagcacgtgcaggcctacagcgcctacccccacagccccggccaggtgatcaccggctgccagctgctggtgtacaactaccaggagtaccccacctaccccgacagcgccttccaggtgaccaccggctaccagctgcccgtgtacaactaccagcccttccccgcctaccccagaagccccttccaggtgaccgccggctaccagctgcccgtgtacaactaccaggccttccccgcctaccccaacagccccttccaggtggccaccggctaccagttccccgtgtacaactaccagcccttccccgcctaccccagcagccccttccaggtgaccgccggctaccagctgcccgtgtacaactaccaggccttccccgcctaccccaacagccccttccaggtggccaccggctaccagttccccgtgtacaactaccaggccttccccgcctaccccaacagccccgtgcaggtgaccaccggctaccagctgcccgtgtacaactaccagaagttcccctag

SEQ ID NO: 12439 - DNA, 1344 bp, synthetic construct; identical to SEQ ID NO: 9705
  source 1..1344: mol_type = other DNA; note = Synthetic coding sequence

SEQ ID NO: 12440 - DNA, 474 bp, synthetic construct
  source 1..474: mol_type = other DNA; note = Synthetic coding sequence
atggccaacatcgccgtgcagagaatcaagagagagttcaaggaggtgctgaagagcgaggagaccagcaagaaccagatcaaggtggacctggtggacgagaacttcaccgagctgagaggcgagatcgccggcccccccgacaccccctacgagggcggcagataccagctggagatcaagatccccgagacctaccccttcaacccccccaaggtgagattcatcaccaagatctggcaccccaacatcagcagcgtgaccggcgccatctgcctggacatcctgaaggaccagtgggccgccgccatgaccctgagaaccgtgctgctgagcctgcaggccctgctggccgccgccgagcccgacgacccccaggacgccgtggtggccaaccagaacgccgtgatcgtggccctgagcagcaagagctgggacgtggagaccgccaccgagctgctgctgagcaactag

SEQ ID NO: 12441 - DNA, 582 bp, synthetic construct; identical to SEQ ID NO: 9313
  source 1..582: mol_type = other DNA; note = Synthetic coding sequence

SEQ ID NO: 12442 - DNA, 1188 bp, synthetic construct; identical to SEQ ID NO: 11022
  source 1..1188: mol_type = other DNA; note = Synthetic coding sequence

SEQ ID NO: 12443 - DNA, 624 bp, synthetic construct
  source 1..624: mol_type = other DNA; note = Synthetic coding sequence
atgaccgaggacagccagagaaacttcagaagcgtgtactacgagaaggtgggcttcagaggcgtggaggagaagaagagcctggagatcctgctgaaggacgacagactgggcatcctgcccccccaccacgagagccacgccaaggtgatgatgtacagaaaggagcagtacctggacgtgctgcacgccctgaaggtggtgagattcgtgagcgacgccaccccccaggccgaggtgtacctgagaatgtaccagctggagagcggcaagctgcccagaagccccagcttccccctggagcccgacgacgaggtgttcctggccatcgccaaggccatggaggagatggtggaggacagcgtggactgctactggatcaccagaagattcgtgaaccagctgaacaccaagtacagagacagcctgccccagctgcccaaggccttcgagcagtacctgaacctggaggacggcagactgctgacccacctgagaatgtgcagcgccgcccccaagctgccctacgacctgtggttcaagagatgcttcgccggctgcctgcccgagagcagcctgcagagagtgtgggacaaggtggtgagcggcagctgcaagatctag

SEQ ID NO: 12444 - DNA, 1404 bp, synthetic construct
  source 1..1404: mol_type = other DNA; note = Synthetic coding sequence
atggccagcctgctgcagagcgacagagtgctgtacctggtgcagggcgagaagaaggtgagagcccccctgagccagctgtacttctgcagatactgcagcgagctgagaagcctggagtgcgtgagccacgaggtggacagccactactgccccagctgcctggagaacatgcccagcgccgaggccaagctgaagaagaacagatgcgccaactgcttcgactgccccggctgcatgcacaccctgagcaccagagccaccagcatcagcacccagctgcccgacgaccccgccaagaccaccatgaagaaggcctactacctggcctgcggcttctgcagatggaccagcagagacgtgggcatggccgacaagagcgtggccagcggcggctggcaggagcccgagaacccccacacccagagaatgaacaagctgatcgagtactaccagcagctggcccagaaggagaaggtggagagagacagaaagaagctggccagaagaagaaactacatgcccctggccttcagccagcacaccatccacgtggtggacaagtacggcctgggcaccagactgcagagacccagagccggcgccagcatcagcaccctggccggcctgagcctgaaggagggcgaggaccagaaggagatcaagatcgagcccgcccaggccgtggacgaggtggagcccctgcccgaggactactacaccagacccgtgaacctgaccgaggtgaccaccctgcagcagagactgctgcagcccgacttccagcccgtgtgcgccagccagctgtaccccagacacaagcacctgctgatcaagagaagcctgagatgcagaaagtgcgagcacaacctgagcaagcccgagttcaaccccaccagcatcaagttcaagatccagctggtggccgtgaactacatccccgaggtgagaatcatgagcatccccaacctgagatacatgaaggagagccaggtgctgctgaccctgaccaaccccgtggagaacctgacccacgtgaccctgttcgagtgcgaggagggcgaccccgacgacatcaacagcaccgccaaggtggtggtgccccccaaggagctggtgctggccggcaaggacgccgccgccgagtacgacgagctggccgagccccaggacttccaggacgaccccgacatcatcgccttcagaaaggccaacaaggtgggcatcttcatcaaggtgaccccccagagagaggagggcgaggtgaccgtgtgcttcaagatgaagcacgacttcaagaacctggccgcccccatcagacccatcgaggagagcgaccagggcaccgaggtgatctggctgacccagcacgtggagctgagcctgggccccctgctgccctag

SEQ ID NO: 12445 - DNA, 435 bp, synthetic construct
  source 1..435: mol_type = other DNA; note = Synthetic coding sequence
gtgagagagctggaggccgagctggacgccgagcagaagaagcacgccgaggccctgaagggcgtgagaaagcacgagagaagagtgaaggagctggcctaccaggccgaggaggacagaaagaacctggccagaatgcaggacctggtggacaagctgcagagcaaggtgaagagctacaagagacagttcgaggaggccgtgagcgccctgggccccggccacctggacagagccccccagctgtgccccagagtgtgcggccaggagcagcaggccaacaccaacctggccaagtacagaaaggcccagcacgagctggacgacgccgaggagagagccgacatggccgagacccaggccaacaagctgagagccagaaccagagacgccctgggccccaagctgagcctgagcccccagcacaaggagtag

SEQ ID NO: 12446 - DNA, 747 bp, synthetic construct; identical to SEQ ID NO: 11765
  source 1..747: mol_type = other DNA; note = Synthetic coding sequence

SEQ ID NO: 12447 - DNA, 3468 bp, synthetic construct
  source 1..3468: mol_type = other DNA; note = Synthetic coding sequence
atggccgccagcagagacctgctgaaggagttcccccagcccaagaacctgctgaacagcgtgatcggcagagccctgggcatcagccacgccaaggacaagctggtgtacgtgcacaccaacggccccaagaagaagaaggtgaccctgcacatcaagtggcccaagagcgtggaggtggagggctacggcagcaagaagatcgacgccgagagacaggccgccgccgccgcctgccagctgttcaagggctggggcctgctgggccccagaaacgagctgttcgacgccgccaagtacagagtgctggccgacagattcggcagccccgccgacagctggtggagacccgagcccaccatgccccccaccagctggagacagctgaaccccgagagcatcagacccggcggccccggcggcctgagcagaagcctgggcagagaggaggaggaggacgaggaggaggagctggaggagggcaccatcgacgtgaccgacttcctgagcatgacccagcaggacagccacgcccccctgagagacagcagaggcagcagcttcgagatgaccgacgacgacagcgccatcagagccctgacccagttccccctgcccaagaacctgctggccaaggtgatccagatcgccaccagcagcagcaccgccaagaacctgatgcagttccacaccgtgggcaccaagaccaagctgagcaccctgaccctgctgtggccctgccccatgaccttcgtggccaagggcagaagaaaggccgaggccgagaacaaggccgccgccctggcctgcaagaagctgaagagcctgggcctggtggacagaaacaacgagcccctgacccacgccatgtacaacctggccagcctgagagagctgggcgagacccagagaagaccctgcaccatccaggtgcccgagcccatcctgagaaagatcgagaccttcctgaaccactaccccgtggagagcagctggatcgcccccgagctgagactgcagagcgacgacatcctgcccctgggcaaggacagcggccccctgagcgaccccatcaccggcaagccctacgtgcccctgctggaggccgaggaggtgagactgagccagagcctgctggagctgtggagaagaagaggccccgtgtggcaggaggccccccagctgcccgtggacccccacagagacaccatcctgaacgccatcgagcagcaccccgtggtggtgatcagcggcgacaccggctgcggcaagaccaccagaatcccccagctgctgctggagagatacgtgaccgagggcagaggcgccagatgcaacgtgatcatcacccagcccagaagaatcagcgccgtgagcgtggcccagagagtgagccacgagctgggccccagcctgagaagaaacgtgggcttccaggtgagactggagagcaagccccccagcagaggcggcgccctgctgttctgcaccgtgggcatcctgctgagaaagctgcagagcaaccccagcctggagggcgtgagccacgtgatcgtggacgaggtgcacgagagagacgtgaacaccgacttcctgctgatcctgctgaagggcctgcagagactgaaccccgccctgagactggtgctgatgagcgccaccggcgacaacgagagattcagcagatacttcggcggctgccccgtgatcaaggtgcccggcttcatgtaccccgtgaaggagcactacctggaggacatcctggccaagctgggcaagcaccagtacctgcacagacacagacaccacgagagcgaggacgagtgcgccctggacctggacctggtgaccgacctggtgctgcacatcgacgccagaggcgagcccggcggcatcctgtgcttcctgcccggctggcaggagatcaagggcgtgcagcagagactgcaggaggccctgggcatgcacgagagcaagtacctgatcctgcccgtgcacagcaacatccccatgatggaccagaaggccatcttccagcagccccccgtgggcgtgagaaagatcgtgctggccaccaacatcgccgagaccagcatcaccatcaacgacatcgtgcacgtggtggacagcggcctgcacaaggaggagagatacgacctgaagaccaaggtgagctgcctggagaccgtgtgggtgagcagagccaacgtgatccagagaagaggcagagccggcagatgccagagcggcttcgcctaccacctgttccccagaagcagactggagaagatggtgcccttccaggtgcccgagatcctgagaacccccctggagaacctggtgctgcaggccaagatccacatgcccgagaagaccgccgtggagttcctgagcaaggccgtggacagccccaacatcaaggccgtggacgaggccgtgatcctgctgcaggagatcggcgtgctggaccagagagagtacctgaccaccctgggccagagactggcccacatcagcaccgaccccagactggccaaggccatcgtgctggccgccatcttcagatgcctgcaccccctgctggtggtggtgagctgcctgaccagagaccccttcagcagcagcctgcagaacagagccgaggtggacaaggtgaaggccctgctgagccacgacagcggcagcgaccacctggccttcgtgagagccgtggccggctgggaggaggtgctgagatggcaggacagaagcagcagagagaactacctggaggagaacctgctgtacgcccccagcctgagattcatccacggcctgatcaagcagttcagcgagaacatctacgaggccttcctggtgggcaagcccagcgactgcaccctggccagcgcccagtgcaacgagtacagcgaggaggaggagctggtgaagggcgtgctgatggccggcctgtaccccaacctgatccaggtgagacagggcaaggtgaccagacagggcaagttcaagcccaacagcgtgacctacagaaccaagagcggcaacatcctgctgcacaagagcaccatcaacagagaggccaccagactgagaagcagatggctgacctacttcatggccgtgaagagcaacggcagcgtgttcgtgagagacagcagccaggtgcaccccctggccgtgctgctgctgaccgacggcgacgtgcacatcagagacgacggcagaagagccaccatcagcctgagcgacagcgacctgctgagactggagggcgacagcagaaccgtgagactgctgaaggagctgagaagagccctgggcagaatggtggagagaagcctgagaagcgagctggccgccctgccccccagcgtgcaggaggagcacggccagctgctggccctgctggccgagctgctgagaggcccctgcggcagcttcgacgtgagaaagaccgccgacgactag

SEQ ID NO: 12448 - DNA, 762 bp, synthetic construct
  source 1..762: mol_type = other DNA; note = Synthetic coding sequence
tgagtgggcgtggaggccgccagagtgatcgccaaggccctggagaagaagagcgagctgaagagatgccactggagcgacatgttcaccggcagactgagaaccgagatcccccccgccctgatcagcctgggcgagggcctgatcaccgccggcgcccagctggtggagctggacctgagcgacaacgccttcggccccgacggcgtgcagggcttcgaggccctgctgaagagcagcgcctgcttcaccctgcaggagctgaagctgaacaactgcggcatgggcatcggcggcggcaaggtgatcggcaccctggaggaggtgcacatgccccagaacggcatcaaccaccccggcatcaccgccctggcccaggccttcgccgtgaaccccctgctgagagtgatcaacctgaacgacaacaccttcaccgagaagggcgccgtggccatggccgagaccctgaagaccctgagacaggtggaggtgatcaacttcggcgactgcctggtgagaagcaagggcgccgtggccatcgccgacgccatcagaggcggcctgcccaagctgaaggagctgaacctgagcttctgcgagatcaagagagacgccgccctggccgtggccgaggccatggccgacaaggccgagctggagaagctggacctgaacggcaacaccctgggcgaggagggctgcgagcagctgcaggaggtgctggagggcttcaacatggccaaggtgctggccagcctgtag

SEQ ID NO: 12449 - DNA, 3735 bp, synthetic construct
  source 1..3735: mol_type = other DNA; note = Synthetic coding sequence
gacgtgggcggcgacagaccctgggacagcggcaacacccagctgccccccagaaaccccgtgaaggccaacgccatgttcggcgccggcgacgaggacgacaccgacttcctgagccccagcggcggcgccagactggccagcctgttcggcctggaccaggccgccgccggccacggcaacgagttcttccagtacaccgcccccaagcagcccaagaagggccagggcaccgccgccaccggcaaccaggccacccccaagaccgcccccgccaccatgagcacccccaccatcctggtggccaccgccgtgcacgcctacagatacaccaacggccagtacgtgaagcagggcaagttcggcgccgccgtgctgggcaaccacaccgccagagagtacagaatcctgctgtacatcagccagcagcagcccgtgaccgtggccagaatccacgtgaacttcgagctgatggtgagacccaacaactacagcaccttctacgacgaccagagacagaactggagcatcatgttcgagagcgagaaggccgccgtggagttcaacaagcaggtgtgcatcgccaagtgcaacagcaccagcagcctggacgccgtgctgagccaggacctgatcgtggccgacggccccgccgtggaggtgggcgacagcctggaggtggcctacaccggctggctgttccagaaccacgtgctgggccaggtgttcgacagcaccgccaacaaggacaagctgctgagactgaagctgggcagcggcaaggtgatcaagggctgggaggacggcatgctgggcatgaagaagggcggcaagagactgctgatcgtgccccccgcctgcgccgtgggcagcgagggcgtgatcggctggacccaggccaccgacagcatcctggtgttcgaggtggaggtgagaagagtgaagttcgccagagacagcggcagcgacggccacagcgtgagcagcagagacagcgccgcccccagccccatccccggcgccgacaacctgagcgccgaccccgtggtgagcccccccaccagcatccccttcaagagcggcgagcccgccctgagaaccaagagcaacagcctgagcgagcagctggccatcaacaccagccccgacgccgtgaaggccaagctgatcagcagaatggccaagatgggccagcccatgctgcccatcctgcccccccagctggacagcaacgacagcgagatcgaggacgtgaacaccctgcagggcggcggccagcccgtggtgacccccagcgtgcagcccagcctgcaccccgcccaccccgccctgccccagatgaccagccaggccccccagcccagcgtgaccggcctgcaggcccccagcgccgccctgatgcaggtgagcagcctggacagccacagcgccgtgagcggcaacgcccagagcttccagccctacgccggcatgcaggcctacgcctacccccaggccagcgccgtgaccagccagctgcagcccgtgagacccctgtaccccgcccccctgagccagcccccccacttccagggcagcggcgacatggccagcttcctgatgaccgaggccagacagcacaacaccgagatcagaatggccgtgagcaaggtggccgacaagatggaccacctgatgaccaaggtggaggagctgcagaagcacagcgccggcaacagcatgctgatccccagcatgagcgtgaccatggagaccagcatgatcatgagcaacatccagagaatcatccaggagaacgagagactgaagcaggagatcctggagaagagcaacagaatcgaggagcagaacgacaagatcagcgagctgatcgagagaaaccagagatacgtggagcagagcaacctgatgatggagaagagaaacaacagcctgcagaccgccaccgagaacacccaggccagagtgctgcacgccgagcaggagaaggccaaggtgaccgaggagctggccgccgccaccgcccaggtgagccacctgcagctgaagatgaccgcccaccagaagaaggagaccgagctgcagatgcagctgaccgagagcctgaaggagaccgacctgctgagaggccagctgaccaaggtgcaggccaagctgagcgagctgcaggagaccagcgagcaggcccagagcaagttcaagagcgagaagcagaacagaaagcagctggagctgaaggtgaccagcctggaggaggagctgaccgacctgagagtggagaaggagagcctggagaagaacctgagcgagagaaagaagaagagcgcccaggagagaagccaggccgaggaggagatcgacgagatcagaaagagctaccaggaggagctggacaagctgagacagctgctgaagaagaccagagtgagcaccgaccaggccgccgccgagcagctgagcctggtgcaggccgagctgcagacccagtgggaggccaagtgcgagcacctgctggccagcgccaaggacgagcacctgcagcagtaccaggaggtgtgcgcccagagagacgcctaccagcagaagctggtgcagctgcaggagaagtgcctggccctgcaggcccagatcaccgccctgaccaagcagaacgagcagcacatcaaggagctggagaagaacaagagccagatgagcggcgtggaggccgccgccagcgaccccagcgagaaggtgaagaagatcatgaaccaggtgttccagagcctgagaagagagttcgagctggaggagagctacaacggcagaaccatcctgggcaccatcatgaacaccatcaagatggtgaccctgcagctgctgaaccagcaggagcaggagaaggaggagagcagcagcgaggaggaggaggagaaggccgaggagagacccagaagacccagccaggagcagagcgccagcgccagcagcggccagccccaggcccccctgaacagagagagacccgagagccccatggtgcccagcgagcaggtggtggaggaggccgtgcccctgcccccccaggccctgaccaccagccaggacggccacagaagaaagggcgacagcgaggccgaggccctgagcgagatcaaggacggcagcctgccccccgagctgagctgcatccccagccacagagtgctgggcccccccaccagcatcccccccgagcccctgggccccgtgagcatggacagcgagtgcgaggagagcctggccgccagccccatggccgccaagcccgacaaccccagcggcaaggtgtgcgtgagagaggtggcccccgacggccccctgcaggagagcagcaccagactgagcctgaccagcgaccccgaggagggcgaccccctggccctgggccccgagagccccggcgagccccagcccccccagctgaagaaggacgacgtgaccagcagcaccggcccccacaaggagctgagcagcaccgaggccggcagcaccgtggccggcgccgccctgagacccagccaccacagccagagaagcagcctgagcggcgacgaggaggacgagctgttcaagggcgccaccctgaaggccctgagacccaaggcccagcccgaggaggaggacgaggacgaggtgagcatgaagggcagacccccccccacccccctgttcggcgacgacgacgacgacgacgacatcgactggctgggctag

SEQ ID NO: 12450 - DNA, 1653 bp, synthetic construct
  source 1..1653: mol_type = other DNA; note = Synthetic coding sequence
atgaagtgggaggagtacgaggagctgctgcactacgccatcgtgacccccaacatcgagccctgcgccagccagagcagccaccccaagggcgagctggtgcccgacgtgagaatcagcaccatccacgacatcctgcacagccagggcaacaacagcgaggtgagagagaccgccatcgaggtgggcaagggctgcgacttccacatcagcagccacagcaagaccgacgagagcagccccgtgctgagccccagaaagcccagccaccccgtgatggacttcttcagcagccacctgctggccgacagcagcagccccgccaccaacagcagccacaccgacgcccacgagatcctggtgagcgacttcctggtgagcgacgagaacctgcagaagatggagaacgtgctggacctgtggagcagcggcctgaagaccaacatcatcagcgagctgagcaagtggagactgaacttcatcgactggcacagaatggagatgagaaaggagaaggagaagcacgccgcccacctgaagcagctgtgcaaccagatcaacgagctgaaggagctgcagaagaccttcgagatcagcatcggcagaaaggacgaggtgatcagcagcctgagccacgccatcggcaagcagaaggagaagatcgagctgatgagaaccttcttccactggagaatcggccacgtgagagccagacaggacgtgtacgagggcaagctggccgaccagtactaccagagaaccctgctgaagaaggtgtggaaggtgtggagaagcgtggtgcagaagcagtggaaggacgtggtggagagagcctgccaggccagagccgaggaggtgtgcatccagatcagcaacgactacgaggccaaggtggccatgctgagcggcgccctggagaacgccaaggccgagatccagagaatgcagcacgagaaggagcacttcgaggacagcatgaagaaggccttcatgagaggcgtgtgcgccctgaacctggaggccatgaccatcttccagaacagaaacgacgccggcatcgacagcaccaacaacaagaaggaggagtacggccccggcgtgcagggcaaggagcacagcgcccacctggaccccagcgccccccccatgcccctgcccgtgaccagccccctgctgcccagcccccccgccgccgtgggcggcgccagcgccaccgccgtgcccagcgccgccagcatgaccagcaccagagccgccagcgccagcagcgtgcacgtgcccgtgagcgccctgggcgccggcagcgccgccaccgccgccagcgaggagatgtacgtgcccagagtggtgaccagcgcccagcagaaggccggcagaaccatcaccgccagaatcaccggcagatgcgacttcgccagcaagaacagaatcagcagcagcctggccatcatgggcgtgagcccccccatgagcagcgtggtggtggagaagcaccaccccgtgaccgtgcagaccatcccccaggccaccgccgccaagtaccccagaaccatccaccccgagagcagcaccagcgccagcagaagcctgggcaccagaagcgcccacacccagagcctgaccagcgtgcacagcatcaaggtggtggactag

SEQ ID NO: 12451 - DNA, 402 bp, synthetic construct
  source 1..402: mol_type = other DNA; note = Synthetic coding sequence
atgagccccagccagatgatcatgcccaacgtgatggagatgatcgccgccctgggccccggccccagcccctaccccctgccccccccccccggcggcaccaacagcaacgactacagcagccagggcaacaactaccagggccacggcaacttcgacttcccccacggcaaccccggcggcaccagcatgaacgacttcatgcacggccccccccagctgagccacccccccgacatgcccaacaacatggccgccctggagaagcccctgagccaccccatgcaggagaccctgctgcccgagctgaccaaccccgacgagctgctgagctacctggacccccccgacctgcccagcaacagcaacgacgacctgctgagcctgttcgagaacaactag

SEQ ID NO: 12452 - DNA, 1473 bp, synthetic construct
  source 1..1473: mol_type = other DNA; note = Synthetic coding sequence
atgagcagctgcgtgagcagccagcccagcagcaacagagccgccccccaggacgagctgggcggcagaggcagcagcagcagcgagagccagaagccctgcgaggccctgagaggcctgagcagcctgagcatccacctgggcatggagagcttcatcgtggtgaccgagtgcgagcccggctgcgccgtggacctgggcctggccagagacagacccctggaggccgacggccaggaggtgcccctggacaccagcggcagccaggccagaccccacctgagcggcagaaagctgagcctgcaggagagaagccagggcggcctggccgccggcggcagcctggacatgaacggcagatgcatctgccccagcctgccctacagccccgtgagcagcccccagagcagccccagactgcccagaagacccaccgtggagagccaccacgtgagcatcaccggcatgcaggactgcgtgcagctgaaccagtacaccctgaaggacgagatcggcaagggcagctacggcgtggtgaagctggcctacaacgagaacgacaacacctactacgccatgaaggtgctgagcaagaagaagctgatcagacaggccggcttccccagaagacccccccccagaggcaccagacccgcccccggcggctgcatccagcccagaggccccatcgagcaggtgtaccaggagatcgccatcctgaagaagctggaccaccccaacgtggtgaagctggtggaggtgctggacgaccccaacgaggaccacctgtacatggtgttcgagctggtgaaccagggccccgtgatggaggtgcccaccctgaagcccctgagcgaggaccaggccagattctacttccaggacctgatcaagggcatcgagtacctgcactaccagaagatcatccacagagacatcaagcccagcaacctgctggtgggcgaggacggccacatcaagatcgccgacttcggcgtgagcaacgagttcaagggcagcgacgccctgctgagcaacaccgtgggcacccccgccttcatggcccccgagagcctgagcgagaccagaaagatcttcagcggcaaggccctggacgtgtgggccatgggcgtgaccctgtactgcttcgtgttcggccagtgccccttcatggacgagagaatcatgtgcctgcacagcaagatcaagagccaggccctggagttccccgaccagcccgacatcgccgaggacctgaaggacctgatcaccagaatgctggacaagaaccccgagagcagaatcgtggtgcccgagatcaagatcctggtgaagaccatgatcagaaagagaagcttcggcaaccccttcgagggcagcagaagagaggagagaagcctgagcgcccccggcaacctgctgaccaagaagcccaccagagagtgcgagagcctgagcgagctgaagacctag

SEQ ID NO: 12453 - DNA, 1872 bp, synthetic construct
  source 1..1872: mol_type = other DNA; note = Synthetic coding sequence
atggccgccgccaccggcgaccccggcctgagcaagctgcagttcgcccccttcagcagcgccctggacgtgggcttctggcacgagctgacccagaagaagctgaacgagtacagactggacgaggcccccaaggacatcaagggctactactacaacggcgacagcgccggcctgcccgccagactgaccctggagttcagcgccttcgacatgagcgcccccacccccgccagatgctgccccgccatcggcaccctgtacaacaccaacaccctggagagcttcaagaccgccgacaagaagctgctgctggagcaggccgccaacgagatctgggagagcatcaagagcggcaccgccctggagaaccccgtgctgctgaacaagttcctgctgctgaccttcgccatcgaggccctggagtgcgcctacgacaacctgtgccagaccgagggcgtgaccgccctgccctacttcctgatcaagtacgacgagaacatggtgctggtgagcctgctgaagcactacagcgacttcttccagggccagagaaccaagatcaccatcggcgtgtacgacccctgcaacctggcccagtaccccggctggcccctgagaaacttcctggtgctggccgcccacagatggagcagcagcttccagagcgtggaggtggtgtgcttcagagacagaaccatgcagggcgccagagacgtggcccacagcatcatcttcgaggtgaagctgcccgagatggccttcagccccgactgccccaaggccgtgggctgggagaagaaccagaagggcggcatgggccccagaatggtgaacctgagcgagtgcatggaccccaagagactggccgagagcagcgtggacctgaacctgaagctgatgtgctggagactggtgcccaccctggacctggacaaggtggtgagcgtgaagtgcctgctgctgggcgccggcaccctgggctgcaacgtggccagaaccctgatgggctggggcgtgagacacatcaccttcgtggacaacgccaagatcagctacagcaaccccgtgagacagcccctgtacgagttcgaggactgcctgggcggcggcaagcccaaggccctggccgccgccgacagactgcagaagatcttccccggcgtgaacgccagaggcttcaacatgagcatccccatgcccggccaccccgtgaacttcagcagcgtgaccctggagcaggccagaagagacgtggagcagctggagcagctgatcgagagccacgacgtggtgttcctgctgatggacaccagagagagcagatggctgcccgccgtgatcgccgccagcaagagaaagctggtgatcaacgccgccctgggcttcgacaccttcgtggtgatgagacacggcctgaagaagcccaagcagcagggcgccggcgacctgtgccccaaccaccccgtggccagcgccgacctgctgggcagcagcctgttcgccaacatccccggctacaagctgggctgctacttctgcaacgacgtggtggcccccggcgacagcaccagagacagaaccctggaccagcagtgcaccgtgagcagacccggcctggccgtgatcgccggcgccctggccgtggagctgatggtgagcgtgctgcagcaccccgagggcggctacgccatcgccagcagcagcgacgacagaatgaacgagccccccaccagcctgggcctggtgccccaccagatcagaggcttcctgagcagattcgacaacgtgctgcccgtgagcctggccttcgacaagtgcaccgcctgcagcagcaagatctgggacatgagcgacgacgagaccatctag

SEQ ID NO: 12454 - DNA, 966 bp, synthetic construct
  source 1..966: mol_type = other DNA; note = Synthetic coding sequence
agaagaaacgtggagctgatcaacgaggaggccgccatgttcgacagcctgctgatggacagctacgtgagcagcaccaccggcgagagcgtgatcaccagagagatggtggagatgctgttcagcgacgacagcgacctgcagctggccaccacccagaagttcagaaagctgctgagcaaggagcccagcccccccatcgacgaggtgatcaacacccccagagtggtggacagattcgtggagttcctgaagagaaacgagaactgcaccctgcaggccgtgtgggccctgggcaacatcgccggcgacagcagcgtgtgcagagactacgtgctgaactgcagcatcctgaaccccctgctgaccctgctgaccaagagcaccagactgaccatgaccagaaacgccgtgtgggccctgagcaacctgtgcagaggcaagaaccccccccccgagttcgccaaggtgagcccctgcctgcccgtgctgagcagactgctgttcagcagcgacagcgacctgctggccgacgcctgctgggccctgagctacctgagcgacggccccaacgagaagatccaggccgtgatcgacagcggcgtgtgcagaagactggtggagctgctgatgcacaacgactacaaggtggccagccccgccctgagagccgtgggcaacatcgtgaccggcgacgacatccagacccaggtgatcctgaactgcagcgccctgccctgcctgctgcacctgctgagcagccccaaggagagcatcagaaaggaggcctgctggaccatcagcaacatcaccgccggcaacagagcccagatccaggccgtgatcgacgccaacatcttccccgtgctgatcgagatcctgcagaaggccgagttcagaaccagaaaggaggccgcctgggccatcaccaacgccaccagcggcggcacccccgagcagatctag

SEQ ID NO: 12455 - DNA, 795 bp, synthetic construct
  source 1..795: mol_type = other DNA; note = Synthetic coding sequence
atgggcggcgcccagctggagctgcccagcggcgccagacccggcgtgtgcgtgagaagaagcttcagagcccacgccggcgaccagcccagaagaccccccggccccatccccgtgcccggcaccatgaagcaggagagcgccgcccccaacaccccccccaccagccagagccccacccccagcgcccagttccccagaaacgacggcgacccccaggccctgtggatcttcggctacggcagcctggtgtggagacccgacttcgcctacagcgacagcagagtgggcttcgtgagaggctacagcagaagattctggcagggcgacaccttccacagaggcagcgacaagatgcccggcagagtggtgaccctgctggaggaccacgagggctgcacctggggcgtggcctaccaggtgcagggcgagcaggtgagcaaggccctgaagtacctgaacgtgagagaggccgtgctgggcggctacgacaccaaggaggtgaccttctacccccaggacgcccccgaccagcccctgaaggccctggcctacgtggccaccccccagaaccccggctacctgggccccgcccccgaggaggccatcgccacccagatcctggcctgcagaggcttcagcggccacaacctggagtacctgctgagactggccgacttcatgcagctgtgcggcccccaggcccaggacgagcacctggccgccatcgtggacgccgtgggcaccatgctgccctgcttctgccccaccgagcaggccctggccctggtgtag

SEQ ID NO: 12456 - DNA, 747 bp, synthetic construct; identical to SEQ ID NO: 11765
  source 1..747: mol_type = other DNA; note = Synthetic coding sequence

SEQ ID NO: 12457 - DNA, 768 bp, synthetic construct
  source 1..768: mol_type = other DNA; note = Synthetic coding sequence
atgagcagcagcatgtggtacatcatgcagagcatccagagcaagtacagcctgagcgagagactgatcagaaccatcgccgccatcagaagcttcccccacgacaacgtggaggacctgatcagaggcggcgccgacgtgaactgcacccacggcaccctgaagcccctgcactgcgcctgcatggtgagcgacgccgactgcgtggagctgctgctggagaagggcgccgaggtgaacgccctggacggctacaacagaaccgccctgcactacgccgccgagaaggacgaggcctgcgtggaggtgctgctggagtacggcgccaaccccaacgccctggactacaacaacgacacccccctgagctgggccgccatgaagggcaacctggagagcgtgagcatcctgctggactacggcgccgaggtgagagtgatcaacctgatcggccagacccccatcagcagactggtggccctgctggtgagaggcctgggcaccgagaaggaggacagctgcttcgagctgctgcacagagccgtgggccacttcgagctgagaaagaacggcaccatgcccagagaggtggccagagacccccagctgtgcgagaagctgaccgtgctgtgcagcgcccccggcaccctgaagaccctggccagatacgccgtgagaagaagcctgggcctgcagtacctgcccgacgccgtgaagggcctgcccctgcccgccagcctgaaggagtacctgctgctgctggagtag

SEQ ID NO: 12458 - DNA, 585 bp, synthetic construct
  source 1..585: mol_type = other DNA; note = Synthetic coding sequence
gagcccgtgcagccccactggttctactgcaaggaggtggagtacaagcagctgtggatgcccttcagcgtgttcgacagcctgaacctggaggagatctacaacagcgtgcagcccgaccccgagagcgtggtgctgggcaccgacggcggcagatacgacgtgtacctgtacgacagaatcagaaaggccgcctactgggaggaggagcccgccgaggtgagaagatgcacctggttctacaagggcgacaccgacagcagattcatcccctacaccgaggagttcagcgagaagctggaggtgatcgtgcagttccagcccagcagcgtgcccgacgagtggggcaccacccaggacggccagaccagacccagagtggtgaagagaggcatcgacgacaacctggacgagatccccgacggcgagatgccccaggtggaccacctggtgttcgtggtgcacggcatcggccccgtgtgcgacctgagattcagaagcatcatcgagtgcgtggacgacttcagagtggtgagcctgaagctgctgagaacccacttcaagaagagcctggacgacggctag

SEQ ID NO: 12459 - DNA, 981 bp, synthetic construct; identical to SEQ ID NO: 11734
  source 1..981: mol_type = other DNA; note = Synthetic coding sequence

SEQ ID NO: 12460 - DNA, 990 bp, synthetic construct
  source 1..990: mol_type = other DNA; note = Synthetic coding sequence
atggccggcgccctggagggcgacatcttcatcggccccaaggccgaggagcacagaggcctgctgagcatcagataccccatggagcacggcatcgtgaaggactggaacgacatggagagaatctggcagtacgtgtacagcaaggaccagctgcagaccttcagcgaggagcaccccgtgctgctgaccgaggcccccctgaaccccagaaagaacagagagagagccgccgaggtgttcttcgagaccttcaacgtgcccgccctgttcatcagcatgcaggccgtgctgagcctgtacgccaccggcagaaccaccggcgtggtgctggacagcggcgacggcgtgacccacgccgtgcccatctacgagggcttcgccatgccccacagcatcatgagaatcgacatcgccggcagagacgtgagcagattcctgagactgtacctgagaaaggagggctacgacttccacagcagcagcgagttcgagatcgtgaaggccatcaaggagagagcctgctacctgagcatcaacccccagaaggacgagaccctggagaccgagaaggcccagtactacctgcccgacggcagcaccatcgagatcggccccagcagattcagagcccccgagctgctgttcagacccgacctgatcggcgaggagagcgagggcatccacgaggtgctggtgttcgccatccagaagagcgacatggacctgagaagaaccctgttcagcaacatcgtgctgagcggcggcagcaccctgttcaagggcttcggcgacagactgctgagcgaggtgaagaagctggcccccaaggacgtgaagatcagaatcagcgccccccaggagagactgtacagcacctggatcggcggcagcatcctggccagcctggacaccttcaagaagatgtgggtgagcaagaaggagtacgaggaggacggcgccagaagcatccacagaaagaccttctag

SEQ ID NO: 12461 - DNA, 450 bp, synthetic construct
  source 1..450: mol_type = other DNA; note = Synthetic coding sequence
atggagaagaccgagctgatccagaaggccaagctggccgagcaggccgagagatacgacgacatggccacctgcatgaaggccgtgaccgagcagggcgccgagctgagcaacgaggagagaaacctgctgagcgtggcctacaagaacgtggtgggcggcagaagaagcgcctggagagtgatcagcagcatcgagcagaagaccgacaccagcgacaagaagctgcagctgatcaaggactacagagagaaggtggagagcgagctgagaagcatctgcaccaccgtgctggagctgctggacaagtacctgatcgccaacgccaccaaccccgagagcaaggtgttctacctgaagatgaagggcgactacttcagatacctggccgaggtggcctgcggcgacgacagaaagcagaccatcgacaacagccagggcgcctactag

SEQ ID NO: 12462 - DNA, 735 bp, synthetic construct
  source 1..735: mol_type = other DNA; note = Synthetic coding sequence
atgctgagcgacagaaagagagagctggagcacagactgagcgccaccctggaggagaacgacctgctgcagggcaccgtggaggagctgcaggacagagtgctgatcctggagagacagggccacgacaaggacctgcagctgcaccagagccagctggagctgcaggaggtgagactgagctgcagacagctgcaggtgaaggtggaggagctgaccgaggagagaagcctgcagagcagcgccgccaccagcaccagcctgctgagcgagatcgagcagagcatggaggccgaggagctggagcaggagagagagcaggtgaccctgctgagcgtggagatgaccgccctgaaggaggagagagacagactgagagtgaccagcgaggacaaggagcccaaggagcagctgcagaaggccatcagagacagagacgaggccatcgccaagaagaacgccgtggagctggagctggccaagtgcagaatggacatgatgagcctgaacagccagctgctggacgccatccagcagaagctgaacctgagccagcagctggaggcctggcaggacgacatgcacagagtgatcgacagacagctgatggacacccacctgaaggagagaagccagcccgccgccgccctgtgcagaggccacagcgccggcagaggcgacgagcccagcatcgccgagggcaagagactgttcagcttcttcagaaagatctag

SEQ ID NO: 12463 - DNA, 603 bp, synthetic construct
  source 1..603: mol_type = other DNA; note = Synthetic coding sequence
tgacacatgctgagcaaggtgggcatgtgggacttcgacatcttcctgttcgacagactgaccaacggcaacagcctggtgaccctgctgtgccacctgttcaacacccacggcctgatccaccacttcaagctggacatggtgaccctgcacagattcctggtgatggtgcaggaggactaccacagccagaacccctaccacaacgccgtgcacgccgccgacgtgacccaggccatgcactgctacctgaaggagcccaagctggccagcttcctgacccccctggacatcatgctgggcctgctggccgccgccgcccacgacgtggaccaccccggcgtgaaccagcccttcctgatcaagaccaaccaccacctggccaacctgtaccaggtgagagagcccaacctggagcccgccaccgtgtggagcatcgccctgggccccgtgctgaagcccgagagctgcccctggagaaagccctgcttcagagtgctggaggtgcagagaagaatgaagcacaacctgtgcccccagaagttcgtgcagacccagatgctgaagatgagcaagatccaggccaacctgatccccgtgtag

SEQ ID NO: 12464 - DNA, 1728 bp, synthetic construct; identical to SEQ ID NO: 9795
  source 1..1728: mol_type = other DNA; note = Synthetic coding sequence

SEQ ID NO: 12465 - DNA, 3036 bp, synthetic construct; identical to SEQ ID NO: 11029
  source 1..3036: mol_type = other DNA; note = Synthetic coding sequence

SEQ ID NO: 12466 - DNA, 3786 bp, synthetic construct
  source 1..3786: mol_type = other DNA; note = Synthetic coding sequence
atggccgccgccgccgccagcggcgccggcggcgccgccggcgccggcaccggcggcgccggccccgccggcagactgctgcccccccccgcccccggcagccccgccgcccccgccgccgtgagccccgccgccggccagcccagaccccccgcccccgccagcagaggccccatgcccgccagaatcggctactacgagatcgacagaaccatcggcaagggcaacttcgccgtggtgaagagagccacccacctggtgaccaaggccaaggtggccatcaagatcatcgacaagacccagctggacgaggagaacctgaagaagatcttcagagaggtgcagatcatgaagatgctgtgccacccccacatcatcagactgtaccaggtgatggagaccgagagaatgatctacctggtgaccgagtacgccagcggcggcgagatcttcgaccacctggtggcccacggcagaatggccgagaaggaggccagaagaaagttcaagcagatcgtgaccgccgtgtacttctgccactgcagaaacatcgtgcacagagacctgaaggccgagaacctgctgctggacgccaacctgaacatcaagatcgccgacttcggcttcagcaacctgttcacccccggccagctgctgaagacctggtgcggcagccccccctacgccgcccccgagctgttcgagggcaaggagtacgacggccccaaggtggacatctggagcctgggcgtggtgctgtacgtgctggtgtgcggcgccctgcccttcgacggcagcaccctgcagaacctgagagccagagtgctgagcggcaagttcagaatccccttcttcatgagcaccgagtgcgagcacctgatcagacacatgctggtgctggaccccaacaagagactgagcatggagcagatctgcaagcacaagtggatgaagctgggcgacgccgaccccaacttcgacagactgatcgccgagtgccagcagctgaaggaggagagacaggtggaccccctgaacgaggacgtgctgctggccatggaggacatgggcctggacaaggagcagaccctgcaggccgagcaggccggcaccgccatgaacatcagcgtgccccaggtgcagctgatcaaccccgagaaccagatcgtggagcccgacggcaccctgaacctggacagcgacgagggcgaggagcccagccccgaggccctggtgagatacctgagcatgagaagacacaccgtgggcgtggccgaccccagaaccgaggtgatggaggacctgcagaagctgctgcccggcttccccggcgtgaacccccaggcccccttcctgcaggtggcccccaacgtgaacttcatgcacaacctgctgcccatgcagaacctgcagcccaccggccagctggagtacaaggagcagagcctgctgcagccccccaccctgcagctgctgaacggcatgggccccctgggcagaagagccagcgacggcggcgccaacatccagctgcacgcccagcagctgctgaagagacccagaggccccagccccctggtgaccatgacccccgccgtgcccgccgtgacccccgtggacgaggagagcagcgacggcgagcccgaccaggaggccgtgcagagatacctggccaacagaagcaagagacacaccctggccatgaccaaccccaccgccgagatcccccccgacctgcagagacagctgggccagcagcccttcagaagcagagtgtggcccccccacctggtgcccgaccagcacagaagcacctacaaggacagcaacaccctgcacctgcccaccgagagattcagccccgtgagaagattcagcgacggcgccgccagcatccaggccttcaaggcccacctggagaagatgggcaacaacagcagcatcaagcagctgcagcaggagtgcgagcagctgcagaagatgtacggcggccagatcgacgagagaaccctggagaagacccagcagcagcacatgctgtaccagcaggagcagcaccaccagatcctgcagcagcagatccaggacagcatctgccccccccagcccagcccccccctgcaggccgcctgcgagaaccagcccgccctgctgacccaccagctgcagagactgagaatccagcccagcagccccccccccaaccaccccaacaaccacctgttcagacagcccagcaacagccccccccccatgagcagcgccatgatccagccccacggcgccgccagcagcagccagttccagggcctgcccagcagaagcgccatcttccagcagcagcccgagaactgcagcagcccccccaacgtggccctgacctgcctgggcatgcagcagcccgcccagagccagcaggtgaccatccaggtgcaggagcccgtggacatgctgagcaacatgcccggcaccgccgccggcagcagcggcagaggcatcagcatcagccccagcgccggccagatgcagatgcagcacagaaccaacctgatggccaccctgagctacggccacagacccctgagcaagcagctgagcgccgacagcgccgaggcccacagcgcccaccagcagcccccccactacaccaccagcgccctgcagcaggccctgctgagccccaccccccccgactacaccagacaccagcaggtgccccacatcctgcagggcctgctgagccccagacacagcctgaccggccacagcgacatcagactgccccccaccgagttcgcccagctgatcaagagacagcagcagcagagacagcagcagcagcagcagcagcagcagcaggagtaccaggagctgttcagacacatgaaccagggcgacgccggcagcctggcccccagcctgggcggccagagcatgaccgagagacaggccctgagctaccagaacgccgacagctaccaccaccacaccagcccccagcacctgctgcagatcagagcccaggagtgcgtgagccaggccagcagccccacccccccccacggctacgcccaccagcccgccctgatgcacagcgagagcatggaggaggactgcagctgcgagggcgccaaggacggcttccaggacagcaagagcagcagcaccctgaccaagggctgccacgacagccccctgctgctgagcaccggcggccccggcgaccccgagagcctgctgggcaccgtgagccacgcccaggagctgggcatccacccctacggccaccagcccaccgccgccttcagcaagaacaaggtgcccagcagagagcccgtgatcggcaactgcatggacagaagcagccccggccaggccgtggagctgcccgaccacaacggcctgggctaccccgccagacccagcgtgcacgagcaccacagacccagagccctgcagagacaccacaccatccagaacagcgacgacgcctacgtgcagctggacaacctgcccggcatgagcctggtggccggcaaggccctgagcagcgccagaatgagcgacgccgtgctgagccagagcagcctgatgggcagccagcagttccaggacggcgagaacgaggagtgcggcgccagcctgggcggccacgagcaccccgacctgagcgacggcagccagcacctgaacagcagctgctaccccagcacctgcatcaccgacatcctgctgagctacaagcaccccgaggtgagcttcagcatggagcaggccggcgtgtag

SEQ ID NO: 12467 - DNA, 519 bp, synthetic construct
  source 1..519: mol_type = other DNA; note = Synthetic coding sequence
atgagcagcaacgagtgcttcaagtgcggcagaagcggccactgggccagagagtgccccaccggcggcggcagaggcagaggcatgagaagcagaggcagaggcttccagttcgtgagcagcagcctgcccgacatctgctacagatgcggcgagagcggccacctggccaaggactgcgacctgcaggaggacgtggaggcctgctacaactgcggcagaggcggccacatcgccaaggactgcaaggagcccaagagagagagagagcagtgctgctacaactgcggcaagcccggccacctggccagagactgcgaccacgccgacgagcagaagtgctacagctgcggcgagttcggccacatccagaaggactgcaccaaggtgaagtgctacagatgcggcgagaccggccacgtggccatcaactgcagcaagaccagcgaggtgaactgctacagatgcggcgagagcggccacctggccagagagtgcaccatcgaggccaccgcctag

SEQ ID NO: 12468 - DNA, 471 bp, synthetic construct
  source 1..471: mol_type = other DNA; note = Synthetic coding sequence
atgctggccgagaagctgcccaacctgacccacctgaacctgagcggcaacaagctgaaggacatcagcaccctggagcccctgaagaagctggagtgcctgaagagcctggacctgttcaactgcgaggtgaccaacctgaacgactacagagagagcgtgttcaagctgctgccccagctgacctacctggacggctacgacagagaggaccaggaggcccccgacagcgacgccgaggtggacggcgtggacgaggaggaggaggacgaggagggcgaggacgaggaggacgaggacgacgaggacggcgaggaggaggagttcgacgaggaggacgacgaggacgaggacgtggagggcgacgaggacgacgacgaggtgagcgaggaggaggaggagttcggcctggacgaggaggacgaggacgaggacgaggacgaggaggaggaggagggcggcaagggctag

SEQ ID NO: 12469 - DNA, 516 bp, synthetic construct; identical to SEQ ID NO: 12009
  source 1..516: mol_type = other DNA; note = Synthetic coding sequence

SEQ ID NO: 12470 - DNA, 111 bp, synthetic construct
  source 1..111: mol_type = other DNA; note = Synthetic coding sequence
atgatcgagaagatgcagggcagcagaatggacgagcagagatgcagcttccccccccccctgaagaccgaggaggactacatcccctaccccagcgtgcacgaggtgtag

SEQ ID NO: 12471 - DNA, 639 bp, synthetic construct
  source 1..639: mol_type = other DNA; note = Synthetic coding sequence
atgagcagcaagggcagcagcaccgacggcagaaccgacctggccaacggcagcctgagcagcagccccgaggagatgagcggcgccgaggagggcagagagaccagcagcggcatcgaggtggaggccagcgacctgagcctgagcctgaccggcgacgacggcggccccaacagaaccagcaccgagagcagaggcaccgacaccgagagcagcggcgaggacaaggacagcgacagcatggaggacaccggccactacagcatcaacgacgagaacagagtgcacgacagaagcgaggaggaggaggaggaggaggaggaggaggaggaggagcagcccagaagaagagtgcagagaaagagagccaacagagaccaggacagcagcgacgacgagagagccctggaggactgggtgagcagcgagaccagcgccctgcccagacccagatggcaggccctgcccgccctgagagagagagagctgggcagcagcgccagattcgtgtacgaggcctgcggcgccagagtgttcgtgcagagattcagactgcagcacggcctggagggccacaccggctgcgtgaacaccctgcacttcaaccagagaggcacctggctggccagcggcagctag

SEQ ID NO: 12472 - DNA, 726 bp, synthetic construct
  source 1..726: mol_type = other DNA; note = Synthetic coding sequence
atgaccagcgtgaccagaagcgagatcatcgacgagaagggccccgtgatgagcaagacccacgaccaccagctggagagcagcctgagccccgtggaggtgttcgccaagaccagcgccagcctggagatgaaccagggcgtgagcgaggagagaatccacctgggcagcagccccaagaagggcggcaactgcgacctgagccaccaggagagactgcagagcaagagcctgcacctgagcccccaggagcagagcgccagctaccaggacagaagacagagctggagaagagccagcatgaaggagaccaacagaagaaagagcctgcaccccatccaccagggcatcaccgagctgagcagaagcatcagcgtggacctggccgagagcaagagactgggctgcctgctgctgagcagcttccagttcagcatccagaagctggagcccttcctgagagacaccaagggcttcagcctggagagcttcagagccaaggccagcagcctgagcgaggagctgaagcacttcgccgacggcctggagaccgacggcaccctgcagaagtgcttcgaggacagcaacggcaaggccagcgacttcagcctggaggccagcgtggccgagatgaaggagtacatcaccaagttcagcctggagagacagacctgggaccagctgctgctgcactaccagcaggaggccaaggagatcctgagctag

SEQ ID NO: 12473 - DNA, 1188 bp, synthetic construct; identical to SEQ ID NO: 11022
  source 1..1188: mol_type = other DNA; note = Synthetic coding sequence

SEQ ID NO: 12474 - DNA, 1887 bp, synthetic construct
  source 1..1887: mol_type = other DNA; note = Synthetic coding sequence
atgagcgacaagagcgacctgaaggccgagctggagagaaagaagcagagactggcccagatcagagaggagaagaagagaaaggaggaggagagaaagaagaaggaggccgacatgcagcagaagaaggagcccgtgcaggacgacagcgacctggacagaaagagaagagagaccgaggccctgctgcagagcatcggcatcagccccgagccccccctggtgcccacccccatgagccccagcagcaagagcgtgagcacccccagcgaggccggcagccaggacagcggcgacctgggccccctgaccagaaccctgcagtgggacaccgaccccagcgtgctgcagctgcagagcgacagcgagctgggcagaagactgcacaagctgggcgtgagcaaggtgacccaggtggacttcctgcccagagaggtggtgagctacagcaaggagacccagacccccctggccacccaccagagcgaggaggacgaggaggacgaggagatggtggagagcaaggtgggccaggacagcgagctggagaaccaggacaagaagcaggaggtgaaggaggccccccccagagagctgaccgaggaggagaagcagcagatcctgcacagcgaggagttcctgatcttcttcgacagaaccatcagagtgatcgagagagccctggccgaggacagcgacatcttcttcgactacagcggcagagagctggaggagaaggacggcgacgtgcaggccggcgccaacctgagcttcaacagacagttctacgacgagcactggagcaagcacagagtggtgacctgcatggactggagcctgcagtaccccgagctgatggtggccagctacaacaacaacgaggacgccccccacgagcccgacggcgtggccctggtgtggaacatgaagttcaagaagaccacccccgagtacgtgttccactgccagagcagcgtgatgagcgtgtgcttcgccagattccaccccaacctggtggtgggcggcacctacagcggccagatcgtgctgtgggacaacagaagccacagaagaacccccgtgcagagaacccccctgagcgccgccgcccacacccaccccgtgtactgcgtgaacgtggtgggcacccagaacgcccacaacctgatcaccgtgagcaccgacggcaagatgtgcagctggagcctggacatgctgagcaccccccaggagagcatggagctggtgtacaacaagagcaagcccgtggccgtgaccggcatggccttccccaccggcgacgtgaacaacttcgtggtgggcagcgaggagggcaccgtgtacaccgcctgcagacacggcagcaaggccggcatcggcgaggtgttcgagggccaccagggccccgtgaccggcatcaactgccacatggccgtgggccccatcgacttcagccacctgttcgtgaccagcagcttcgactggaccgtgaagctgtggaccaccaagcacaacaagcccctgtacagcttcgaggacaacgccgactacgtgtacgacgtgatgtggagccccgtgcaccccgccctgttcgcctgcgtggacggcatgggcagactggacctgtggaacctgaacaacgacaccgaggtgcccaccgccagcgtggccatcgagggcgccagcgccctgaacagagtgagatgggcccaggccggcaaggaggtggccgtgggcgacagcgagggcagaatctgggtgtacgacgtgggcgagctggccgtgccccacaacgacgagtggaccagattcgccagaaccctggtggagatcagagccaacagagccgacagcgaggaggagggcaccgtggagctgagcgcctag

SEQ ID NO: 12475 - DNA, 1644 bp, synthetic construct; identical to SEQ ID NO: 10555
  source 1..1644: mol_type = other DNA; note = Synthetic coding sequence

SEQ ID NO: 12476 - DNA, 747 bp, synthetic construct
  source 1..747: mol_type = other DNA; note = Synthetic coding sequence
atggccttcagcggcagagccagaccctgcatcatccccgagaacgaggagatccccagagccgccctgaacaccgtgcacgaggccaacggcaccgaggacgagagagccgtgagcaagctgcagagaagacacagcgacgtgaaggtgtacaaggagttctgcgacttctacgccaagttcaacatggccaacgccctggccagcgccacctgcgagagatgcaagggcggcttcgcccccgccgagaccatcgtgaacagcaacggcgagctgtaccacgagcagtgcttcgtgtgcgcccagtgcttccagcagttccccgagggcctgttctacgagttcgagggcagaaagtactgcgagcacgacttccagatgctgttcgccccctgctgccaccagtgcggcgagttcatcatcggcagagtgatcaaggccatgaacaacagctggcaccccgagtgcttcagatgcgacctgtgccaggaggtgctggccgacatcggcttcgtgaagaacgccggcagacacctgtgcagaccctgccacaacagagagaaggccagaggcctgggcaagtacatctgccagaagtgccacgccatcatcgacgagcagcccctgatcttcaagaacgacccctaccaccccgaccacttcaactgcgccaactgcggccaggagggcagcgactgcagatgcaccggcgccgagagaggcgccatcctgcccgccatgccctag

SEQ ID NO: 12477 - DNA, 621 bp, synthetic construct
  source 1..621: mol_type = other DNA; note = Synthetic coding sequence
atggagagcaacttcaaccaggagggcgtgcccagacccagctacgtgttcagcgccgaccccatcgccagacccagcgagatcaacttcgacggcatcaagctggacctgagccacgagttcagcctggtggcccccaacaccgaggccaacagcttcgagagcaaggactacctgcaggtgtgcctgagaatcagacccttcacccagagcgagaaggagctggagagcgagggctgcgtgcacatcctggacagccagaccgtggtgctgaaggagccccagtgcatcctgggcagactgagcgagaagagcagcggccagatggcccagaagttcagcttcagcaaggtgttcggccccgccaccacccagaaggagttcttccagggctgcatcatgcagcccgtgaaggacctgctgaagggccagagcagactgatcttcacctacggcctgaccaacagcggcaagacctacaccttccagggcaccgaggagaacatcggcatcctgcccagaaccctgaacgtgctgttcgacagcctgcaggagagactgtacaccaagatgaacctgaagccccacagaagcagagagtacctgagactgagcagctag

SEQ ID NO: 12478 - DNA, 990 bp, synthetic construct
  source 1..990: mol_type = other DNA; note = Synthetic coding sequence
atggaggtggccgagcccagcagccccaccgaggaggaggaggaggaggaggagcacagcgccgagcccagacccagaaccagaagcaaccccgagggcgccgaggacagagccgtgggcgcccaggccagcgtgggcagcagaagcgagggcgagggcgaggccgccagcgccgacgacggcagcctgaacaccagcggcgccggccccaagagctggcaggtgcccccccccgcccccgaggtgcagatcagaacccccagagtgaactgccccgagaaggtgatcatctgcctggacctgagcgaggagatgagcctgcccaagctggagagcttcaacggcagcaagaccaacgccctgaacgtgagccagaagatgatcgagatgttcgtgagaaccaagcacaagatcgacaagagccacgagttcgccctggtggtggtgaacgacgacaccgcctggctgagcggcctgaccagcgaccccagagagctgtgcagctgcctgtacgacctggagaccgccagctgcagcaccttcaacatcagcggcgccagccccgccagacagcagaagaccgagctgcccgtgaccgagaacgtgcagaccatcccccccccctacgtggtgagaaccatcctggtgtacagcagacccccctgccagccccagttcagcctgaccgagcccatgaagaagatgttccagtgcccctacttcttcttcgacgtggtgtacatccacaacggcaccgaggagaaggaggaggagatgagctggaaggacatgttcgccttcatgggcagcctggacaccaagggcaccagctacaagtacgaggtggccctggccggccccgccctggagctgcacaactgcatggccaagctgctggcccaccccctgcagagaccctgccagagccacgccagctacagcctgctggaggaggaggacgaggccatcgaggtggaggccaccgtgtag

SEQ ID NO: 12479 - DNA, 1620 bp, synthetic construct; identical to SEQ ID NO: 10018
  source 1..1620: mol_type = other DNA; note = Synthetic coding sequence

SEQ ID NO: 12480 - DNA, 3558 bp, synthetic construct
  source 1..3558: mol_type = other DNA; note = Synthetic coding sequence
atgtgcgaggtgatgcccaccatcaacgagggcgacagactgggccccccccacggcgccgacgccgacgccaacttcgagcagctgatggtgaacatgctggacgagagagagaagctgctggagagcctgagagagagccaggagaccctggccgccacccagagcagactgcaggacgccatccacgagagagaccagctgcagagacacctgaacagcgccctgccccaggagttcgccaccctgaccagagagctgagcatgtgcagagagcagctgctggagagagaggaggagatcagcgagctgaaggccgagagaaacaacaccagactgctgctggagcacctggagtgcctggtgagcagacacgagagaagcctgagaatgaccgtggtgaagagacaggcccagagccccagcggcgtgagcagcgaggtggaggtgctgaaggccctgaagagcctgttcgagcaccacaaggccctggacgagaaggtgagagagagactgagagccgccctggagagagtgaccaccctggaggagcagctggccggcgcccaccagcaggtgagcgccctgcagcagggcgccggcgtgagagacggcgccgccgaggaggagggcaccgtggagctgggccccaagagactgtggaaggaggacaccggcagagtggaggagctgcaggagctgctggagaagcagaacttcgagctgagccaggccagagagagactggtgaccctgaccaccaccgtgaccgagctggaggaggacctgggcaccgccagaagagacctgatcaagagcgaggagctgagcagcaagcaccagagagacctgagagaggccctggcccagaaggaggacatggaggagagaatcaccaccctggagaagagatacctggccgcccagagagaggccaccagcatccacgacctgaacgacaagctggagaacgagctggccaacaaggagagcctgcacagacagtgcgaggagaaggccagacacctgcaggagctgctggaggtggccgagcagaagctgcagcagaccatgagaaaggccgagaccctgcccgaggtggaggccgagctggcccagagaatcgccgccctgaccaaggccgaggagagacacggcaacatcgaggagcacctgagacagctggagggccagctggaggagaagaaccaggagctggccagaaccgccgtgcaggtgagacagagagagaagatgaacgaggaccacaacaagagactgagcgacaccgtggacagactgctgagcgagagcaacgagagactgcagctgcacctgaaggagagaatggccgccctggaggagaagaacaccctgatccaggagctggagagcagccagagacagatcgaggagcagcaccaccacaagggcagactgagcgaggagatcgagaagctgagacaggaggtggaccagctgaagggcagaggcggccccttcgtggacggcgtgcacagcagaagccacatgggcagcgccgccgacgtgagattcagcctgggcaccaccacccacgccccccccggcgtgcacagaagatacagcgccctgagagaggagagcgccaagctggccctgcccctgaccgtgaccctgagaagccccacctggatgagaatgagccagggcgtgtgctgcaacctggagtaccacagcagcggcaccctgtgcggcagcagcggccccctgcccgtgcccgagatgatccaggaggagaaggagagcaccgagctgagagccgaggagatcgagaccagagtgaccagcggcagcatggaggccctgaacctgaagcagctgagaaagagaggcagcatccccaccagcctgaccgccctgagcctggccagcgccagcccccccctgagcggcagaagcacccccaagctgaccagcagaagcgccgcccaggacctggacagaatgggcgtgatgaccctgcccagcgacctgagaaagcacagaagaaagctgctgagccccgtgagcagagaggagaacagagaggacaaggccaccatcaagtgcgagaccagcccccccagcagccccagaaccctgagactggagaagctgggccaccccgccctgagccaggaggagggcaagagcgccctggaggaccagggcagcaaccccagcagcagcaacagcagccaggacagcctgcacaagggcgccaagagaaagggcatcaagagcagcatcggcagactgttcggcaagaaggagaagggcagactgatccagctgagcagagacggcgccaccggccacgtgctgctgaccgacagcgagttcagcatgcaggagcccatggtgcccgccaagctgggcacccaggccgagaaggacagaagactgaagaagaagcaccagctgctggaggacgccagaagaaagggcatgcccttcgcccagtgggacggccccaccgtggtgagctggctggagctgtgggtgggcatgcccgcctggtacgtggccgcctgcagagccaacgtgaagagcggcgccatcatgagcgccctgagcgacaccgagatccagagagagatcggcatcagcaacgccctgcacagactgaagctgagactggccatccaggagatggtgagcctgaccagccccagcgccccccccaccagcagaaccagcagcggcaacgtgtgggtgacccacgaggagatggagaccctggagaccagcaccaagaccgacagcgaggagggcagctgggcccagaccctggcctacggcgacatgaaccacgagtggatcggcaacgagtggctgcccagcctgggcctgccccagtacagaagctacttcatggagtgcctggtggacgccagaatgctggaccacctgaccaagaaggacctgagagtgcacctgaagatggtggacagcttccacagaaccagcctgcagtacggcatcatgtgcctgaagagactgaactacgacagaaaggagctggagaagagaagagaggagagccagcacgagatcaaggacgtgctggtgtggaccaacgaccaggtggtgcactgggtgcagagcatcggcctgagagactacgccggcaacctgcacgagagcggcgtgcacggcgccctgctggccctggacgagaacttcgaccacaacaccctggccctgatcctgcagatccccacccagaacacccaggccagacaggtgatggagagagagttcaacaacctgctggccctgggcaccgacagaaagctggacgacggcgacgacaaggtgttcagaagagcccccagctggagaaagagattcagacccagagagcaccacggcagaggcggcatgctgagcgccagcgccgagaccctgcccgccggcttcagagtgagcaccctgggcaccctgcagcccccccccgccccccccaagaagatcatgcccgaggcccacagccactacctgtacggccacatgctgagcgccttcagagactag

SEQ ID NO: 12481 - DNA, 1383 bp, synthetic construct
  source 1..1383: mol_type = other DNA; note = Synthetic coding sequence
atggagatctgcgacatcatcaacgagaccgaggagggccccaaggacgccctgagagccgtgaagaagagaatcgtgggcaacaagaacttccacgaggtgatgctggccctgaccgtgctggagacctgcgtgaagaactgcggccacagattccacgtgctggtggccagccaggacttcgtggagagcgtgctggtgagaaccatcctgcccaagaacaacccccccaccatcgtgcacgacaaggtgctgaacctgatccagagctgggccgacgccttcagaagcagccccgacctgaccggcgtggtgaccatctacgaggacctgagaagaaagggcctggagttccccatgaccgacctggacatgctgagccccatccacaccccccagagaaccgtgttcaacagcgagacccagagcggccaggacagcgtgggcaccgacagcagccagcaggaggacagcggccagcacgccgcccccctgcccgccccccccatcctgagcggcgacacccccatcgcccccacccccgagcagatcggcaagctgagaagcgagctggagatggtgagcggcaacgtgagagtgatgagcgagatgctgaccgagctggtgcccacccaggccgagcccgccgacctggagctgctgcaggagctgaacagaacctgcagagccatgcagcagagagtgctggagctgatcccccagatcgccaacgagcagctgaccgaggagctgctgatcgtgaacgacaacctgaacaacgtgttcctgagacacgagagattcgagagattcagaaccggccagaccaccaaggcccccagcgaggccgagcccgccgccgacctgatcgacatgggccccgaccccgccgccaccggcaacctgagcagccagctggccggcatgaacctgggcagcagcagcgtgagagccggcctgcagagcctggaggccagcggcagactggaggacgagttcgacatgttcgccctgaccagaggcagcagcctggccgaccagagaaaggaggtgaagtacgaggccccccaggccaccgacggcctggccggcgccctggacgccagacagcagagcaccggcgccatccccgtgacccaggcctgcctgatggaggacatcgagcagtggctgagcaccgacgtgggcaacgacgccgaggagcccaagggcgtgaccagcgagggcaagttcgacaagttcctggaggagagagccaaggccgccgacagactgcccaacctgagcagccccagcgccgagggcccccccggcccccccagcggccccgcccccagaaagaagacccaggagaaggacgacgacatgctgttcgccctgtag

SEQ ID NO: 12482 - DNA, 180 bp, synthetic construct
  source 1..180: mol_type = other DNA; note = Synthetic coding sequence
atgatgatgaagatgatgatgagaatgaagatcagaaagatcagataccactgccagagaaagcagaacctgatccacaacaacggcaacggcctgggcagcgtgcccgtggagaagctggtgctgcaccccagccccatccagaacccccagcagagcgccgtggtgagctgcgagtag

SEQ ID NO: 12483 - DNA, 537 bp, synthetic construct
  source 1..537: mol_type = other DNA; note = Synthetic coding sequence
atgctgggcctggacgcctgcgagctgggcgcccagctgctggagctgctgagactggccctgtgcgccagagtgctgctggccgacaaggagggcggcccccccgccgtggacgaggtgctggacgaggccgtgcccgagtacagagcccccggcagaaagagcctgctggagatcagacagctggaccccgacgacagaagcctggccaagtacaagagagtgctgctgggccccctgccccccgccgtggaccccagcctgcccaacgtgcaggtgaccagactgaccctgctgagcgagcaggcccccggccccgtggtgatggacctgaccggcgacctggccgtgctgaaggaccaggtgttcgtgctgaaggagggcgtggactacagagtgcacagagagatcgtgagcggcctgaagtgcctgcaccacacctacagaagaggcctgagagtggacaagaccgtgtacatggtgggcagctacggccccagcgcccaggagtacgagttcgtgacccccgtggagtag

SEQ ID NO: 12484 - DNA, 1119 bp, synthetic construct
  source 1..1119: mol_type = other DNA; note = Synthetic coding sequence
atggacagcgtgagaagcggccccttcggccaggtgttcagacccgacaacttcatcttcggccagtgcggcgccggcaacaactgggccaagggccactacaccgagggcgccgagctgatggagagcgtgatggacgtggtgagaaaggaggccgagagctgcgactgcctgcagggcttccagctgacccacagcctgggcggcggcaccggcagcggcatgggcaccctgctgctgagcaagatcagagaggagtaccccgacagaatcatcaacaccttcagcatcctgcccagccccaaggtgagcgacaccgtggtggagccctacaacgccaccctgagcgtgcaccagctgatcgagaacgccgacgagaccttctgcatcgacaacgaggccctgtacgacatctgcagcaagaccctgaagctgcccacccccacctacggcgacctgaaccacctggtgagcgccaccatgagcggcgtgaccacctgcctgagattccccggccagctgaacgccgacctgagaaagctggccgtgaacatggtgcccttccccagactgcacttcttcatgcccggcttcgcccccctgaccagcagaggcagccagcagtacagagccctgaccgtggccgagctgacccagcagatgttcgacgccaagaacatgatggccgcctgcgaccccagacacggcagatacctgaccgccgccgccatcttcagaggcagaatgcccatgagagaggtggacgagcagatgttcaacatccaggacaagaacagcagctacttcgccgactggctgcccaacaacgtgaagaccgccgtgtgcgacatcccccccagaggcctgaagatgagcgccaccttcatcggcaacaacaccgccatccaggagctgttcaagagagtgagcgagcagttcaccgccatgttcagaagaaaggccttcctgcactggtacaccggcgagggcatggacgagatggagttcaccgaggccgagagcaacatgaacgacctggtgagcgagtaccagcagtaccaggacgccaccgccgaggaggaggaggacgaggagtacgccgaggaggaggtggcctag

SEQ ID NO: 12485 - DNA, 576 bp, synthetic construct
  source 1..576: mol_type = other DNA; note = Synthetic coding sequence
atggccgccgccaaggacacccacgaggaccacgacaccagcaccgagaacaccgacgagagcaaccacgacccccagttcgagcccatcgtgagcctgcccgagcaggagatcaagaccctggaggaggacgaggaggagctgttcaagatgagagccaagctgttcagattcgccagcgagaacgacctgcccgagtggaaggagagaggcaccggcgacgtgaagctgctgaagcacaagaccctgaagatctgcgccaaccactacatcacccccatgatggagctgaagcccaacgccggcagcgacagagcctgggtgtggaacacccacgccgacttcgccgacgagtgccccaagcccgagctgctggccatcagattcctgaacgccgagagcgagcccagagccctgggcacctgcctgacctggggcagccccgcctggcagagaggcggcctgtgcgccaccaacgccgtggccttctggggcgagggcgccgtgaccggcaagtgcgtggtgtgggccgccctgccctgctgcctgggcgccatgcccagactgaagccctag

SEQ ID NO: 12486 - DNA, 369 bp, synthetic construct; identical to SEQ ID NO: 12080
  source 1..369: mol_type = other DNA; note = Synthetic coding sequence

SEQ ID NO: 12487 - DNA, 1383 bp, synthetic construct
  source 1..1383: mol_type = other DNA; note = Synthetic coding sequence
atggccagcctgctgcagagcgacagagtgctgtacctggtgcagggcgagaagaaggtgagagcccccctgagccagctgtacttctgcagatactgcagcgagctgagaagcctggagtgcgtgagccacgaggtggacagccactactgccccagctgcctggagaacatgcccagcgccgaggccaagctgaagaagaacagatgcgccaactgcttcgactgccccggctgcatgcacaccctgagcaccagagccaccagcatcagcacccagctgcccgacgaccccgccaagaccaccatgaagaaggcctactacctggcctgcggcttctgcagatggaccagcagagacgtgggcatggccgacaagagcgtggccagcggcggctggcaggagcccgagaacccccacacccagagaatgaacaagctgatcgagtactaccagcagctggcccagaaggagaaggtggagagagacagaaagaagctggccagaagaagaaactacatgcccctggccttcagcgacaagtacggcctgggcaccagactgcagagacccagagccggcgccagcatcagcaccctggccggcctgagcctgaaggagggcgaggaccagaaggagatcaagatcgagcccgcccaggccgtggacgaggtggagcccctgcccgaggactactacaccagacccgtgaacctgaccgaggtgaccaccctgcagcagagactgctgcagcccgacttccagcccgtgtgcgccagccagctgtaccccagacacaagcacctgctgatcaagagaagcctgagatgcagaaagtgcgagcacaacctgagcaagcccgagttcaaccccaccagcatcaagttcaagatccagctggtggccgtgaactacatccccgaggtgagaatcatgagcatccccaacctgagatacatgaaggagagccaggtgctgctgaccctgaccaaccccgtggagaacctgacccacgtgaccctgttcgagtgcgaggagggcgaccccgacgacatcaacagcaccgccaaggtggtggtgccccccaaggagctggtgctggccggcaaggacgccgccgccgagtacgacgagctggccgagccccaggacttccaggacgaccccgacatcatcgccttcagaaaggccaacaaggtgggcatcttcatcaaggtgaccccccagagagaggagggcgaggtgaccgtgtgcttcaagatgaagcacgacttcaagaacctggccgcccccatcagacccatcgaggagagcgaccagggcaccgaggtgatctggctgacccagcacgtggagctgagcctgggccccctgctgccctag

SEQ ID NO: 12488 - DNA, 3336 bp, synthetic construct
  source 1..3336: mol_type = other DNA; note = Synthetic coding sequence
atggagatggacgcccccagaccccccagcctggccgtgcccggcgccgccagcagacccggcagactgctggacggcggccacggcagacagcaggtgcaggccctgagcagccagctgctggaggtgatccccgacagcatgagaaagcaggaggtgagaaccggcagagaggccggccagggccacggcaccggcagccccgccgagcaggtgaaggccctgatggacctgctggccggcaagggcagccagggcagccaggccccccaggccctggacagaacccccgacgcccccctgggcccctgcagcaacgacagcagaatccagagacacagaaaggccctgctgagcaaggtgggcggcggccccgagctgggcggcccctggcacagactggccagcctgctgctggtggagggcctgaccgacctgcagctgagagagcacgacttcacccaggtggaggccaccagaggcggcggccaccccgccagaaccgtggccctggacagactgttcctgcccctgagcagagtgagcgtgccccccagagtgagcatcaccatcggcgtggccggcatgggcaagaccaccctggtgagacacttcgtgagactgtgggcccacggccaggtgggcaaggacttcagcctggtgctgcccctgaccttcagagacctgaacacccacgagaagctgtgcgccgacagactgatctgcagcgtgttcccccacgtgggcgagcccagcctggccgtggccgtgcccgccagagccctgctgatcctggacggcctggacgagtgcagaacccccctggacttcagcaacaccgtggcctgcaccgaccccaagaaggagatccccgtggaccacctgatcaccaacatcatcagaggcaacctgttccccgaggtgagcatctggatcaccagcagacccagcgccagcggccagatccccggcggcctggtggacagaatgaccgagatcagaggcttcaacgaggaggagatcaaggtgtgcctggagcagatgttccccgaggaccaggccctgctgggctggatgctgagccaggtgcaggccgacagagccctgtacctgatgtgcaccgtgcccgccttctgcagactgaccggcatggccctgggccacctgtggagaagcagaaccggcccccaggacgccgagctgtggccccccagaaccctgtgcgagctgtacagctggtacttcagaatggccctgagcggcgagggccaggagaagggcaaggccagccccagaatcgagcaggtggcccacggcggcagaaagatggtgggcaccctgggcagactggccttccacggcctgctgaagaagaagtacgtgttctacgagcaggacatgaaggccttcggcgtggacctggccctgctgcagggcgccccctgcagctgcttcctgcagagagaggagaccctggccagcagcgtggcctactgcttcacccacctgagcctgcaggagttcgtggccgccgcctactactacggcgccagcagaagagccatcttcgacctgttcaccgagagcggcgtgagctggcccagactgggcttcctgacccacttcagaagcgccgcccagagagccatgcaggccgaggacggcagactggacgtgttcctgagattcctgagcggcctgctgagccccagagtgaacgccctgctggccggcagcctgctggcccagggcgagcaccaggcctacagaacccaggtggccgagctgctgcagggctgcctgagacccgacgccgccgtgtgcgccagagccatcaacgtgctgcactgcctgcacgagctgcagcacaccgagctggccagaagcgtggaggaggccatggagagcggcgccctggccagactgaccggccccgcccacagagccgccctggcctacctgctgcaggtgagcgacgcctgcgcccaggaggccaacctgagcctgagcctgagccagggcgtgctgcagagcctgctgccccagctgctgtactgcagaaagctgagactggacaccaaccagttccaggaccccgtgatggagctgctgggcagcgtgctgagcggcaaggactgcagaatccagaagatcagcctggccgagaaccagatcagcaacaagggcgccaaggccctggccagaagcctgctggtgaacagaagcctgaccagcctggacctgagaggcaacagcatcggcccccagggcgccaaggccctggccgacgccctgaagatcaacagaaccctgaccagcctgagcctgcagggcaacaccgtgagagacgacggcgccagaagcatggccgaggccctggccagcaacagaaccctgagcatgctgcacctgcagaagaacagcatcggccccatgggcgcccagagaatggccgacctgaagcagaacagaagcctgaaggagctgatgttcagcagcaacagcatcggcgacggcggcgccaaggccctggccgaggccctgaaggtgaaccagggcctggagagcctggacctgcagagcaacagcatcagcgacgccggcgtggccgccctgatgggcgccctgtgcaccaaccagaccctgctgagcctgagcctgagagagaacagcatcagccccgagggcgcccaggccatcgcccacgccctgtgcgccaacagcaccctgaagaacctggacctgaccgccaacctgctgcacgaccagggcgccagagccatcgccgtggccgtgagagagaacagaaccctgaccagcctgcacctgcagtggaacttcatccaggccggcgccgcccaggccctgggccaggccctgcagctgaacagaagcctgaccagcctggacctgcaggagaacgccatcggcgacgacggcgcctgcgccgtggccagagccctgaaggtgaacaccgccctgaccgccctgtacctgcaggtggccagcatcggcgccagcggcgcccaggtgctgggcgaggccctggccgtgaacagaaccctggagatcctggacctgagaggcaacgccatcggcgtggccggcgccaaggccctggccaacgccctgaaggtgaacagcagcctgagaagactgaacctgcaggagaacagcctgggcatggacggcgccatctgcatcgccaccgccctgagcggcaaccacagactgcagcacatcaacctgcagggcaaccacatcggcgacagcggcgccagaatgatcagcgaggccatcaagaccaacgcccccacctgcaccgtggagatgtag

SEQ ID NO: 12489 - DNA, 2424 bp, synthetic construct
  source 1..2424: mol_type = other DNA; note = Synthetic coding sequence
atgctggagagaagagccctgctgtggcagagagaggccggccccggctggggcgacagagccagagccggcaccggcggcgccggcggcggctgcggcggcgccatggccgagagaggccccgccttctgcggcctgtacgacaccagcagcctgctgagatactgcaacgacgacaacctgagcggcaccagcggcatggaggtggacgacagagtgagcgccctggagcagagactgcagctgcaggaggacgagctggccgtgctgaaggccgccctggccgacgccctgagaagactgagagcctgcgaggagcagggcgccgccctgagagccagaggcacccccaagggcagagccccccccagactgggcaccaccgccagcgtgtgccagctgctgaagggcctgcccaccagaacccccctgaacggcagcggcccccccagaagagtgggcggctacgccaccagccccagcagccccaagaaggaggccaccagcggcagaagcagcgtgagaagatacctgagccccgagagactggccagcgtgagaagagaggaccccagaagcagaaccaccagcagcagcagcaactgcagcgccaagaaggagggcaagaccaaggaggtgatcttcagcgtggaggacggcagcgtgaagatgttcctgagaggcagacccgtgcccatgatgatccccgacgagctggcccccacctacagcctggacaccagaagcgagctgcccagctgcagactgaagctggagtgggtgtacggctacagaggcagagactgcagagccaacctgtacctgctgcccaccggcgagatcgtgtacttcgtggccagcgtggccgtgctgtacagcgtggaggagcagagacagagacactacctgggccacaacgacgacatcaagtgcctggccatccaccccgacatggtgaccatcgccaccggccaggtggccggcaccaccaaggagggcaagcccctgcccccccacgtgagaatctgggacagcgtgagcctgagcaccctgcacgtgctgggcctgggcgtgttcgacagagccgtgtgctgcgtgggcttcagcaagagcaacggcggcaacctgctgtgcgccgtggacgagagcaacgaccacatgctgagcgtgtgggactgggccaaggagaccaaggtggtggacgtgaagtgcagcaacgaggccgtgctggtggccaccttccaccccaccgaccccaccgtgctgatcacctgcggcaagagccacatctacttctggaccctggagggcggcagcctgagcaagagacagggcctgttcgagaagcacgagaagcccaagtacgtgctgtgcgtgaccttcctggagggcggcgacgtggtgaccggcgacagcggcggcaacctgtacgtgtggggcaagggcggcaacagaatcacccaggccgtgctgggcgcccacgacggcggcgtgttcggcctgtgcgccctgagagacggcaccctggtgagcggcggcggcagaaacagcatcctgcagggcagcgtgcacaccggcttcagcctgctggtgcagggccacgtggaggagctgtggggcctggccacccaccccagcagagcccagttcgtgacctgcggccaggacaagctggtgcacctgtggagcagcgacagccaccagcccctgtggagcagaatcatcgaggaccccgccagaagcgccggcttccaccccagcggcagcgtgctggccgtgggcaccgtgaccggcagatggctgctgctggacaccgagacccacgacctggtggccatccacaccgacggcaacgagcagatcagcgtggtgagcttcagccccgacggcgcctacctggccgtgggcagccacgacaacctggtgtacgtgtacaccgtggaccagggcggcagaaaggtgagcagactgggcaagtgcagcggccacagcagcttcatcacccacctggactgggcccaggacagcagctgcttcgtgaccaacagcggcgactacgagatcctgtactgggaccccgccacctgcaagcagatcaccagcgccgacgccgtgagaaacatggagtgggccaccgccacctgcgtgctgggcttcggcgtgttcggcatctggagcgagggcgccgacggcaccgacatcaacgccgtggccagaagccacgacggcaagctgctggccagcgccgacgacttcggcaaggtgcacctgttcagctacccctgctgccagcccagagccctgagccacaagtacggcggccacagcagccacgtgaccaacgtggccttcctgtgggacgacagcatggccctgaccaccggcggcaaggacaccagcgtgctgcagtggagagtggtgtag

SEQ ID NO: 12490 - DNA, 1413 bp, synthetic construct
  source 1..1413: mol_type = other DNA; note = Synthetic coding sequence
atggaggagaccatcaaggacccccccaccagcgccgtgctgctggaccactgccacttcagccaggtgatcttcaacagcgtggagaagttctacatccccggcggcgacgtgacctgccactacaccttcacccagcacttcatccccagaagaaaggactggatcggcatcttcagagccttcaagtgcttccaggacaagctggagcaggagctgctgaagtggagaagccagggccagaagctgcaggtgggctggaagaccaccagagagtactacaccttcatgtgggtgaccctgcccatcgacctgaacaacaagagcgccaagcagcaggaggtgcagttcaaggcctactacctgcccaaggacgacgagtactaccagttctgctacgtggacgaggacggcgtggtgagaggcgccagcatccccttccagttcagacccgagaacgaggaggacatcctggtggtgaccacccagggcgaggtggaggagatcgagcagcacaacaaggagctgtgcaaggagaaccaggagctgaaggacagctgcatcagcctgcagaagcagaacagcgacatgcaggccgagctgcagaagaagcaggaggagctggagaccctgcagagcatcaacaagaagctggagctgaaggtgaaggagcagaaggactactgggagaccgagctgctgcagctgaaggagcagaaccagaagatgagcagcgagaacgagaagatgggcatcagagtggaccagctgcaggcccagctgagcacccaggagaaggagatggagaagctggtgcagggcgaccaggacaagaccgagcagctggagcagctgaagaaggagaacgaccacctgttcctgagcctgaccgagcagagaaaggaccagaagaagctggagcagaccgtggagcagatgaagcagaacgagaccaccgccatgaagaagcagcaggagctgatggacgagaacttcgacctgagcaagagactgagcgagaacgagatcatctgcaacgccctgcagagacagaaggagagactggagggcgagaacgacctgctgaagagagagaacagcagactgctgagctacatgggcctggacttcaacagcctgccctaccaggtgcccaccagcgacgagggcggcgccagacagaaccccggcctggcctacggcaacccctacagcggcatccaggagagcagcagccccagccccctgagcatcaagaagtgccccatctgcaaggccgacgacatctgcgaccacaccctggagcagcagcagatgcagcccctgtgcttcaactgccccatctgcgacaagatcttccccgccaccgagaagcagatcttcgaggaccacgtgttctgccacagcctgtag

SEQ ID NO: 12491 - DNA, 1023 bp, synthetic construct
  source 1..1023: mol_type = other DNA; note = Synthetic coding sequence
atgagcaagacccacgaccaccagctggagagcagcctgagccccgtggaggtgttcgccaagaccagcgccagcctggagatgaaccagggcgtgagcgaggagagaatccacctgggcagcagccccaagaagggcggcaactgcgacctgagccaccaggagagactgcagagcaagagcctgcacctgagcccccaggagcagagcgccagctaccaggacagaagacagagctggagaagagccagcatgaaggagaccaacagaagaaagagcctgcaccccatccaccagggcatcaccgagctgagcagaagcatcagcgtggacctggccgagagcaagagactgggctgcctgctgctgagcagcttccagttcagcatccagaagctggagcccttcctgagagacaccaagggcttcagcctggagagcttcagagccaaggccagcagcctgagcgaggagctgaagcacttcgccgacggcctggagaccgacggcaccctgcagaagtgcttcgaggacagcaacggcaaggccagcgacttcagcctggaggccagcgtggccgagatgaaggagtacatcaccaagttcagcctggagagacagacctgggaccagctgctgctgcactaccagcaggaggccaaggagatcctgagcagaggcagcaccgaggccaagatcaccgaggtgaaggtggagcccatgacctacctgggcagcagccagaacgaggtgctgaacaccaagcccgactaccagaagatcctgcagaaccagagcaaggtgttcgactgcatggagctggtgatggacgagctgcagggcagcgtgaagcagctgcaggccttcatggacgagagcacccagtgcttccagaaggtgagcgtgcagctgggcaagagaagcatgcagcagctggaccccagccccgccagaaagctgctgaagctgcagctgcagaacccccccgccatccacggcagcggcagcggcagctgccagtag

SEQ ID NO: 12492 - DNA, 522 bp, synthetic construct
  source 1..522: mol_type = other DNA; note = Synthetic coding sequence
atgacccacgtggccagccagttcgccagcagctacgtgttctactggagagactacttcgaggaccagcccctgctgtacccccccggcttcgacggcagagtggtggtgtaccccagcaaccagaccctgaaggactacctgagctggagacaggccgactgccacatcaacaacctgtacaacaccgtgttctgggccctgatccagcagagcggcctgacccccgtgcaggcccagggcagactgcagggcaccctggccgccgacaagaacgagatcctgttcagcgagttcaacatcaactacaacaacgagctgcccatgtacagaaagggcaccgtgctgatctggcagaaggtggacgaggtgatgaccaaggagatcaagctgcccaccgagatggagggcaagaagatggccgtgaccagaaccagaaccaagcccgtgcccctgcactgcgacatcatcggcgacgccttctggaaggagcaccccgagatcctggacgaggacagctag

SEQ ID NO: 12493 - DNA, 285 bp, synthetic construct
  source 1..285: mol_type = other DNA; note = Synthetic coding sequence
atggagatggagagcgccgccgccagcaccagattccaccagccccacatggagagaaagatgagcgccatggcctgcgagatcttcaacgagctgagactggagggcaagctgtgcgacgtggtgatcaaggtgaacggcttcgagttcagcgcccacaagaacatcctgtgcagctgcagcagctacttcagagccctgttcaccagcggctggaacaacaccgagaagaaggtgtacaacatccccggcatcagccccgacatgatgaagctgatcatctag

SEQ ID NO: 12494 - DNA, 1572 bp, synthetic construct; identical to SEQ ID NO: 9871
  source 1..1572: mol_type = other DNA; note = Synthetic coding sequence

SEQ ID NO: 12495 - DNA, 372 bp, synthetic construct
  source 1..372: mol_type = other DNA; note = Synthetic coding sequence
atgggcaccggcgacttcatctgcatcagcatgaccggcggcgccccctggggcttcagactgcagggcggcaaggagcagaagcagcccctgcaggtggccaagatcagaaaccagagcaaggccagcggcagcggcctgtgcgagggcgacgaggtggtgagcatcaacggcaacccctgcgccgacctgacctaccccgaggtgatcaagctgatggagagcatcaccgacagcctgcagatgctgatcaagagaagagtgggcgcccccttcctgttcctggaggaccagagccacccccccttcctgcacctgctgggctacaccagcctgctgatcgtgaccctggtgaaccagcccatggactag

SEQ ID NO: 12496 - DNA, 1146 bp, synthetic construct; identical to SEQ ID NO: 11154
  source 1..1146: mol_type = other DNA; note = Synthetic coding sequence

SEQ ID NO: 12497 - DNA, 615 bp, synthetic construct
  source 1..615: mol_type = other DNA; note = Synthetic coding sequence
atggtgatggccgagggcaccgccgtgctgagaagaaacagacccggcaccaaggcccagtacatccagcagaacatcagagccgactgcagcaacatcgacaagatcctggagccccccgagggccaggacgagggcgtgtggaagtacgagcacctgagacagttctgcctggagctgaacggcctggccgtgaagctgcagagcgagtgccaccccgacacctgcacccagatgaccgccaccgagcagtggatcttcctgtgcgccgcccacaagacccccaaggagtgccccgccatcgactacaccagacacaccctggacggcgccgcctgcctgctgaacagcaacaagtacttccccagcagagtgagcatcaaggagagcagcgtggccaagctgggcagcgtgtgcagaagaatctacagaatcttcagccacgcctacttccaccacagacagatcttcgacgagtacgagaacgagaccttcctgtgccacagattcaccaagttcgtgatgaagtacaacctgatgagcaaggacaacctgatcgtgcccatcctggaggaggaggtgcagaacagcgtgagcggcgagagcgaggcctag

SEQ ID NO: 12498 - DNA, 1293 bp, synthetic construct
  source 1..1293: mol_type = other DNA; note = Synthetic coding sequence
atggccgccaacctgagcagaaacggccccgccctgcaggaggcctacgtgagagtggtgaccgagaagagccccaccgactgggccctgttcacctacgagggcaacagcaacgacatcagagtggccggcaccggcgagggcggcctggaggagatggtggaggagctgaacagcggcaaggtgatgtacgccttctgcagagtgaaggaccccaacagcggcctgcccaagttcgtgctgatcaactggaccggcgagggcgtgaacgacgtgagaaagggcgcctgcgccagccacgtgagcaccatggccagcttcctgaagggcgcccacgtgaccatcaacgccagagccgaggaggacgtggagcccgagtgcatcatggagaaggtggccaaggccagcggcgccaactacagcttccacaaggagagcggcagattccaggacgtgggcccccaggcccccgtgggcagcgtgtaccagaagaccaacgccgtgagcgagatcaagagagtgggcaaggacagcttctgggccaaggccgagaaggaggaggagaacagaagactggaggagaagagaagagccgaggaggcccagagacagctggagcaggagagaagagagagagagctgagagaggccgccagaagagagcagagataccaggagcagggcggcgaggccagcccccagagaacctgggagcagcagcaggaggtggtgagcagaaacagaaacgagcaggagagcgccgtgcaccccagagagatcttcaagcagaaggagagagccatgagcaccaccagcatcagcagcccccagcccggcaagctgagaagccccttcctgcagaagcagctgacccagcccgagacccacttcggcagagagcccgccgccgccatcagcagacccagagccgacctgcccgccgaggagcccgcccccagcacccccccctgcctggtgcaggccgaggaggaggccgtgtacgaggagccccccgagcaggagaccttctacgagcagccccccctggtgcagcagcagggcgccggcagcgagcacatcgaccaccacatccagggccagggcctgagcggccagggcctgtgcgccagagccctgtacgactaccaggccgccgacgacaccgagatcagcttcgaccccgagaacctgatcaccggcatcgaggtgatcgacgagggctggtggagaggctacggccccgacggccacttcggcatgttccccgccaactacgtggagctgatcgagtag

SEQ ID NO: 12499 - DNA, 3189 bp, synthetic construct
  source 1..3189: mol_type = other DNA; note = Synthetic coding sequence
atggtgagcagcgcccagatgggcttcaacctgcaggccctgctggagcagctgagccaggacgagctgagcaagttcaagtacctgatcaccaccttcagcctggcccacgagctgcagaagatcccccacaaggaggtggacaaggccgacggcaagcagctggtggagatcctgaccacccactgcgacagctactgggtggagatggccagcctgcaggtgttcgagaagatgcacagaatggacctgagcgagagagccaaggacgaggtgagagaggccgccctgaagagcttcaacaagagaaagcccctgagcctgggcatcaccagaaaggagagaccccccctggacgtggacgagatgctggagagattcaagaccgaggcccaggccttcaccgagaccaagggcaacgtgatctgcctgggcaaggaggtgttcaagggcaagaagcccgacaaggacaacagatgcagatacatcctgaagaccaagttcagagagatgtggaagagctggcccggcgacagcaaggaggtgcaggtgatggccgagagatacaagatgctgatccccttcagcaaccccagagtgctgcccggccccttcagctacaccgtggtgctgtacggccccgccggcctgggcaagaccaccctggcccagaagctgatgctggactgggccgaggacaacctgatccacaagttcaagtacgccttctacctgagctgcagagagctgagcagactgggcccctgcagcttcgccgagctggtgttcagagactggcccgagctgcaggacgacatcccccacatcctggcccaggccagaaagatcctgttcgtgatcgacggcttcgacgagctgggcgccgcccccggcgccctgatcgaggacatctgcggcgactgggagaagaagaagcccgtgcccgtgctgctgggcagcctgctgaacagagtgatgctgcccaaggccgccctgctggtgaccaccagacccagagccctgagagacctgagaatcctggccgaggagcccatctacatcagagtggagggcttcctggaggaggacagaagagcctacttcctgagacacttcggcgacgaggaccaggccatgagagccttcgagctgatgagaagcaacgccgccctgttccagctgggcagcgcccccgccgtgtgctggatcgtgtgcaccaccctgaagctgcagatggagaagggcgaggaccccgtgcccacctgcctgaccagaaccggcctgttcctgagattcctgtgcagcagattcccccagggcgcccagctgagaggcgccctgagaaccctgagcctgctggccgcccagggcctgtgggcccagaccagcgtgctgcacagagaggacctggagagactgggcgtgcaggagagcgacctgagactgttcctggacggcgacatcctgagacaggacagagtgagcaagggctgctacagcttcatccacctgagcttccagcagttcctgaccgccctgttctacaccctggagaaggaggaggaggaggacagagacggccacacctgggacatcggcgacgtgcagaagctgctgagcggcgtggagagactgagaaaccccgacctgatccaggccggctactacagcttcggcctggccaacgagaagagagccaaggagctggaggccaccttcggctgcagaatgagccccgacatcaagcaggagctgctgagatgcgacatcagctgcaagggcggccacagcaccgtgaccgacctgcaggagctgctgggctgcctgtacgagagccaggaggaggagctggtgaaggaggtgatggcccagttcaaggagatcagcctgcacctgaacgccgtggacgtggtgcccagcagcttctgcgtgaagcactgcagaaacctgcagaagatgagcctgcaggtgatcaaggagaacctgcccgagaacgtgaccgccagcgagagcgacgccgaggtggagagaagccaggacgaccagcacatgctgcccttctggaccgacctgtgcagcatcttcggcagcaacaaggacctgatgggcctggccatcaacgacagcttcctgagcgccagcctggtgagaatcctgtgcgagcagatcgccagcgacacctgccacctgcagagagtggtgttcaagaacatcagccccgccgacgcccacagaaacctgtgcctggccctgagaggccacaagaccgtgacctacctgaccctgcagggcaacgaccaggacgacatgttccccgccctgtgcgaggtgctgagacaccccgagtgcaacctgagatacctgggcctggtgagctgcagcgccaccacccagcagtgggccgacctgagcctggccctggaggtgaaccagagcctgacctgcgtgaacctgagcgacaacgagctgctggacgagggcgccaagctgctgtacaccaccctgagacaccccaagtgcttcctgcagagactgagcctggagaactgccacctgaccgaggccaactgcaaggacctggccgccgtgctggtggtgagcagagagctgacccacctgtgcctggccaagaaccccatcggcaacaccggcgtgaagttcctgtgcgagggcctgagataccccgagtgcaagctgcagaccctggtgctgtggaactgcgacatcaccagcgacggctgctgcgacctgaccaagctgctgcaggagaagagcagcctgctgtgcctggacctgggcctgaaccacatcggcgtgaagggcatgaagttcctgtgcgaggccctgagaaagcccctgtgcaacctgagatgcctgtggctgtggggctgcagcatcccccccttcagctgcgaggacctgtgcagcgccctgagctgcaaccagagcctggtgaccctggacctgggccagaaccccctgggcagcagcggcgtgaagatgctgttcgagaccctgacctgcagcagcggcaccctgagaaccctgagactgaagatcgacgacttcaacgacgagctgaacaagctgctggaggagatcgaggagaagaacccccagctgatcatcgacaccgagaagcaccacccctgggccgagagacccagcagccacgacttcatgatctag

SEQ ID NO: 12500 - DNA, 390 bp, synthetic construct; identical to SEQ ID NO: 10956
  source 1..390: mol_type = other DNA; note = Synthetic coding sequence

SEQ ID NO: 12501 - DNA, 516 bp, synthetic construct
  source 1..516: mol_type = other DNA; note = Synthetic coding sequence
atggaggtggccgagcccagcagccccaccgaggaggaggaggaggaggaggagcacagcgccgagcccagacccagaaccagaagcaaccccgagggcgccgaggacagagccgtgggcgcccaggccagcgtgggcagcagaagcgagggcgagggcgaggccgccagcgccgacgacggcagcctgaacaccagcggcgccggccccaagagctggcaggtgcccccccccgcccccgaggtgcagatcagaacccccagagtgaactgccccgagaaggtgatcatctgcctggacctgagcgaggagatgagcctgcccaagctggagagcttcaacggccagcagaagaccgagctgcccgtgaccgagaacgtgcagaccatcccccccccctacgtggtgagaaccatcctggtgtacagcagacccccctgccagccccagttcagcctgaccgagcccatgaaggtgggcgaggcctgggagagagagggctgcctgcagccctag

SEQ ID NO: 12502 - DNA, 1446 bp, synthetic construct; identical to SEQ ID NO: 12062
  source 1..1446: mol_type = other DNA; note = Synthetic coding sequence

SEQ ID NO: 12503 - DNA, 1986 bp, synthetic construct
  source 1..1986: mol_type = other DNA; note = Synthetic coding sequence
atgaacaccggcagagacagccagagccccgacagcgcctggagaagctacaacgacggcaaccaggagaccctgaacggcgacgccacctacagcagcctggccgccaagggcttcagaagcgtgagacccaacctgcaggacaagagaagccccacccagagccagatcaccgtgaacggcaacagcggcggcgccgtgagccccatgagctactaccagagacccttcagccccagcgcctacagcctgcccgccagcctgaacagcagcatcgtgatgcagcacggcaccagcctggacagcaccgacacctacccccagcacgcccagagcctggacggcaccaccagcagcagcatccccctgtacagaagcagcgaggaggagaagagagtgaccgtgatcaaggccccccactaccccggcatcggccccgtggacgagagcggcatccccaccgccatcagaaccaccgtggacagacccaaggactggtacaagaccatgttcaagcagatccacatggtgcacaagcccgacgacgacaccgacatgtacaacaccccctacacctacaacgccggcctgtacaaccccccctacagcgcccagagccaccccgccgccaagacccagacctacagacccctgagcaagagccacagcgacaacagccccaacgccttcaaggacgccagcagccccgtgccccccccccacgtgcccccccccgtgccccccctgagacccagagacagaagcagcaccgagaagcacgactgggacccccccgacagaaaggtggacaccagaaagttcagaagcgagcccagaagcatcttcgagtacgagcccggcaagagcagcatcctgcagcacgagagacccccccccaagaagcccctggactacgtgcaggaccacagcagcggcgtgttcaacgaggccagcctgtaccagagcagcatcgacagaagcctggagagacccatgagcagcgccagcatggccagcgacttcagaaagagaagaaagagcgagcccgccgtgggcccccccagaggcctgggcgaccagagcgccagcagaaccagccccggcagagtggacctgcccggcagcagcaccaccctgaccaagagcttcaccagcagcagccccagcagccccagcagagccaaggacagagagagccccagaagctacagcagcaccctgaccgacatgggcagaagcgcccccagagagagaagaggcacccccgagaaggagaagctgcccgccaaggccgtgtacgacttcaaggcccagaccagcaaggagctgagcttcaagaagggcgacaccgtgtacatcctgagaaagatcgaccagaactggtacgagggcgagcaccacggcagagtgggcatcttccccatcagctacgtggagaagctgaccccccccgagaaggcccagcccgccagaccccccccccccgcccagcccggcgagatcggcgaggccatcgccaagtacaacttcaacgccgacaccaacgtggagctgagcctgagaaagggcgacagagtgatcctgctgaagagagtggaccagaactggtacgagggcaagatccccggcaccaacagacagggcatcttccccgtgagctacgtggaggtggtgaagaagaacaccaagggcgccgaggactaccccgacccccccatcccccacagctacagcagcgacagaatccacagcctgagcagcaacaagccccagagacccgtgttcacccacgagaacatccagggcggcggcgagcccttccaggccctgtacaactacacccccagaaacgaggacgagctggagctgagagagagcgacgtgatcgacgtgatggagaagtgcgacgacggctggttcgtgggcaccagcagaagaaccaagttcttcggcaccttccccggcaactacgtgaagagactgtag

SEQ ID NO: 12504 - DNA, 483 bp, synthetic construct; identical to SEQ ID NO: 10977
  source 1..483: mol_type = other DNA; note = Synthetic coding sequence

SEQ ID NO: 12505 - DNA, 717 bp, synthetic construct
  source 1..717: mol_type = other DNA; note = Synthetic coding sequence
atggactgcagagagatggacctgtacgaggactaccagagccccttcgacttcgacgccggcgtgaacaagagctacctgtacctgagccccagcggcaacagcagcccccccggcagccccaccctgcagaagttcggcctgctgagaaccgaccccgtgcccgaggagggcgaggacgtggccgccaccatcagcgccaccgagaccctgagcgaggaggagcaggaggagctgagaagagagctggccaaggtggaggaggagatccagaccctgagccaggtgctggccgccaaggagaagcacctggccgagatcaagagaaagctgggcatcaacagcctgcaggagctgaagcagaacatcgccaagggctggcaggacgtgaccgccaccagcgcctacaagaagaccagcgagaccctgagccaggccggccagaaggccagcgccgccttcagcagcgtgggcagcgtgatcaccaagaagctggaggacgtgaacatcagaagcatccagcacagcatcagcatgcccgccatgagaaacagccccaccttcaagagcttcgaggagaaggtggagaacctgaagagcaaggtgggcggcaccaagcccgccggcggcgacttcggcgaggtgctgaacagcgccgccaacgccagcgccaccaccaccgagcccctgcccgagaagacccaggagagcctgtag

SEQ ID NO: 12506 - DNA, 108 bp, synthetic construct
  source 1..108: mol_type = other DNA; note = Synthetic coding sequence
atgcagaccagcagcagcagaagcgtgcacctgagcgagtggcagaagaactacttcgccatcaccagcggcatctgcaccggccccaaggccgacgcctacagatag

SEQ ID NO: 12507 - DNA, 327 bp, synthetic construct
  source 1..327: mol_type = other DNA; note = Synthetic coding sequence
atgaccagaggcaaccagagagagctggccagacagaagaacatgaagaagcagagcgacagcgtgaagggcaagagaagagacgacggcctgagcgccgccgccagaaagcagagcgccatcaccagcagcagaaacttcctgtaccccgcctacgtgtacttccccagcagcgtgcccagcccccccagaaagtacacccagacctactacgccgccgtgcccgccggctggtggggcagcggcggcggccccgccacccagcccgccgccggcggcagatggagattcctgcacatcctgggcacccagccccagagccactag

SEQ ID NO: 12508 - DNA, 846 bp, synthetic construct
  source 1..846: mol_type = other DNA; note = Synthetic coding sequence
atgggcgccggcaacctgccccccatcacccaggaggaggccctgcacatcctgggcttccagccccccttcgaggacatcagattcggccccttcaccggcaacaccaccctgatgagatggttcagacagatcaacgaccacttccacgtgaagggctgcagctacgtgctgtacaagccccacggcaagaacaagaccgccggcgagaccgccagcggcgccctgagcaagctgaccagaggcctgaaggacgagagcctggcctacatctaccactgccagaaccactacttctgccccatcggcttcgaggccacccccgtgaaggccaacaaggccttcagcagaggccccctgagcccccaggaggtggagtactggatcctgatcggcgagagcagcagaaagcaccccgccatccactgcaagaagtgggccgacatcgtgaccgacctgaacacccagaaccccgagtacctggacatcagacacctggagagaggcctgcagtacagaaagaccaagaagcccaccttcttcagcagccaggtgggcggcaacctgcactgcatcatcgccttccagagactgaactggcagagattcggcctgtggaacttccccttcggcaccatcagacaggagagccagccccccacccacgcccagggcatcgccaagagcgagagcgaggacaacatcagcaagaagcagcacggcagactgggcagaagcttcagcgccagcttccaccaggacagcgcctggaagaagatgagcagcatccacgagagaagaaacagcggctaccagggctacagcgactacgacggcaacgactag

SEQ ID NO: 12509 - DNA, 213 bp, synthetic construct
  source 1..213: mol_type = other DNA; note = Synthetic coding sequence
atgagagccctgaccgtgcagagagtgaagttcgccatggacctgcccctgctgaagagagccggccaggacctggccgagaagaccaagaacttcgtgagcagaagcctggtgatcggcgaggtgctgagcatggccgacatggccaccggcgtgaagtgcggcatcatctactggctgttcggcggcgccatcagaaacctgggcagctag

SEQ ID NO: 12510 - DNA, 1644 bp, synthetic construct; identical to SEQ ID NO: 10555
  source 1..1644: mol_type = other DNA; note = Synthetic coding sequence

SEQ ID NO: 12511 - DNA, 489 bp, synthetic construct
  source 1..489: mol_type = other DNA; note = Synthetic coding sequence
atgagctacaactgctgcagcagaaacttcagcagctgcagccacggcggctacctgcactaccccggcagcagctgcggcagcagctaccccagcaacctggtgtacagcaccgacctgtgcagccccagcacctgccagctgggcagcagcctgtacagaggctgccaggagacctgctggagacccaacagctgccagaccttctgctactaccccagaacccacatgctgtgcaacagctgcctgaccatgcacgtgggcagcagaggcttcggcagcaacagctgctgcagcctgagctgcggcagcagaagctgcagcagcctgggctgcggcagcaacggcttcagatacctgaactacagaatccacaccagccccagccagagctacagaagcagattctgccaccccatctacttcccccccagaagatggttccacagcagctgctaccagcccttctgcagaagcggcttctactag

SEQ ID NO: 12512 - DNA, 495 bp, synthetic construct
  source 1..495: mol_type = other DNA; note = Synthetic coding sequence
atgttcatcagcttctacgacttcaagaacatcccccaggacagcagatgcgacggccagctgttcatcaacggcagaaacaacaagaacaacagcatcagcctgtacttccagggcggcctgagacacgccagcgccagcatcggcggcagcgaggcctacagacacatgaagttcgagggcggcgtgcacagagtgcagagagtgcccaagaccgagaagcagggcagagtgcacaccagcaccatgaccgtggccatcctgccccagcccaccgagatcaacctggtgatcaaccccaaggacctgagaatcgacaccaagagagccagcggcgccggcggccagcacgtgaacaccaccgacagcgccgtgagaatcgtgcacctgcccaccggcgtggtgagcgagtgccagcaggagagaagccagctgaagaacaaggagctggccatgaccaagctgagagccaagctgtacagcatgcacctgtag

SEQ ID NO: 12513 - DNA, 2166 bp, synthetic construct
  source 1..2166: mol_type = other DNA; note = Synthetic coding sequence
atggaggaggagctgaagtgccccgtgtgcggcagcctgttcagagagcccatcatcctgccctgcagccacaacgtgtgcctgccctgcgccagaaccatcgccgtgcagacccccgacggcggcagcgccgccggcggcctgggcggcggcgccggcggcggcggcgaccacgccgacaagctgagcctgtacagcgagaccgacagcggctacggcagctacacccccagcctgaagagccccaacggcgtgagagtgctgcccatggtgcccgccccccccggcagcagcgccgccgccgccagaggcgccgcctgcagcagcctgagcagcagcagcagcagcatcacctgcccccagtgccacagaagcgccagcctggaccacagaggcctgagaggcttccagagaaacagactgctggaggccatcgtgcagagataccagcagggcagaggcgccgtgcccggcaccagcgccgccgccgccgtggccatctgccagctgtgcgacagaaccccccccgagcccgccgccaccctgtgcgagcagtgcgacgtgctgtactgcagcgcctgccagctgaagtgccaccccagcagaggccccttcgccaagcacagactgggcgcccccagcggcggcggcggctgcaagagccccggcggcgccggcgccggcgccaccggcggcagcaccgccagaaagttccccacctgccccgagcacgagatggagaactacagcatgtactgcgtgagctgcagaacccccgtgtgctacctgtgcctggaggagggcagacacgccaagcacgaggtgaagcccctgggcgccatgtggaagcagcacaaggcccagctgagccaggccctgaacggcgtgagcgacaaggccaaggaggccaaggagttcctggtgcagctgaagaacatcctgcagcagatccaggagaacggcctggactacgaggcctgcctggtggcccagtgcgacgccctggtggacgccctgaccagacagaaggccaagctgctgaccaaggtgaccaaggagagagagcacaagctgaagatggtgtgggaccagatcaaccactgcaccctgaagctgagacagagcaccggcctgatggagtactgcctggaggtgatcaaggagaacgaccccagcggcttcctgcagatcagcgacgccctgatcaagagagtgcaggtgagccaggagcagtgggtgaagggcgccctggagcccaaggtgagcgccgagttcgacctgaccctggacagcgagcccctgctgcaggccatccaccagctggacttcatccagatgaagtgcagagtgccccccgtgcccctgctgcagctggagaagtgctgcaccagaaacaacagcgtgaccctggcctggagaatgccccccttcacccacagccccgtggacggctacatcctggagctggacgacggcgccggcggccagttcagagaggtgtacgtgggcaaggagaccctgtgcaccatcgacggcctgcacttcaacagcacctacaacgccagagtgaaggccttcaacagcagcggcgtgggcccctacagcaagaccgtggtgctgcagaccagcgacgtggcctggttcaccttcgaccccaacagcggccacagagacatcatcctgagcaacgacaaccagaccgccacctgcagcagctacgacgacagagtggtgctgggcaccgccgccttcagcaagggcgtgcactactgggagctgcacgtggacagatacgacaaccaccccgaccccgccttcggcgtggccagagccagcgtggtgaaggacatgatgctgggcaaggacgacaaggcctgggccatgtacgtggacaacaacagaagctggttcatgcactgcaacagccacaccaacagaaccgagggcggcgtgtgcaagggcgccaccgtgggcgtgctgctggacctgaacaagcacaccctgaccttcttcatcaacggccagcagcagggccccaccgccttcagccacgtggacggcgtgttcatgcccgccctgagcctgaacagaaacgtgcaggtgaccctgcacaccggcctggaggtgcccaccaacctgggcagacccaagctgagcggcaactag

SEQ ID NO: 12514 - DNA, 1479 bp, synthetic construct
  source 1..1479: mol_type = other DNA; note = Synthetic coding sequence
atggacttcctgctgggcaaccccttcagcagccccgtgggccagagaatcgagaaggccaccgacggcagcctgcagagcgaggactgggccctgaacatggagatctgcgacatcatcaacgagaccgaggagggccccaaggacgccctgagagccgtgaagaagagaatcgtgggcaacaagaacttccacgaggtgatgctggccctgaccgtgctggagacctgcgtgaagaactgcggccacagattccacgtgctggtggccagccaggacttcgtggagagcgtgctggtgagaaccatcctgcccaagaacaacccccccaccatcgtgcacgacaaggtgctgaacctgatccagagctgggccgacgccttcagaagcagccccgacctgaccggcgtggtgaccatctacgaggacctgagaagaaagggcctggagttccccatgaccgacctggacatgctgagccccatccacaccccccagagaaccgtgttcaacagcgagacccagagcggccaggacagcgtgggcaccgacagcagccagcaggaggacagcggccagcacgccgcccccctgcccgccccccccatcctgagcggcgacacccccatcgcccccacccccgagcagatcggcaagctgagaagcgagctggagatggtgagcggcaacgtgagagtgatgagcgagatgctgaccgagctggtgcccacccaggccgagcccgccgacctggagctgctgcaggagctgaacagaacctgcagagccatgcagcagagagtgctggagctgatcccccagatcgccaacgagcagctgaccgaggagctgctgatcgtgaacgacaacctgaacaacgtgttcctgagacacgagagattcgagagattcagaaccggccagaccaccaaggcccccagcgaggccgagcccgccgccgacctgatcgacatgggccccgaccccgccgccaccggcaacctgagcagccagctggccggcatgaacctgggcagcagcagcgtgagagccggcctgcagagcctggaggccagcggcagactggaggacgagttcgacatgttcgccctgaccagaggcagcagcctggccgaccagagaaaggaggtgaagtacgaggccccccaggccaccgacggcctggccggcgccctggacgccagacagcagagcaccggcgccatccccgtgacccaggcctgcctgatggaggacatcgagcagtggctgagcaccgacgtgggcaacgacgccgaggagcccaagggcgtgaccagcgaggagttcgacaagttcctggaggagagagccaaggccgccgacagactgcccaacctgagcagccccagcgccgagggcccccccggcccccccagcggccccgcccccagaaagaagacccaggagaaggacgacgacatgctgttcgccctgtag

SEQ ID NO: 12515 - DNA, 747 bp, synthetic construct; identical to SEQ ID NO: 11765
  source 1..747: mol_type = other DNA; note = Synthetic coding sequence

SEQ ID NO: 12516 - DNA, 21 bp, synthetic construct
  source 1..21: mol_type = other DNA; note = Synthetic coding sequence
atgagcagaagaagattctag

SEQ ID NO: 12517 - DNA, 165 bp, synthetic construct
  source 1..165: mol_type = other DNA; note = Synthetic coding sequence
atgagcgagcagggcgacctgaaccaggccatcgccgaggagggcggcaccgagcaggagaccgccacccccgagaacggcatcgtgaagagcgagagcctggacgaggaggagaagctggagctgcagagaagactggaggcccagaaccaggagagaagatag

SEQ ID NO: 12518 - DNA, 1446 bp, synthetic construct; identical to SEQ ID NO: 12062
  source 1..1446: mol_type = other DNA; note = Synthetic coding sequence

SEQ ID NO: 12519 - DNA, 312 bp, synthetic construct; identical to SEQ ID NO: 10772
  source 1..312: mol_type = other DNA; note = Synthetic coding sequence

SEQ ID NO: 12520 - DNA, 2919 bp, synthetic construct
  source 1..2919: mol_type = other DNA; note = Synthetic coding sequence
atggagagaatgaactggctgagcagactggccagcagaggccccggccacagaatcccccagggcgccaacctgcagacccccgtgatggccgaccccgagacctgcctgatggtgttcaagaaccactggagccaggtggtgagaatcctggagagacagggccccagagccgcccccggcggcgccgacgacctgagcgccgtgagaaaccacacctaccagatgctgaccctgctggccgaggacagagccgtgcccagcgcccccaccggccccggccccctgctggagttcgccctgcacgaggacctgctgaccagagtgctgacctggcagctgcagtgggacgagctgggcgacggcgtggaggagagaagagccgagcagctgaagctgttcgagatgctggtgagcgaggccagacagcccctgctgagacacggccccgtgagagaggccctgctgaccctgctggacgcctgcggcagacccgtgcccagcagccccgccctggacgagggcctggtgctgctgctgagccagctgtgcgtgtgcgtggcccaggagcccagcctgctggagttcttcctgcagcccccccccgagcccggcgccgcccccagactgctgctgttcagcagactggtgcccttcgtgcacagagagggcaccctgggccagcaggccagagacgccctgctgctgctgatggccctgagcgccggcagccccaccgtgggcagatacatcgccgaccacagctacttctgccccgtgctggccaccggcctgagcgccctgtacagcagcctgcccagaaagatcgaggtgcccggcgacgactggcactgcctgagaagagaggactggctgggcgtgcccgccctggccctgttcatgagcagcctggagttctgcaacgccgtgatccaggtggcccaccccctggtgcagaagcagctggtggactacatccacaacggcttcctggtgcccgtgatgggccccgccctgcacaagaccagcgtggaggagatgatcgccagcaccgcctacctggagctgttcctgagaagcatcagcgagcccgccctgctgagaaccttcctgagattcctgctgctgcacagacacgacacccacaccatcctggacaccctggtggccagaatcggcagcaacagcagactgtgcatggtgagcctgagcctgttcagaaccctgctgaacctgagctgcgaggacgtgctgctgcagctggtgctgagatacctggtgccctgcaaccacgtgatgctgagccagaagcccgccgtgagagacgtggacctgtacggcagagccgccgacaagttcctgagcctgatccccagatgctgcagacaccacgcccccagcccccccagacccgagcacgccagctgggccagaggccccggcagccccagcgtggacagcagcagcgtgaccaccgtgcccagacccagcacccccagcagactggccctgttcctgagacagcagagcctgggcggcagcgagagccccggccccgccccctgcagccccggcctgagcgccagccccgccagcagccccggcagaagacccacccccgccgaggagcccggcgagctggaggacaactacctggagtacctgagagaggccagaagaggcgtggacagatgcgtgagagcctgcagaacctggagcgccccctacgacggcgagagacccagccccgagcccagccccttcggcagcagaaccaagaagagaagcctgctgcccgaggaggacagaaacaacgtgggcgagggcgaggaggaggagctgggcagaagaggcagagccggcggcgccggcgagggccccggccacctgccccccccccagctgaacggcgtgcccggcagctggcccgagggcgccaagaaggtgagactggtgcccaaggagggcgccggcgagctgctggagggcatcagcgagggcatggccggcctggagggcttcggccaggagctgagagagctggaggtggccctgagcaacggcggcaccggcagcgagagccccctggagccccccctgcccctggaggaggaggaggcctacgagagcttcacctgcccccccgagccccccggccccttcctgagcagccccctgagaaccctgaaccagctgcccagccagcccttcaccggccccttcatggccgtgctgttcgccaagctggagaacatgctgcagaacagcgtgtacgtgaacttcctgctgaccggcctggtggcccagctggcctgccacccccagcccctgctgagaagcttcctgctgaacaccaacatggtgttccagcccagcgtgaagagcctgctgcaggtgctgggcagcgtgaagaacaagatcgagaacttcgccgccagccaggaggacttccccgccctgctgagcaaggccaagaagtacctgatcgccagaggcaagctggactgggccgagggccccgccgccggccccgcccccagaagaagcgaccccctggtgaagagcagaagacccagcctgggcgagctgctgctgagacacgcccacagccccaccagagccagacaggccgcccagctggtgctgcagcccggcagagacggcgccggcctgggcctgagcggcggcagccccggcgccagcacccccgtgctgctgaccagaggcggcgcccccgagagacagggcgaggccctgagagtgaagaacgccgtgtactgcgccgtgatcttccccgagttcctgaaggagctggccgccatcagccaggcccacgccgtgaccagccccttcctgctggagaccagcgaggagggcagcggccccctgatcagcggctgcggccccctgaacccctag

SEQ ID NO: 12521 - DNA, 1929 bp, synthetic construct; identical to SEQ ID NO: 12350
  source 1..1929: mol_type = other DNA; note = Synthetic coding sequence

SEQ ID NO: 12522 - DNA, 1935 bp, synthetic construct
  source 1..1935: mol_type = other DNA; note = Synthetic coding sequence
atgagcgtgaccctgaccagcgtgaagagagtgcagagcagccccaacctgctggccgccggcagagacagccagagccccgacagcgcctggagaagctacaacgacggcaaccaggagaccctgaacggcgacgccacctacagcagcctggccgccaagggcttcagaagcgtgagacccaacctgcaggacaagagaagccccacccagagccagatcaccgtgaacggcaacagcggcggcgccgtgagccccatgagctactaccagagacccttcagccccagcgcctacagcctgcccgccagcctgaacagcagcatcgtgatgcagcacggcaccagcctggacagcaccgacacctacccccagcacgcccagagcctggacggcaccaccagcagcagcatccccctgtacagaagcagcgaggaggagaagagagtgaccgtgatcaaggccccccactaccccggcatcggccccgtggacgagagcggcatccccaccgccatcagaaccaccgtggacagacccaaggactggtacaagaccatgttcaagcagatccacatggtgcacaagcccggcctgtacaaccccccctacagcgcccagagccaccccgccgccaagacccagacctacagacccctgagcaagagccacagcgacaacagccccaacgccttcaaggacgccagcagccccgtgccccccccccacgtgcccccccccgtgccccccctgagacccagagacagaagcagcaccgagaagcacgactgggacccccccgacagaaaggtggacaccagaaagttcagaagcgagcccagaagcatcttcgagtacgagcccggcaagagcagcatcctgcagcacgagagacccgccagcctgtaccagagcagcatcgacagaagcctggagagacccatgagcagcgccagcatggccagcgacttcagaaagagaagaaagagcgagcccgccgtgggcccccccagaggcctgggcgaccagagcgccagcagaaccagccccggcagagtggacctgcccggcagcagcaccaccctgaccaagagcttcaccagcagcagccccagcagccccagcagagccaaggacagagagagccccagaagctacagcagcaccctgaccgacatgggcagaagcgcccccagagagagaagaggcacccccgagaaggagaagctgcccgccaaggccgtgtacgacttcaaggcccagaccagcaaggagctgagcttcaagaagggcgacaccgtgtacatcctgagaaagatcgaccagaactggtacgagggcgagcaccacggcagagtgggcatcttccccatcagctacgtggagaagctgaccccccccgagaaggcccagcccgccagaccccccccccccgcccagcccggcgagatcggcgaggccatcgccaagtacaacttcaacgccgacaccaacgtggagctgagcctgagaaagggcgacagagtgatcctgctgaagagagtggaccagaactggtacgagggcaagatccccggcaccaacagacagggcatcttccccgtgagctacgtggaggtggtgaagaagaacaccaagggcgccgaggactaccccgacccccccatcccccacagctacagcagcgacagaatccacagcctgagcagcaacaagccccagagacccgtgttcacccacgagaacatccagggcggcggcgagcccttccaggccctgtacaactacacccccagaaacgaggacgagctggagctgagagagagcgacgtgatcgacgtgatggagaagtgcgacgacggctggttcgtgggcaccagcagaagaaccaagttcttcggcaccttccccggcaactacgtgaagagactgtag

SEQ ID NO: 12523 - DNA, 294 bp, synthetic construct
  source 1..294: mol_type = other DNA; note = Synthetic coding sequence
atgggcaagagctgcaaggtggtggtgtgcggccaggccagcgtgggcaagaccagcatcctggagcagctgctgtacggcaaccacgtggtgggcagcgagatgatcgagacccaggaggacatctacgtgggcagcatcgagaccgacagaggcgtgagagagcagatcgccgagagcctgttcagcgtgtggagctgcagcagaagaagactgaccaaccccagaaccagaagaagaagccccagctggagcctggccaccagcgtgacctacagaagcagcggcgtgtag

SEQ ID NO: 12524 - DNA, 915 bp, synthetic construct
  source 1..915: mol_type = other DNA; note = Synthetic coding sequence
atgagcaagacccacgaccaccagctggagagcagcctgagccccgtggaggtgttcgccaagaccagcgccagcctggagatgaaccagggcgtgagcgaggagagaatccacctgggcagcagccccaagaagggcggcaactgcgacctgagccaccaggagagactgcagagcaagagcctgcacctgagcccccaggagcagagcgccagctaccaggacagaagacagagctggagaagagccagcatgaaggagaccaacagaagaaagagcctgcaccccatccaccagggcatcaccgagctgagcagaagcatcagcgtggacctggccgagagcaagagactgggctgcctgctgctgagcagcttccagttcagcatccagaagctggagcccttcctgagagacaccaagggcttcagcctggagagcttcagagccaaggccagcagcctgagcgaggagctgaagcacttcgccgacggcctggagaccgacggcaccctgcagaagtgcttcgaggacagcaacggcaaggccagcgacttcagcctggaggccagcgtggccgagatgaaggagtacatcaccaagttcagcctggagagacagacctgggaccagctgctgctgcactaccagcaggaggccaaggagatcctgagcagaggcagcaccgaggccaagatcaccgaggtgaaggtggagcccatgacctacctgggcagcagccagaacgaggtgctgaacaccaagcccgactaccagaagatcctgcagaaccagagcaaggtgttcgactgcatggagctggtgatggacgagctgcagggcagcgtgaagcagctgcaggccttcatggacgagagcacccagtgcttccagaaggtgagcgtgcagctgtag

SEQ ID NO: 12525 - DNA, 1842 bp, synthetic construct; identical to SEQ ID NO: 9548
  source 1..1842: mol_type = other DNA; note = Synthetic coding sequence

SEQ ID NO: 12526 - DNA, 1560 bp, synthetic construct
  source 1..1560: mol_type = other DNA; note = Synthetic coding sequence
atggagggcgtgctgtacaagtggaccaactacctgagcggctggcagcccagatggttcctgctgtgcggcggcatcctgagctactacgacagccccgaggacgcctggaagggctgcaagggcagcatccagatggccgtgtgcgagatccaggtgcacagcgtggacaacaccagaatggacctgatcatccccggcgagcagtacttctacctgaaggccagaagcgtggccgagagacagagatggctggtggccctgggcagcgccaaggcctgcctgaccgacagcagaacccagaaggagaaggagttcgccgagaacaccgagaacctgaagaccaagatgagcgagctgagactgtactgcgacctgctggtgcagcaggtggacaagaccaaggaggtgaccaccaccggcgtgagcaacagcgaggagggcatcgacgtgggcaccctgctgaagagcacctgcaacaccttcctgaagaccctggaggagtgcatgcagatcgccaacgccgccttcaccagcgagctgctgtacagaaccccccccggcagcccccagctggccatgctgaagagcagcaagatgaagcaccccatcatccccatccacaacagcctggagagacagatggagctgagcacctgcgagaacggcagcctgaacatggagatcaacggcgaggaggagatcctgatgaagaacaagaacagcctgtacctgaagagcgccgagatcgactgcagcatcagcagcgaggagaacaccgacgacaacatcaccgtgcagggcgagatcagaaaggaggacggcatggagaacctgaagaaccacgacaacaacctgacccagagcggcagcgacagcagctgcagccccgagtgcctgtgggaggagggcaaggaggtgatccccaccttcttcagcaccatgaacaccagcttcagcgacatcgagctgctggaggacagcggcatccccaccgaggccttcctggccagctgctacgccgtggtgcccgtgctggacaagctgggccccaccgtgttcgcccccgtgaagatggacctggtgggcaacatcaagaaggtgaaccagaagtacatcaccaacaaggaggagttcaccaccctgcagaagatcgtgctgcacgaggtggaggccgacgtggcccaggtgagaaacagcgccaccgaggccctgctgtggctgaagagaggcctgaagttcctgaagggcttcctgaccgaggtgaagaacggcgagaaggacatccagaccgccctgaacaacgcctacggcaagaccctgagacagcaccacggctgggtggtgagaggcgtgttcgccctggccctgagagccgcccccagctacgaggacttcgtggccgccctgaccgtgaaggagggcgaccaccagaaggaggccttcagcatcggcatgcagagagacctgagcctgtacctgcccgccatggagaagcagctggccatcctggacaccctgtacgaggtgcacggcctggagagcgacgaggtggtgtag

SEQ ID NO: 12527 - DNA, 1446 bp, synthetic construct; identical to SEQ ID NO: 12062
  source 1..1446: mol_type = other DNA; note = Synthetic coding sequence

SEQ ID NO: 12528 - DNA, 1173 bp, synthetic construct
  source 1..1173: mol_type = other DNA; note = Synthetic coding sequence
atgagcgccgccaaccccgagacccccaacagcaccatcagcagagaggccagcacccagagcagcagcgccgccgccagccagggctgggtgctgcccgagggcaagatcgtgcccaacaccgtgttcgtgggcggcatcgacgccagaatggacgagaccgagatcggcagctgcttcggcagatacggcagcgtgaaggaggtgaagatcatcaccaacagaaccggcgtgagcaagggctacggcttcgtgagcttcgtgaacgacgtggacgtgcagaagatcgtgggcagccagatccacttccacggcaagaagctgaagctgggccccgccatcagaaagcagaagctgtgcgccagacacgtgcagcccagacccctggtggtgaacccccccccccccccccagttccagaacgtgtggagaaaccccaacaccgagacctacctgcagccccagatcacccccaaccccgtgacccagcacgtgcaggcctacagcgcctacccccacagccccggccaggtgatcaccggctgccagctgctggtgtacaactaccaggagtaccccacctaccccgacagcgccttccaggtgaccaccggctaccagctgcccgtgtacaactaccagcccttccccgcctaccccagaagccccttccaggtgaccgccggctaccagctgcccgtgtacaactaccaggccttccccgcctaccccaacagccccttccaggtggccaccggctaccagttccccgtgtacaactaccagcccttccccgcctaccccagcagccccttccaggtgaccgccggctaccagctgcccgtgtacaactaccaggccttccccgcctaccccaacagccccttccaggtggccaccggctaccagttccccgtgtacaactaccaggccttccccgcctaccccaacagccccgtgcaggtgaccaccggctaccagctgcccgtgtacaactaccaggccttccccgcctaccccaacagcgccgtgcaggtgaccaccggctaccagttccacgtgtacaactaccagatgcccccccagtgccccgtgggcgagcagagaagaaacctgtggaccgaggcctacaagtggtggtacctggtgtgcctgatccagagaagagactag

SEQ ID NO: 12529 - DNA, 1143 bp, synthetic construct
  source 1..1143: mol_type = other DNA; note = Synthetic coding sequence
atggagaagaagaagatggtgacccagggcaaccaggagcccaccaccacccccgacgccatggtgcagcccttcaccaccatccccttccccccccccccccagaacggcatccccaccgagtacggcgtgccccacacccaggactacgccggccagaccggcgagcacaacctgaccctgtacggcagcacccaggcccacggcgagcagagcagcaacagccccagcacccagaacggcagcctgaccaccgagggcggcgcccagaccgacggccagcagagccagacccagagcagcgagaacagcgagagcaagagcacccccaagagactgcacgtgagcaacatccccttcagattcagagaccccgacctgagacagatgttcggccagttcggcaagatcctggacgtggagatcatcttcaacgagagaggcagcaagggcttcggcttcgtgaccttcgagaacagcgccgacgccgacagagccagagagaagctgcacggcaccgtggtggagggcagaaagatcgaggtgaacaacgccaccgccagagtgatgaccaacaagaagatggtgaccccctacgccaacggctggaagctgagccccgtggtgggcgccgtgtacggccccgagctgtacgccgccagcagcttccaggccgacgtgagcctgggcaacgacgccgccgtgcccctgagcggcagaggcggcatcaacacctacatccccctgatcagcctgcccctggtgcccggcttcccctaccccaccgccgccaccaccgccgccgccttcagaggcgcccacctgagaggcagaggcagaaccgtgtacggcgccgtgagagccgtgccccccaccgccatccccgcctaccccggcgtggtgtaccaggacggcttctacggcgccgacctgtacggcggctacgccgcctacagatacgcccagcccgccaccgccaccgccgccaccgccgccgccgccgccgccgccgcctacagcgacggctacggcagagtgtacaccgccgacccctaccacgccctggcccccgccgccagctacggcgtgggcgccgtggccagcctgtacagaggcggctacagcagattcgccccctactag

SEQ ID NO: 12530 - DNA, 1614 bp, synthetic construct
  source 1..1614: mol_type = other DNA; note = Synthetic coding sequence
atggaccccggcgacgccgccatcctggagagcagcctgagaatcctgtacagactgttcgagagcgtgctgccccccctgcccgccgccctgcagagcagaatgaacgtgatcgaccacgtgagagacatggccgccgccggcctgcacagcaacgtgagactgctgagcagcctgctgctgaccatgagcaacaacaaccccgagctgttcagccccccccagaagtaccagctgctggtgtaccacgccgacagcctgttccacgacaaggagtacagaaacgccgtgagcaagtacaccatggccctgcagcagaagaaggccctgagcaagaccagcaaggtgagacccagcaccggcaacagcgccagcaccccccagagccagtgcctgcccagcgagatcgaggtgaagtacaagatggccgagtgctacaccatgctgaagcaggacaaggacgccatcgccatcctggacggcatccccagcagacagagaacccccaagatcaacatgatgctggccaacctgtacaagaaggccggccaggagagacccagcgtgaccagctacaaggaggtgctgagacagtgccccctggccctggacgccatcctgggcctgctgagcctgagcgtgaagggcgccgaggtggccagcatgaccatgaacgtgatccagaccgtgcccaacctggactggctgagcgtgtggatcaaggcctacgccttcgtgcacaccggcgacaacagcagagccatcagcaccatctgcagcctggagaagaagagcctgctgagagacaacgtggacctgctgggcagcctggccgacctgtacttcagagccggcgacaacaagaacagcgtgctgaagttcgagcaggcccagatgctggacccctacctgatcaagggcatggacgtgtacggctacctgctggccagagagggcagactggaggacgtggagaacctgggctgcagactgttcaacatcagcgaccagcacgccgagccctgggtggtgagcggctgccacagcttctacagcaagagatacagcagagccctgtacctgggcgccaaggccatccagctgaacagcaacagcgtgcaggccctgctgctgaagggcgccgccctgagaaacatgggcagagtgcaggaggccatcatccacttcagagaggccatcagactggccccctgcagactggactgctacgagggcctgatcgagtgctacctggccagcaacagcatcagagaggccatggtgatggccaacaacgtgtacaagaccctgggcgccaacgcccagaccctgaccctgctggccaccgtgtgcctggaggaccccgtgacccaggagaaggccaagaccctgctggacaaggccctgacccagagacccgactacatcaaggccgtggtgaagaaggccgagctgctgagcagagagcagaagtacgaggacggcatcgccctgctgagaaacgccctggccaaccagagcgactgcgtgctgcacagaatcctgggcgacttcctggtggccgtgaacgagtaccaggaggccatggaccagtacagcatcgccctgagatag

SEQ ID NO: 12531 - DNA, 351 bp, synthetic construct
  source 1..351: mol_type = other DNA; note = Synthetic coding sequence
atggccttcatgaccagaaagctgtgggacctggagcagcaggtgaaggcccagaccgacgagatcctgagcaaggaccagaagatcgccgccctggaggacctggtgcagaccctgagaccccaccccgccgaggccaccctgcagagacaggaggagctggagaccatgtgcgtgcagctgcagagacaggtgagagagatggagagattcctgagcgactacggcctgcagtgggtgggcgagcccatggaccaggaggacagcgagagcaagaccgtgagcgagcacggcgagagagactggatgaccgccaagaagttctggaagcccggcagagccggcagatag

SEQ ID NO: 12532 - DNA, 285 bp, synthetic construct
  source 1..285: mol_type = other DNA; note = Synthetic coding sequence
atgaccggcagcagaaactggagagccaccagagacatgtgcagatacagacacaactaccccgacctggtggagagagactgcaacggcgacacccccaacctgagcttctacagaaacgagatcagattcctgcccaacggctgcttcatcgaggacatcctgcagaactggaccgacaactacgacctgctggaggacaaccacagctacatccagtggctgttccccctgagagagcccggcgtgaactggcacgccaagcccctgaccctgagagagtag

SEQ ID NO: 12533 - DNA, 1029 bp, synthetic construct
  source 1..1029: mol_type = other DNA; note = Synthetic coding sequence
atgagattctgggccccctggggcagcagaacccccagcggcagaagcctgtggaccgaccccgtgacctactacaccgccctgcacatcgccgtgctgagaaaccagcccgacatggtggagctgctggtgcaccacggcgccgacgtgaacagaagagacagaatccacgagagcagccccctggacctggccagcgaggagcccgagagactgccctgcctgcagagactgctggacctgggcgccgacgtgaacgccgccgacaagcacggcaagaccgccctgctgcacgccctggccagcagcgacggcgtgcagatccacaacaccgagaacatcagactgctgctggagggcggcgccgacgtgaaggccaccaccaaggacggcgacaccgtgttcacctgcatcatcttcctgctgggcgagaccgtgggcggcgacaaggaggaggcccagatgatcaacagattctgcttccaggtgaccagactgctgctggcccacggcgccgaccccagcgagtgccccgcccacgagagcctgacccacatctgcctgaagagcttcaagctgcacttccccctgctgagattcctgctggagagcggcgccgcctacaactgcagcctgcacggcgccagctgctggagcggcttccacatcatcttcgagagactgtgcagccaccccggctgcaccgaggacgagagccacgccgacctgctgagaaaggccgagaccgtgctggacctgatggtgaccaacagccagaagctgcagctgcccgagaacttcgacatccaccccgtgggcagcctggccgagaagatccaggccctgcacttcagcctgagacagctggagagctaccccccccccctgaagcacctgtgcagagtggccatcagactgtacctgcagccctggcccgtggacgtgaaggtgaaggccctgcccctgcccgacagactgaagtggtacctgctgagcgagcacagcggcagcgtggaggacgacatctag

SEQ ID NO: 12534 - DNA, 3192 bp, synthetic construct; identical to SEQ ID NO: 11218
  source 1..3192: mol_type = other DNA; note = Synthetic coding sequence

SEQ ID NO: 12535 - DNA, 96 bp, synthetic construct
  source 1..96: mol_type = other DNA; note = Synthetic coding sequence
atgagcgacgaggtgttcagcaccaccctggcctacaccaagagccccaaggtgaccaagagaaccaccttccaggacgagctgatcagagcctag

SEQ ID NO: 12536 - DNA, 606 bp, synthetic construct
  source 1..606: mol_type = other DNA; note = Synthetic coding sequence
atgcccctgcagctgaagaaccccagactgagacagaagagcagaaccagatgcaacaagagccagaagaaggccgagctgctggacaacgagaagcccgccgccgtggtggcccccatcaccaccggctacaccgtgaagatcagcaactacggctgggaccagagcgacaagttcgtgaagatctacatcaccctgaccggcgtgcaccaggtgcccaccgagaacgtgcaggtgcacttcaccgagagaagcttcgacctgctggtgaagaacctgaacggcaagagctacagcatgatcgtgaacaacctgctgaagcccatcagcgtggagggcagcagcaagaaggtgaagaccgacaccgtgctgatcctgtgcagaaagaaggtggagaacaccagatgggactacctgacccaggtggagaaggagtgcaaggagaaggagaagcccagctacgacaccgagaccgaccccagcgagggcctgatgaacgtgctgaagaagatctacgaggacggcgacgacgacatgaagagaaccatcaacaaggcctgggtggagagcagagagaagcaggccaagggcgacaccgagttctag

SEQ ID NO: 12537 - DNA, 480 bp, synthetic construct; identical to SEQ ID NO: 11816
  source 1..480: mol_type = other DNA; note = Synthetic coding sequence

SEQ ID NO: 12538 - DNA, 4599 bp, synthetic construct
  source 1..4599: mol_type = other DNA; note = Synthetic coding sequence
atgcagagagagctggtgtacgccagaggcgacggccccggcgcccccagacccggcagcaccgcccaccccccccacgccatccccaacagcccccccagcacccccgtgccccacagcatgccccccagccccagcagaatcccctacggcggcaccagaagcatggtggtgcccggcaacgccaccatccccagagacagaatcagcagcctgcccgtgagcagacccatcagccccagccccagcgccatcctggagagaagagacgtgaagcccgacgaggacatgagcggcaagaacatcgccatgtacagaaacgagggcttctacgccgacccctacctgtaccacgagggcagaatgagcatcgccagcagccacggcggccaccccctggacgtgcccgaccacatcatcgcctaccacagaaccgccatcagaagcgccagcgcctactgcaaccccagcatgcaggccgagatgcacatggagcagagcctgtacagacagaagagcagaaagtaccccgacagccacctgcccaccctgggcagcaagaccccccccgccagcccccacagagtgagcgacctgagaatgatcgacatgcacgcccactacaacgcccacggccccccccacaccatgcagcccgacagagccagccccagcagacaggccttcaagaaggagcccggcaccctggtgtacatcgagaagcccagaagcgccgccggcctgagcagcctggtggacctgggcccccccctgatggagaagcaggtgttcgcctacagcaccgccaccatccccaaggacagagagaccagcgagaagatgatgaagaccaccgccaacagaaaccacaccgacagcgccggcaccccccacgtgagcggcggcaagatgctgagcgccctggagagcaccgtgccccccagccagcccccccccgtgggcaccagcgccatccacatgagcctgctggagatgagaagaagcgtggccgagctgagactgcagctgcagcagatgagacagctgcagctgcagaaccaggagctgctgagagccatgatgaagaaggccgagctggagatcagcggcaaggtgatggagaccatgaagagactggaggaccccgtgcagagacagagagtgctggtggagcaggagagacagaagtacctgcacgaggaggagaagatcgtgaagaagctgtgcgagctggaggacttcgtggaggacctgaagaaggacagcaccgccgccagcagactggtgaccctgaaggacgtggaggacggcgccttcctgctgagacaggtgggcgaggccgtggccaccctgaagggcgagttccccaccctgcagaacaagatgagagccatcctgagaatcgaggtggaggccgtgagattcctgaaggaggagccccacaagctggacagcctgctgaagagagtgagaagcatgaccgacgtgctgaccatgctgagaagacacgtgaccgacggcctgctgaagggcaccgacgccgcccaggccgcccagtacatggccatggagaaggccaccgccgccgaggtgctgaagagccaggaggaggccgcccacaccagcggccagcccttccacagcaccggcgcccccggcgacgccaagagcgaggtggtgcccctgagcggcatgatggtgagacacgcccagagcagccccgtggtgatccagcccagccagcacagcgtggccctgctgaaccccgcccagaacctgccccacgtggccagcagccccgccgtgccccaggaggccaccagcaccctgcagatgagccaggccccccagagcccccagatccccatgaacggcagcgccatgcagagcctgttcatcgaggagatccacagcgtgagcgccaagaacagagccgtgagcatcgagaaggccgagaagaagtgggaggagaagagacagaacctggaccactacaacggcaaggagttcgagaagctgctggaggaggcccaggccaacatcatgaagagcatccccaacctggagatgccccccgccaccggccccctgcccagaggcgacgcccccgtggacaaggtggagctgagcgaggacagccccaacagcgagcaggacctggagaagctgggcggcaagagcccccccccccccccccccccccccagaagaagctacctgcccggcagcggcctgaccaccaccagaagcggcgacgtggtgtacaccggcagaaaggagaacatcaccgccaaggccagcagcgaggacgccggccccagcccccagaccagagccaccaagtaccccgccgaggagcccgccagcgcctggacccccagccccccccccgtgaccaccagcagcagcaaggacgaggaggaggaggaggaggagggcgacaagatcatggccgagctgcaggccttccagaagtgcagcttcatggacgtgaacagcaacagccacgccgagcccagcagagccgacagccacgtgaaggacaccagaagcggcgccaccgtgccccccaaggagaagaagaacctggagttcttccacgaggacgtgagaaagagcgacgtggagtacgagaacggcccccagatggagttccagaaggtgaccaccggcgccgtgagacccagcgacccccccaagtgggagagaggcatggagaacagcatcagcgacgccagcagaaccagcgagtacaagaccgagatcatcatgaaggagaacagcatcagcaacatgagcctgctgagagacagcagaaactacagccaggagaccgtgcccaaggccagcttcggcttcagcggcatcagccccctggaggacgagatcaacaagggcagcaagatcagcggcctgcagtacagcatccccgacaccgagaaccagaccctgaactacggcaagaccaaggagatggagaagcagaacaccgacaagtgccacgtgagcagccacaccagactgaccgagagcagcgtgcacgacttcaagaccgaggaccaggaggtgatcaccaccgacttcggccaggtggtgctgagacccaaggaggccagacacgccaacgtgaaccccaacgaggacggcgagagcagcagcagcagccccaccgaggagaacgccgccaccgacaacatcgccttcatgatcaccgagaccaccgtgcaggtgctgagcagcggcgaggtgcacgacatcgtgagccagaagggcgaggacatccagaccgtgaacatcgacgccagaaaggagatgacccccagacaggagggcaccgacaacgaggaccccgtggtgtgcctggacaagaagcccgtgatcatcatcttcgacgagcccatggacatcagaagcgcctacaagagactgagcaccatcttcgaggagtgcgacgaggagctggagagaatgatgatggaggagaagatcgaggaggaggaggaggaggagaacggcgacagcgtggtgcagaacaacaacaccagccagatgagccacaagaaggtggcccccggcaacctgagaaccggccagcaggtggagaccaagagccagccccacagcctggccaccgagaccagaaaccccggcggccaggagatgaacagaaccgagctgaacaagttcagccacgtggacagccccaacagcgagtgcaagggcgaggacgccaccgacgaccagttcgagagccccaagaagaagttcaagttcaagttccccaagaagcagctggccgccctgacccaggccatcagaaccggcaccaagaccggcaagaagaccctgcaggtggtggtgtacgaggaggaggaggaggacggcaccctgaagcagcacaaggaggccaagagattcgagatcgccagaagccagcccgaggacacccccaccagcatccccagcgccagcagaaagggcagcagcggcgccccccagaccagcagaatgcccgtgcccatgagcgccaagaacagacccggcaccctggacaagcccggcaagcagagcaagctgcaggaccccagacagtacagacaggccaacggcagcgccaagaagagcggcggcgacttcaagcccaccagccccagcctgcccgccagcaagatccccgccctgagccccagcagcggcaagagcagcagcctgcccagcagcagcggcgacagcagcaacctgcccaacccccccgccaccaagcccagcatcgccagcaaccccctgagcccccagaccggcccccccgcccacagcgccagcctgatccccagcgtgagcaacggcagcctgaagttccagagcctgacccacaccggcaagggccaccacctgagcttcagcccccagagccagaacggcagagcccccccccccctgagcttcagcagcagcccccccagccccgccagcagcgtgagcctgaaccagggcgccaagggcaccagaaccatccacacccccagcctgaccagctacaaggcccagaacggcagcagcagcaaggccacccccagcaccgccaaggagaccagctag

SEQ ID NO: 12539 - DNA, 1566 bp, synthetic construct
  source 1..1566: mol_type = other DNA; note = Synthetic coding sequence
atgaccagcgccttcaagctggacttcctgcccgacatgatggtggagggcagactgctggtgcccgacagaatcaacggcaccgccaacaagatgaacggcgccctggaccacagcgaccagcccgaccccgacgccatcaagatgttcgtgggccagatccccagaagctggagcgagaaggagctgaaggagctgttcgagccctacggcgccgtgtaccagatcaacgtgctgagagacagaagccagaaccccccccagagcaagggctgctgcttcgtgaccttctacaccagaaaggccgccctggaggcccagaacgccctgcacaacatcaagaccctgcccggcatgcaccaccccatccagatgaagcccgccgacagcgagaagagcaacgccgtggaggacagaaagctgttcatcggcatggtgagcaagaagtgcaacgagaacgacatcagagtgatgttcagccccttcggccagatcgaggagtgcagaatcctgagaggccccgacggcctgagcagaggctgcgccttcgtgaccttcagcaccagagccatggcccagaacgccatcaaggccatgcaccagagccagaccatggagggctgcagcagccccatcgtggtgaagttcgccgacacccagaaggacaaggagcagagaagactgcagcagcagctggcccagcagatgcagcagctgaacaccgccacctggggcaacctgaccggcctgggcggcctgaccccccagtacctggccctgctgcagcaggccaccagcagcagcaacctgggcgccttcagcggcatccagcagatggccggcatgaacgccctgcagctgcagaacctggccaccctggccgccgccgccgccgccgcccagaccagcgccaccagcaccaacgccaaccccctgagcaccaccagcagcgccctgggcgccctgaccagccccgtggccgccagcacccccaacagcaccgccggcgccgccatgaacagcctgaccagcctgggcaccctgcagggcctggccggcgccaccgtgggcctgaacaacatcaacgccctggccgtggcccagatgctgagcggcatggccgccctgaacggcggcctgggcgccaccggcctgaccaacggcaccgccggcaccatggacgccctgacccaggcctacagcggcatccagcagtacgccgccgccgccctgcccaccctgtacagccagagcctgctgcagcagcagagcgccgccggcagccagaaggagggccccgagggcgccaacctgttcatctaccacctgccccaggagttcggcgaccaggacatcctgcagatgttcatgcccttcggcaacgtgatcagcgccaaggtgttcatcgacaagcagaccaacctgagcaagtgcttcggcttcgtgagctacgacaaccccgtgagcgcccaggccgccatccaggccatgaacggcttccagatcggcatgaagagactgaaggtgcagctgaagagaagcaagaacgacagcaagccctactag

SEQ ID NO: 12540 - DNA, 315 bp, synthetic construct
  source 1..315: mol_type = other DNA; note = Synthetic coding sequence
atgagcgagcagggcgacctgaaccaggccatcgccgaggagggcggcaccgagcaggagaccgccacccccgagaacggcatcgtgaagagcgagagcctggacgaggaggagaagctggagctgcagagaagactggaggcccagaaccaggagagaagaaagagcaagagcggcgccggcaagggcaagctgaccagaagcctggccgtgtgcgaggagagcagcgccagacccggcggcgagagcctgcaggaccaggagagcatccacctgcagctgagcagcttcagcagcctgcaggaggaggactag

SEQ ID NO: 12541 - DNA, 1653 bp, synthetic construct
  source 1..1653: mol_type = other DNA; note = Synthetic coding sequence
atggagcccccccaggagaccaacagacccttcagcaccctggacaacagaagcggccaggtgcaggtgctgagcgccacccccctgctgcagagaaacccctacagcagccccgacatcatgcacatcaagggcagcgaggccagcagcgtgccctacgccctgaaccagggcaccaccgccctgcccaagaacaagaaccaggagggcaccggccacagactgctgaacatgctgagaaagaccctgaaggagagcgacagcgaggagctggagatcacccaggagacccccaacctggtgcccttcggcgacgtggtgggctgcctgggcatccacatcaagaactgcagacacttcatgcccaagatcagcctgcagcactacgccaacctgttcatcagaatcagcatcaacaaggccgtgaagtgcaccaagatgtgcagcctgctgagcaagaacgacgagaagaacaccgtgatcaagttcgacgaggtgaagtacttcagcgtgcaggtgcccagaagatacgacgacaagagaaacaacatcctgctggagctgatccagtacgacaacagagagaagagagccttcctgctgggcagcgtgcagatccacctgtacgaggtgatccagaagggctgcttcatcgaggaggtgcaggtgctgcacggcaacatcttcgtgtgcagactggaggtggagttcatgttcagctacggcaacttcggctacggcttcagccaccagctgaagcccctgcagaagatcaccgagcccagcatgttcatgaacctggcccccccccccgagagaaccgaccccgtgaccaaggtgatcaccccccagaccgtggagtaccccgccttcctgagccccgacctgaacgtgaccgtgggcacccccgccgtgcagagcagcaaccagcccagcgtggtgagactggagaagctgcagcagcagcccagagagagactggagaagatgaagaaggagtacagaaacctgaacacctggatcgacaaggccaactacctggagagcatcctgatgcccaagctggagcacaaggacagcgaggagaccaacatcgacgaggccagcgagaacaccaagagcaaccaccccgaggaggagctggagaacatcgtgggcgtggacatccccctggtgaacgaggaggccgagaccaccgccaacgagctgctggacaacgacagcgagaagggcctgaccatccccaccctgaaccagagcgaccaggacaacagcaccgccgacgccagcaagaacgacgagagcacccccagccccaccgaggtgcacagcctgtgcaccatcagcaaccaggagaccatcaaggccggcagaatcccccccctgggcgagagacagagcgagagcatgcccgacagaaagatgaagaacgtgttcttccccctggaggtgaagctgaaggacaactaccccagcatcctgaaggccgacagcagcctgagcgaggtgaacctgagaagcatctgcatcaaccccaagagcagaaacctggacagcagccccaccgagatcagctggcagaacaacaacctgaacctggccgagagagagaacaccggcctggtgagcaccagactgaagatcaagagatag

SEQ ID NO: 12542 - DNA, 363 bp, synthetic construct
  source 1..363: mol_type = other DNA; note = Synthetic coding sequence
atgagcatcagcagcgacgaggtgaacttcctggtgtacagatacctgcaggagagcggcttcagccacagcgccttcaccttcggcatcgagagccacatcagccagagcaacatcaacggcgccctggtgccccccgccgccctgatcagcatcatccagaagggcctgcagtacgtggaggccgaggtgagcatcaacgaggacggcaccctgttcgacggcagacccatcgagagcctgagcctgatcgacgccgtgatgcccgacgtggtgcagaccagacagcaggcctacagagacaagctggcccagcagcaggccgccgccgccgccgccgccgccgccgccgccagccagtag

SEQ ID NO: 12543 - DNA, 222 bp, synthetic construct
  source 1..222: mol_type = other DNA; note = Synthetic coding sequence
atgagctactaccagagacccttcagccccagcgcctacagcctgcccgccagcctgaacagcagcatcgtgatgcagcacggcaccagcctggacagcaccgacacctacccccagcacgcccagagcctggacggcaccaccagcagcagcatccccctgtacagaagcagcgaggaggagaagagagtgaccgtgatcaaggccccccactacccctag

SEQ ID NO: 12544 - DNA, 717 bp, synthetic construct
  source 1..717: mol_type = other DNA; note = Synthetic coding sequence
atgaccgaggacagccagagaaacttcagaagcgtgtactacgagaaggtgggcttcagaggcgtggaggagaagaagagcctggagatcctgctgaaggacgacagactgggcatcctgcccccccaccacgagagccacgccaaggtgatgatgtacagaaaggagcagtacctggacgtgctgcacgccctgaaggtggtgagattcgtgagcgacgccaccccccaggccgaggtgtacctgagaatgtaccagctggagagcggcaagctgcccagaagccccagcttccccctggagcccgacgacgaggtgttcctggccatcgccaaggccatggaggagatggtggaggacagcgtggactgctactggatcaccagaagattcgtgaaccagctgaacaccaagtacagagacagcctgccccagctgcccaaggccttcgagcagtacctgaacctggaggacggcagactgctgacccacctgagaatgtgcagcgccgcccccaagctgccctacgacctgtggttcaagagatgcttcgccggctgcctgcccgagagcagcctgcagagagtgtgggacaaggtggtgagcggcagctgcaagatcctggtgttcgtggccgtggagatcctgctgaccttcaagatcaaggtgatggccctgaacagcgccgagaagatcaccaagttcctggagaactag

SEQ ID NO: 12545 - DNA, 1620 bp, synthetic construct; identical to SEQ ID NO: 10018
  source 1..1620: mol_type = other DNA; note = Synthetic coding sequence

SEQ ID NO: 12546 - DNA, 609 bp, synthetic construct
  source 1..609: mol_type = other DNA; note = Synthetic coding sequence
atgggccagaaggtgaccggcggcatcaagaccgtggacatgagagaccccacctacagacccctgaagcaggagctgcagggcctggactactgcaagcccaccagactggacctgctgctggacatgccccccgtgagctacgacgtgcagctgctgcacagctggaacaacaacgacagaagcctgaacgtgttcgtgaaggaggacgacaagctgatcttccacagacaccccgtggcccagagcaccgacgccatcagaggcaaggtgggctacaccagaggcctgcacgtgtggcagatcacctgggccatgagacagagaggcacccacgccgtggtgggcgtggccaccgccgacgcccccctgcacagcgtgggctacaccaccctggtgggcaacaaccacgagagctggggctgggacctgggcagaaacagactgtaccacgacggcaagaaccagcccagcaagacctaccccgccttcctggagcccgacgagaccttcatcgtgcccgacagcttcctggtggccctggacatggacgacggcaccctgagcttcatcgtggacggccagtacatgggcgtggccttcagatag

SEQ ID NO: 12547 - DNA, 174 bp, synthetic construct
  source 1..174: mol_type = other DNA; note = Synthetic coding sequence
aacctgcccatctgcatggccaagacccacctgagcctgagccaccagcccgacaagaagggcgtgcccagagacttcatcctgcccatcagcgacgtgagagccagcatcggcgccggcttcatctaccccctggtgggcaccggcggcagagaggcccccctgtggctgtag

SEQ ID NO: 12548 - DNA, 468 bp, synthetic construct
  source 1..468: mol_type = other DNA; note = Synthetic coding sequence
atgaacaaccagaagcagcagaagcccaccctgagcggccagagattcaagaccagaaagagagacgagaaggagagattcgaccccacccagttccaggactgcatcatccagggcctgaccgagaccggcaccgacctggaggccgtggccaagttcctggacgccagcggcgccaagctggactacagaagatacgccgagaccctgttcgacatcctggtggccggcggcatgctggcccccggcggcaccctggccgacgacatgatgagaaccgacgtgtgcgtgttcgccgcccaggaggacctggagaccatgcaggccttcgcccaggtgttcaacaagctgatcagaagatacaagtacctggagaagggcttcgaggacgaggtgaagaagctgctgctgttcctgaagggcttcagcgagagcgagagaaacaagctggccatgctgaccggctag

SEQ ID NO: 12549 - DNA, 528 bp, synthetic construct
  source 1..528: mol_type = other DNA; note = Synthetic coding sequence
tgattcgacgaccagagaagaatgagcctgcacctgcacggcgccgactgcgaccccaagacccagaacgagatgaacatctgcgaggaggagttcgtggagtacaagaacagagacgccatcagcgccctgatgcccctgttcagcgaggaggagagcagcgacggcagcaagcacaacaacggcctgcccgaccacatcagcgcccagctgcagaacacctacaccctgaaggccttcaccgtgggcagcaagtgcgtggtgtggagcagcctgagaaacacctggagcaagtgcgagatcctggagaccgccgaggagggcaccagagtgctgaacctgagcaacggcatggaggagatcgtgaaccccgagaacgtgtggaacggcatccccaagctggacaagagcccccccgaggccgtgagccagagagtgggcaaggacctgtacttcatgagcgtgggcgacaccaccatcaaggagaagggcttcggcggcgacggcgacctgaccgtggacctgtag

SEQ ID NO: 12550 - DNA, 2814 bp, synthetic construct
  source 1..2814: mol_type = other DNA; note = Synthetic coding sequence
tgactgagaagccagcccggctgcggctgcctgtggcaggaggcccccacccacagcaccggccccagcgtggagggcgaggcccccagcagcgagaccggcaccagcctggacagccccagcgcctacccccagggccccctggtgcccggcagcagcctgagccccgaccactacgagcacaccagcgtgggcgcctacggcctgtacagcggcccccccggccagcagcagagaaccagaagacccaagctgcagcacagcaccagcatcctgagaaagcaggccgaggaggaggccatcaagagaagcagaagcctgagcgagagctacgagctgagcagcgacctgcaggacaagcaggtggagatgctggagagaaagtacggcggcagactggtgaccagacacgccgccagaaccatccagaccgccttcagacagtaccagatgaacaagaacttcgagagactgagaagcagcatgagcgagaacagaatgagcagaagaatcgtgctgagcaacatgagaatgcagttcagcttcgagggccccgagaaggtgcacagcagctacttcgagggcaagcaggtgagcgtgaccaacgacggcagccagctgggcgccctggtgagccccgagtgcggcgacctgagcgagcccaccaccctgaagagccccgcccccagcagcgacttcgccgacgccatcaccgagctggaggacgccttcagcagacaggtgaagagcctggccgagagcatcgacgacgccctgaactgcagaagcctgcacaccgaggaggcccccgccctggacgccgccagagccagagacaccgagccccagaccgccctgcacggcatggaccacagaaagctggacgagatgaccgccagctacagcgacgtgaccctgtacatcgacgaggaggagctgagcccccccctgcccctgagccaggccggcgacagacccagcagcaccgagagcgacctgagactgagagccggcggcgccgcccccgactactgggccctggcccacaaggaggacaaggccgacaccgacaccagctgcagaagcacccccagcctggagagacaggagcagagactgagagtggagcacctgcccctgctgaccatcgagccccccagcgacagcagcgtggacctgagcgacagaagcgagagaggcagcctgaagagacagagcgcctacgagagaagcctgggcggccagcagggcagccccaagcacggcccccacagcggcgcccccaagagcctgcccagagaggagcccgagctgagacccagaccccccagacccctggacagccacctggccatcaacggcagcgccaacagacagagcaagagcgagagcgactacagcgacggcgacaacgacagcatcaacagcaccagcaacagcaacgacaccatcaactgcagcagcgagagcagcagcagagacagcctgagagagcagaccctgagcaagcagacctaccacaaggaggccagaaacagctgggacagccccgccttcagcaacgacgtgatcagaaagagacactacagaatcggcctgaacctgttcaacaagaagcccgagaagggcgtgcagtacctgatcgagagaggcttcgtgcccgacacccccgtgggcgtggcccacttcctgctgcagagaaagggcctgagcagacagatgatcggcgagttcctgggcaacagacagaagcagttcaacagagacgtgctggactgcgtggtggacgagatggacttcagcaccatggagctggacgaggccctgagaaagttccaggcccacatcagagtgcagggcgaggcccagaaggtggagagactgatcgaggccttcagccagagatactgcatctgcaaccccggcgtggtgagacagttcagaaaccccgacaccatcttcatcctggccttcgccatcatcctgctgaacaccgacatgtacagccccaacgtgaagcccgagagaaagatgaagctggaggacttcatcaagaacctgagaggcgtggacgacggcgaggacatccccagagagatgctgatgggcatctacgagagaatcagaaagagagagctgaagaccaacgaggaccacgtgagccaggtgcagaaggtggagaagctgatcgtgggcaagaagcccatcggcagcctgcaccccggcctgggctgcgtgctgagcctgccccacagaagactggtgtgctactgcagactgttcgaggtgcccgaccccaacaagccccagaagctgggcctgcaccagagagagatcttcctgttcaacgacctgctggtggtgaccaagatcttccagaagaagaagaacagcgtgacctacagcttcagacagagcttcagcctgtacggcatgcaggtgctgctgttcgagaaccagtactaccccaacggcatcagactgaccagcagcgtgcccggcgccgacatcaaggtgctgatcaacttcaacgcccccaacccccaggacagaaagaagttcaccgacgacctgagagagagcatcgccgaggtgcaggagatggagaagcacagaatcgagagcgagctggagaagcagaagggcgtggtgagacccagcatgagccagtgcagcagcctgaagaaggagagcggcaacggcaccctgagcagagcctgcctggacgacagctacgccagcggcgagggcctgaagagaagcgccctgagcagcagcctgagagacctgagcgaggccggcgtgcaccactag

SEQ ID NO: 12551 - DNA, 198 bp, synthetic construct
  source 1..198: mol_type = other DNA; note = Synthetic coding sequence
atggtggaggccgccgacagagagaaggtggagctgctgaaccagctggaggaggagaagagaaaggtggaggacctgcagttcagagtggaggaggagagcatcaccaagggcgacctggagcagaagagccagatcagcgaggaccccgagaacgtggccaccgtgagcgagaagagcagaatcatggagctgtag

SEQ ID NO: 12552 - DNA, 630 bp, synthetic construct
  source 1..630: mol_type = other DNA; note = Synthetic coding sequence
atggacttcctgctgggcaaccccttcagcagccccgtgggccagagaatcgagaaggccaccgacggcagcctgcagagcgaggactgggccctgaacatggagatctgcgacatcatcaacgagaccgaggagggccccaaggacgccctgagagccgtgaagaagagaatcgtgggcaacaagaacttccacgaggtgatgctggccctgaccgtgctggagacctgcgtgaagaactgcggccacagattccacgtgctggtggccagccaggacttcgtggagagcgtgctggtgagaaccatcctgcccaagaacaacccccccaccatcgtgcacgacaaggtgctgaacctgatccagagctgggccgacgccttcagaagcagccccgacctgaccggcgtggtgaccatctacgaggacctgagaagaaagggcctggagttccccatgaccgacctggacatgctgagccccatccacacccccagaggcccctgcagcacccagagacacaaccaggacagaatcctgtgggccctgacccccgccagcaagagaaccctggccagcatgctgcccctgtgcccccccagaccctacagccccgtgaccagaccctag

SEQ ID NO: 12553 - DNA, 255 bp, synthetic construct
  source 1..255: mol_type = other DNA; note = Synthetic coding sequence
atggccgacaccgacctgttcatggagtgcgaggaggaggagctggagccctggcagaagatcagcgacgtgatcgaggacagcgtggtggaggactacaacagcgtggacaagaccaccaccgccggcaaccccctggtgcagcagggcggccagcccctgatcctgacccagaaccccgcccccggcctgggcaccatggtgacccagcccgtgctgagacccgtgcaggtgatgcagaacgccaaccactag

SEQ ID NO: 12554 - DNA, 618 bp, synthetic construct
  source 1..618: mol_type = other DNA; note = Synthetic coding sequence
atggccacccccctgggctggagcaaggccggcagcggcagcgtgtgcctggccctggaccagctgagagacgtgatcgagagccaggaggagctgatccaccagctgagaaacgtgatggtgctgcaggacgagaacttcgtgagcaaggaggagttccaggccgtggagaagaagctggtggaggagaaggccgcccacgccaagaccaaggtgctgctggccaaggaggaggagaagctgcagttcgccctgggcgaggtggaggtgctgagcaagcagctggagaaggagaagctggccttcgagaaggccctgagcagcgtgaagagcaaggtgctgcaggagagcagcaagaaggaccagctgatcaccaagtgcaacgagatcgagagccacatcatcaagcaggaggacatcctgaacggcaaggagaacgagatcaaggagctgcagcaggtgatcagccagcagaagcagatcttcagaaaccacatgagcgacttcagaatccagaagcagcaggagagctacatggcccaggtgctggaccagaagcacaagaaggccagcggcaccagacaggccagaagccaccagcaccccagagagaagtag

SEQ ID NO: 12555 - DNA, 330 bp, synthetic construct
  source 1..330: mol_type = other DNA; note = Synthetic coding sequence
atggagcccagcgcccagcagctgcagctggccgccagcctgcccgccaacctgagcaacttctgccagggcagcgagatgcccaccaccagcagacccgccctggacgtgaagggcggcaccagccccgccaaggaggacgccaaccaggagatgagcagcgtggcctacagcaacctggccgtgaaggacagaaaggccgtggccatcctgcactaccccggcgtggccagcaacggcaccaaggccagcggcgcccccaccagcagcagcggcagccccatcggcagccccaccaccaccccccccaccaagccccccagcttctag

SEQ ID NO: 12556 - DNA, 1737 bp, synthetic construct
  source 1..1737: mol_type = other DNA; note = Synthetic coding sequence
atgcccgagatcagagtgacccccctgggcgccggccaggacgtgggcagaagctgcatcctggtgagcatcgccggcaagaacgtgatgctggactgcggcatgcacatgggcttcaacgacgacagaagattccccgacttcagctacatcacccagaacggcagactgaccgacttcctggactgcgtgatcatcagccacttccacctggaccactgcggcgccctgccctacttcagcgagatggtgggctacgacggccccatctacatgacccaccccacccaggccatctgccccatcctgctggaggactacagaaagatcgccgtggacaagaagggcgaggccaacttcttcaccagccagatgatcaaggactgcatgaagaaggtggtggccgtgcacctgcaccagaccgtgcagatcaaggtgggcagcgagagcgtggtgtacaccggcgactacaacatgacccccgacagacacctgggcgccgcctggatcgacaagtgcagacccaacctgctgatcaccgagagcacctacgccaccaccatcagagacagcaagagatgcagagagagagacttcctgaagaaggtgcacgagaccgtggagagaggcggcaaggtgctgatccccgtgttcgccctgggcagagcccaggagctgtgcatcctgctggagaccttctgggagagaatgaacctgaaggtgcccatctacttcagcaccggcctgaccgagaaggccaaccactactacaagctgttcatcccctggaccaaccagaagatcagaaagaccttcgtgcagagaaacatgttcgagttcaagcacatcaaggccttcgacagagccttcgccgacaaccccggccccatggtggtgttcgccacccccggcatgctgcacgccggccagagcctgcagatcttcagaaagtgggccggcaacgagaagaacatggtgatcatgcccggctactgcgtgcagggcaccgtgggccacaagatcctgagcggccagagaaagctggagatggagggcagacaggtgctggaggtgaagatgcaggtggagtacatgagcttcagcgcccacgccgacgccaagggcatcatgcagctggtgggccaggccgagcccgagagcgtgctgctggtgcacggcgaggccaagaagatggagttcctgaagcagaagatcgagcaggagctgagagtgaactgctacatgcccgccaacggcgagaccgtgaccctgcccaccagccccagcatccccgtgggcatcagcctgggcctgctgaagagagagatggcccagggcctgctgcccgaggccaagaagcccagactgctgcacggcaccctgatcatgaaggacagcaacttcagactggtgagcagcgagcaggccctgaaggagctgggcctggccgagcaccagctgagattcacctgcagagtgcacctgcacgacaccagaaaggagcaggagaccgccctgagagtgtacagccacctgaagagcgtgctgaaggaccactgcgtgcagcacctgcccgacggcagcgtgaccgtggagagcgtgctgctgcaggccgccgcccccagcgaggaccccggcaccaaggtgctgctggtgagctggacctaccaggacgaggagctgggcagcttcctgaccagcctgctgaagaagggcctgccccaggcccccagctag

SEQ ID NO: 12557 - DNA, 570 bp, synthetic construct
  source 1..570: mol_type = other DNA; note = Synthetic coding sequence
atgcagcccatgagcttcggctgggaccacagcctgcacaagagaaagagactgccccccgtgaagagaagcctggtgtactacctgaagaacagagaggtgagactgcagaacgagaccagctacagcagagtgctgcacggctacgccgcccagcagctgcccagcctgctgaaggagagagagttccacctgggcaccctgaacaaggtgttcgccagccagtggctgaaccacagacaggtggtgtgcggcaccaagtgcaacaccctgttcgtggtggacgtgcagaccagccagatcaccaagatccccatcctgaaggacagagagcccggcggcgtgacccagcagggctgcggcatccacgccatcgagctgaaccccagcagaaccctgctggccaccggcggcgacaaccccaacagcctggccatctacagactgcccaccctggaccccgtgtgcgtgggcgacgacggccacaaggactggatcttcagcatcgcctggatcagcgacaccatggccgtgagcggcagcagagacggcagcatgggcctgtggtag

SEQ ID NO: 12558 - DNA, 2289 bp, synthetic construct; identical to SEQ ID NO: 11859
  source 1..2289: mol_type = other DNA; note = Synthetic coding sequence

SEQ ID NO: 12559 - DNA, 1362 bp, synthetic construct
  source 1..1362: mol_type = other DNA; note = Synthetic coding sequence
atggccggcgccgccggcagagtgcaggacagagccctgagaagattccccatcaccctgcccgtgggcgacctgagcaacctgcacctgaaggaggagaagatcaagcccgacaccaacggcgccgtggtgaagaccaacgccaacgccgagaagaccgacgaggaggagaaggaggacagagccgcccagagcctgctgaacaagctgatcagaagcaacctggtggacaacaccaaccaggtggaggtgctgcagagagaccccaacagccccctgtacagcgtgaagagcttcgaggagctgagactgccccagaacctgatcgcccagagccagagcggcaccggcaagaccgccgccttcgtgctggccatgctgagccaggtggagcccgccaacaagtacccccagtgcctgtgcctgagccccacctacgagctggccctgcagaccggcaaggtgatcgagcagatgggcaagttctaccccgagctgaagctggcctacgccgtgagaggcaacaagctggagagaggccagaagatcagcgagcagatcgtgatcggcacccccggcaccgtgctggactggtgcagcaagctgaagttcatcgaccccaagaagatcaaggtgttcgtgctggacgaggccgacgtgatgatcgccacccagggccaccaggaccagagcatcagaatccagagaatgctgcccagaaactgccagatgctgctgttcagcgccaccttcgaggacagcgtgtggaagttcgcccagaaggtggtgcccgaccccaacgtgatcaagctgaagagagaggaggagaccctggacaccatcaagcagtactacgtgctgtgcagcagcagagacgagaagttccaggccctgtgcaacctgtacggcgccatcaccatcgcccaggccatgatcttctgccacaccagaaagaccgccagctggctggccgccgagctgagcaaggagggccaccaggtggccctgctgagcggcgagatgatggtggagcagagagccgccgtgatcgagagattcagagagggcaaggagaaggtgctggtgaccaccaacgtgtgcgccagaggcatcgacgtggagcaggtgagcgtggtgatcaacttcgacctgcccgtggacaaggacggcaaccccgacaacgagacctacctgcacagaatcggcagaaccggcagattcggcaagagaggcctggccgtgaacatggtggacagcaagcacagcatgaacatcctgaacagaatccaggagcacttcaacaagaagatcgagagactggacaccgacgacctggacgagatcgagaagatcgccaactag

SEQ ID NO: 12560 - DNA, 921 bp, synthetic construct
  source 1..921: mol_type = other DNA; note = Synthetic coding sequence
atggccagagtgcccctgggcagaagcctgaccctgagccccagactggagcacaacggcatgaccagcgcccaccacaacttcagactgcccggcagcagagacagccccgccagcgccagccaggtggccgagatcatcgacctggagtggtacgagaagagcgaggagacccacgccagccagatcgagctgctggagaccagcagcacccaggagcccctgaacgccagcgaggccttctgccccagagactgcatggtgcccgtggtgttccccggccccgtgagccaggagggctgctgccagttcacctgcgagctgctgaagcacatcatgtaccagagacagcagctgcccctgccctacgagcagctgaagcacttctacagaaagcccagcccccaggccgaggagatgctgaagaagaagcccagagccaccaccgaggtgagcagcagaaagtgccagcaggccctggccgagctggagagcgtgctgagccacctggaggacttcttcgccagaaccctggtgcccagagtgctgatcctgctgggcggcaacgccctgagccccaaggagttctacgagctggacctgagcctgctggccccctacagcgtggaccagagcctgagcaccgccgcctgcctgagaagactgttcagagccatcttcatggccgacgccttcagcgagctgcaggccccccccctgatgggcaccgtggtgatggcccagggccacagaaactgcggcgaggactggttcagacccaagctgaactacagagtgcccagcagaggccacaagctgaccgtgaccctgagctgcggcagacccagcatcagaaccaccgcctgggaggactacatctggttccaggcccccgtgaccttcaagggcttcagagagtag

SEQ ID NO: 12561 - DNA, 426 bp, synthetic construct
  source 1..426: mol_type = other DNA; note = Synthetic coding sequence
atgccccagctgctgcagaacatcaacggcatcatcgaggccttcagaagatacgccagaaccgagggcaactgcaccgccctgaccagaggcgagctgaagagactgctggagcaggagttcgccgacgtgatcgtgaagccccacgaccccgccaccgtggacgaggtgctgagactgctggacgaggaccacaccggcaccgtggagttcaaggagttcctggtgctggtgttcaaggtggcccaggcctgcttcaagaccctgagcgagagcgccgagggcgcctgcggcagccaggagagcggcagcctgcacagcggcgccagccaggagctgggcttcagacccagagtgagacccctggccctgagaggcagcgccgccatgaccggcaagctgagccccagagccagaaaggagtag

SEQ ID NO: 12562 - DNA, 480 bp, synthetic construct; identical to SEQ ID NO: 11816
  source 1..480: mol_type = other DNA; note = Synthetic coding sequence

SEQ ID NO: 12563 - DNA, 1506 bp, synthetic construct
  source 1..1506: mol_type = other DNA; note = Synthetic coding sequence
atggacttcctgctgggcaaccccttcagcagccccgtgggccagagaatcgagaaggccaccgacggcagcctgcagagcgaggactgggccctgaacatggagatctgcgacatcatcaacgagaccgaggagggccccaaggacgccctgagagccgtgaagaagagaatcgtgggcaacaagaacttccacgaggtgatgctggcccacagcgccagaagacacctgagcgccctgcaggtgctggagacctgcgtgaagaactgcggccacagattccacgtgctggtggccagccaggacttcgtggagagcgtgctggtgagaaccatcctgcccaagaacaacccccccaccatcgtgcacgacaaggtgctgaacctgatccagagctgggccgacgccttcagaagcagccccgacctgaccggcgtggtgaccatctacgaggacctgagaagaaagggcctggagttccccatgaccgacctggacatgctgagccccatccacaccccccagagaaccgtgttcaacagcgagacccagagcggccaggacagcgtgggcaccgacagcagccagcaggaggacagcggccagcacgccgcccccctgcccgccccccccatcctgagcggcgacacccccatcgcccccacccccgagcagatcggcaagctgagaagcgagctggagatggtgagcggcaacgtgagagtgatgagcgagatgctgaccgagctggtgcccacccaggccgagcccgccgacctggagctgctgcaggagctgaacagaacctgcagagccatgcagcagagagtgctggagctgatcccccagatcgccaacgagcagctgaccgaggagctgctgatcgtgaacgacaacctgaacaacgtgttcctgagacacgagagattcgagagattcagaaccggccagaccaccaaggcccccagcgaggccgagcccgccgccgacctgatcgacatgggccccgaccccgccgccaccggcaacctgagcagccagctggccggcatgaacctgggcagcagcagcgtgagagccggcctgcagagcctggaggccagcggcagactggaggacgagttcgacatgttcgccctgaccagaggcagcagcctggccgaccagagaaaggaggtgaagtacgaggccccccaggccaccgacggcctggccggcgccctggacgccagacagcagagcaccggcgccatccccgtgacccaggcctgcctgatggaggacatcgagcagtggctgagcaccgacgtgggcaacgacgccgaggagcccaagggcgtgaccagcgaggagttcgacaagttcctggaggagagagccaaggccgccgacagactgcccaacctgagcagccccagcgccgagggcccccccggcccccccagcggccccgcccccagaaagaagacccaggagaaggacgacgacatgctgttcgccctgtag

SEQ ID NO: 12564 - DNA, 117 bp, synthetic construct
  source 1..117: mol_type = other DNA; note = Synthetic coding sequence
gagcccgtgtacttcgccgagaaggtgatgagcctgggcagaaactggcacagaccctgcctgagatgccagagatgccacaagaccctgaccgccggcagccacgccgaggtgtag

SEQ ID NO: 12565 - DNA, 1122 bp, synthetic construct; identical to SEQ ID NO: 10359
  source 1..1122: mol_type = other DNA; note = Synthetic coding sequence

SEQ ID NO: 12566 - DNA, 453 bp, synthetic construct
  source 1..453: mol_type = other DNA; note = Synthetic coding sequence
atgcacaccggcgaccccaagcaggacctggcctacgagagacagtacgagcagcagacctaccaggtgatccccgaggtgatcaagaacttcatccagtacttccacaagaccgtgagcgacctgatcgaccagaaggtgtacgagctgcaggccagcagagtgagcagcgacgtgatcgaccagaaggtgtacgagatccaggacatctacgagaacagctggaccaagctgaccgagagattcttcaagaacaccccctggcccgaggccgaggccatcgccccccaggtgggcaacgacgccgtgttcctgatcctgtacaaggagctgtactacagacacatctacgccaaggtgagcggcggccccagcctggagcagagattcgagagctactacaactactgcaacctgttcaactacatcctgaacgccgacggccccgcctag

SEQ ID NO: 12567 - DNA, 2136 bp, synthetic construct
  source 1..2136: mol_type = other DNA; note = Synthetic coding sequence
atggccatgcaggagaagtaccccaccgagggcatcagccacgtgaccagccccaacttctgcagcagcagcggcagcccccccttccagcccatcaagagccacgtgaccatccccaccgcccacgtgatgcccagcaccctgggcaccagccccgccaagcccaacagcacccccgtgggccccagcagcagcaagctgcccctgagcggcctggccgagagcgtgggcatgaccagaaacggcgacctgggcgccatgaagcacagccccggcctgagcagagacctgatgtacttcagcggcgccaccggcgagaacggcatcgagcagagctggttccccgccgtgggccacgagagacaggaggaggccagaaagttcgacatccccagcatggagagcaccctgaaccagagcgccatgatggagaccctgtacagcgacccccaccacagagtgagattccacaaccccagaaccagcaccagcaaggagctgtacagagtgctgcccgaggccaagaaggcccccggcagcggcgccgtgttcgagagaaacggcccccacagcaacagcagcggcgtgctgcccctgggcctgcagcccgcccccggcctgagcaagcccctgcccagccaggtgtggcagcccagccccgacacctggcaccccagagagcagagctgcgagctgagcacctgcagacagcagctggagctgatcagactgcagatggagcagatgcagctgcagaacggcgccatctgccaccaccccgccgccttcggccccagcctgcccatcctggagcccgcccagtggatcagcatcctgaacagcaacgagcacctgctgaaggagaaggagctgctgatcgacaagcagagaaagcacatcagccagctggagcagaaggtgagagagagcgagctgcaggtgcacagcgccctgctgggcagacccgcccccttcggcgacgtgtgcctgctgagactgcaggagctgcagagagagaacaccttcctgagagcccagttcgcccagaagaccgaggccctgagcagagagaagatcgacctggagaagaagctgagcgccagcgaggtggaggtgcagctgatcagagagagcctgaaggtggccctgcagaagcacagcgaggaggtgaagaagcaggaggagagagtgaagggcagagacaagcacatcaacaacctgaagaagaagtgccagaaggagagcgagcagaacagagagaagcagcagagaatcgagaccctggagagatacctggccgacctgcccaccctggaggaccaccagaagcagagccagcagctgaaggacagcgagctgaagagcaccgagctgcaggagaaggtgaccgagctggagagcctgctggaggagacccaggccatctgcagagagaaggagatccagctggagagcctgagacagagagaggccgagttcagcagcgccggccacagcctgcaggacaagcagagcgtggaggagaccagcggcgagggccccgaggtggagatggagagctggcagaagagatacgacagcctgcagaagatcgtggagaagcagcagcagaagatggaccagctgagaagccaggtgcagagcctggagcaggaggtggcccaggaggagggcaccagccaggccctgagagaggaggcccagagaagagacagcgccctgcagcagctgagaaccgccgtgaaggagctgagcgtgcagaaccaggacctgatcgagaagaacctgaccctgcaggagcacctgagacaggcccagcccggcagcccccccagccccgacaccgcccagctggccctggagctgcaccaggagctggccagctgcctgcaggacctgcaggccgtgtgcagcatcgtgacccagagagcccagggccacgaccccaacctgagcctgctgctgggcatccacagcgcccagcaccccgagacccagctggacctgcagaagcccgacgtgatcaagagaaagctggaggaggtgcagcagctgagaagagacatcgaggacctgagaaccaccatgagcgacagatacgcccaggacatgggcgagaactgcgtgacccagtag

SEQ ID NO: 12568 - DNA, 531 bp, synthetic construct
  source 1..531: mol_type = other DNA; note = Synthetic coding sequence
atggccgccgccaccggcgaccccggcctgagcaagctgcagttcgcccccttcagcagcgccctggacgtgggcttctggcacgagctgacccagaagaagctgaacgagtacagactggacgaggcccccaaggacatcaagggctactactacaacggcgacagcgccggcctgcccgccagactgaccctggagttcagcgccttcgacatgagcgcccccacccccgccagatgctgccccgccatcggcaccctgtacaacaccaacaccctggagagcttcaagaccgccgacaagaagctgctgctggagcaggccgccaacgagatctgggagagcatcaagagcggcaccgccctggagaaccccgtgctgctgaacaagttcctgctgctgaccttcgccgacctgaagaagtaccacttctactactggttctgctaccccgccctgtgcctgcccgagagcctgcccctgatccagggccccgtgggcctggaccagagattcagcctgaagcagtag

SEQ ID NO: 12569 - DNA, 1443 bp, synthetic construct
  source 1..1443: mol_type = other DNA; note = Synthetic coding sequence
atgaagctgaaggagctggagagacccgccgtgcaggcctggagccccgccagccagtaccccctgtacctggccaccggcaccagcgcccagcagctggacagcagcttcagcaccaacggcaccctggagatcttcgaggtggacttcagagaccccagcctggacctgaagcacagaggcgtgctgagcgccctgagcagattccacaagctggtgtggggcagcttcggcagcggcctgctggagagcagcggcgtgatcgtgggcggcggcgacaacggcatgctgatcctgtacaacgtgacccacatcctgagcagcggcaaggagcccgtgatcgcccagaagcagaagcacaccggcgccgtgagagccctggacctgaaccccttccagggcaacctgctggccagcggcgccagcgacagcgagatcttcatctgggacctgaacaacctgaacgtgcccatgaccctgggcagcaagagccagcagccccccgaggacatcaaggccctgagctggaacagacaggcccagcacatcctgagcagcgcccaccccagcggcaaggccgtggtgtgggacctgagaaagaacgagcccatcatcaaggtgagcgaccacagcaacagaatgcactgcagcggcctggcctggcaccccgacatcgccacccagctggtgctgtgcagcgaggacgacagactgcccgtgatccagctgtgggacctgagattcgccagcagccccctgaaggtgctggagagccacagcagaggcatcctgagcgtgagctggagccaggccgacgccgagctgctgctgaccagcgccaaggacagccagatcctgtgcagaaacctgggcagcagcgaggtggtgtacaagctgcccacccagagcagctggtgcttcgacgtgcagtggtgccccagagaccccagcgtgttcagcgccgccagcttcaacggctggatcagcctgtacagcgtgatgggcagaagctgggaggtgcagcacatgagacaggccgacaagatcagcagcagcttcagcaagggccagcccctgccccccctgcaggtgcccgagcaggtggcccaggcccccctgatcccccccctgaagaagccccccaagtggatcagaagacccaccggcgtgagcttcgccttcggcggcaagctggtgaccttcggcctgcccagcacccccgcccacctggtgccccagccctgccccagactggtgttcatcagccaggtgaccaccgagagcgagttcctgatgagaagcgccgagctgcaggaggccctgggcagcggcaacctgctgaactactgccagaacaagagccagcaggccctgctgcagagcgagaagatgctgtggcagttcctgaagcccgccagagacagcagcggcgccagaagatag

SEQ ID NO: 12570 - DNA, 1842 bp, synthetic construct; identical to SEQ ID NO: 9548
  source 1..1842: mol_type = other DNA; note = Synthetic coding sequence

SEQ ID NO: 12571 - DNA, 1446 bp, synthetic construct; identical to SEQ ID NO: 12062
  source 1..1446: mol_type = other DNA; note = Synthetic coding sequence

SEQ ID NO: 12572 - DNA, 537 bp, synthetic construct
  source 1..537: mol_type = other DNA; note = Synthetic coding sequence
atgagcagcaacgagtgcttcaagtgcggcagaagcggccactgggccagagagtgccccaccggcggcggcagaggcagaggcatgagaagcagaggcagaggcggcttcaccagcgacagaggcttccagttcgtgagcagcagcctgcccgacatctgctacagatgcggcgagagcggccacctggccaaggactgcgacctgcaggaggacgaggcctgctacaactgcggcagaggcggccacatcgccaaggactgcaaggagcccaagagagagagagagcagtgctgctacaactgcggcaagcccggccacctggccagagactgcgaccacgccgacgagcagaagtgctacagctgcggcgagttcggccacatccagaaggactgcaccaaggtgaagtgctacagatgcggcgagaccggccacgtggccatcaactgcagcaagaccagcgaggtgaactgctacagatgcggcgagagcggccacctggccagagagtgcaccatcgaggccaccgcctag

SEQ ID NO: 12573 - DNA, 87 bp, synthetic construct
  source 1..87: mol_type = other DNA; note = Synthetic coding sequence
atggccatggcccccagccccagcctggtgcaggtgtacaccagccccgccgccgtggccgtgtgggagtggcaggacggcctgtag

SEQ ID NO: 12574 - DNA, 603 bp, synthetic construct
  source 1..603: mol_type = other DNA; note = Synthetic coding sequence
atggccgccaccgccagagaggacggcgccagcggccaggagagaggccagagaggctgcgagcactacgacagaggctgcctgctgaaggccccctgctgcgacaagctgtacacctgcagactgtgccacgacaacaacgaggaccaccagctggacagattcaaggtgaaggaggtgcagtgcatcaactgcgagaagatccagcacgcccagcagacctgcgaggagtgcagcaccctgttcggcgagtactactgcgacatctgccacctgttcgacaaggacaagaagcagtaccactgcgagaactgcggcatctgcagaatcggccccaaggaggacttcttccactgcctgaagtgcaacctgtgcctggccatgaacctgcagggcagacacaagtgcatcgagaacgtgagcagacagaactgccccatctgcctggaggacatccacaccagcagagtggtggcccacgtgctgccctgcggccacctgctgcacagaacctgctacgaggagatgctgaaggagctgcagatgagcatcatgtacgccctgtgcttcagatacgaccaggtgctggagaccgccggctag

SEQ ID NO: 12575 - DNA, 567 bp, synthetic construct
  source 1..567: mol_type = other DNA; note = Synthetic coding sequence
atggccacccccctgggctggagcaaggccggcagcggcagcgtgtgcctggccctggaccagctgagagacgtgatcgagagccaggaggagctgatccaccagctgagaaacgtgatggtgctgcaggacgagaacttcgtgagcaaggaggagttccaggccgtggagaagaagctggtggaggagaaggccgcccacgccaagaccaaggtgctgctggccaaggaggaggagaagctgcagttcgccctgggcgaggtggaggtgctgagcaagcagctggagaaggagaagctggccttcgagaaggccctgagcagcgtgaagagcaaggtgctgcaggagagcagcaagaaggaccagctgatcaccaagtgcaacggcagaagagaggccagagccctgcaccacggctacatcaacggcctgttccccaaccaccccgtgcccgtgagcaaggccggcttccacagcaacacctgcccccagctgagaatccaggccggccccggcggcccccacctgagaaagggcctgaagggccccggcagacccagaaagtag

SEQ ID NO: 12576 - DNA, 381 bp, synthetic construct
  source 1..381: mol_type = other DNA; note = Synthetic coding sequence
atggacagaagcaagagaaacagcatcgccggcttcccccccagagtggagagactggaggagttcgagggcggcggcggcggcgagggcaacgtgagccaggtgggcagagtgtggcccagcagctacagagccctgatcagcgccttcagcagactgaccagactggacgacttcacctgcgagaagatcggcagcggcttcttcagcgaggtgttcaaggtgagacacagagccagcggccaggtgatggccctgaagatgaacaccctgagcagcaacagagccaacatgctgaaggaggtgcagctgatgaacagactgagccaccccaacatcctgagatgcagaagcatgaaccagaacttcagccccaactag

SEQ ID NO: 12577 - DNA, 1443 bp, synthetic construct
  source 1..1443: mol_type = other DNA; note = Synthetic coding sequence
atggagaccgacctgaacagccaggacagaaaggacctggacaagttcatcaagttcttcgccctgaagaccgtgcaggtgatcgtgcaggccagactgggcgagaagatctgcaccagaagcagcagcagccccaccggcagcgactggttcaacctggccatcaaggacatccccgaggtgacccacgaggccaagaaggccctggccggccagctgcccgccgtgggcagaagcatgtgcgtggagatcagcctgaagaccagcgagggcgacagcatggagctggagatctggtgcctggagatgaacgagaagtgcgacaaggagatcaaggtgagctacaccgtgtacaacagactgagcctgctgctgaagagcctgctggccatcaccagagtgacccccgcctacagactgagcagaaagcagggccacgagtacgtgatcctgtacagaatctacttcggcgaggtgcagctgagcggcctgggcgagggcttccagaccgtgagagtgggcaccgtgggcacccccgtgggcaccatcaccctgagctgcgcctacagaatcaacctggccttcatgagcaccagacagttcgagagaaccccccccatcatgggcatcatcatcgaccacttcgtggacagaccctaccccagcagcagccccatgcacccctgcaactacagaaccgccggcgaggacaccggcgtgatctaccccagcgtggaggacagccaggaggtgtgcaccaccagcttcagcaccagcccccccagccagctgatggtgcccggcaaggagggcggcgtgcccctggcccccaaccagcccgtgcacggcacccaggccgaccaggagagactggccacctgcacccccagcgacagaacccactgcgccgccacccccagcagcagcgaggacaccgagaccgtgagcaacagcagcgagggcagagccagcccccacgacgtgctggagaccatcttcgtgagaaaggtgggcgccttcgtgaacaagcccatcaaccaggtgaccctgaccagcctggacatccccttcgccatgttcgcccccaagaacctggagctggaggacaccgaccccatggtgaacccccccgacagccccgagaccgagagccccctgcagggcagcctgcacagcgacggcagcagcggcggcagcagcggcaacacccacgacgacttcgtgatgatcgacttcaagcccgccttcagcaaggacgacatcctgcccatggacctgggcaccttctacagagagttccagaaccccccccagctgagcagcctgagcatcgacatcggcgcccagagcatggccgaggacctggacagcctgcccgagaagctggccgtgcacgagaagaacgtgagagagttcgacgccttcgtggagaccctgcagtag

SEQ ID NO: 12578 - DNA, 390 bp, synthetic construct; identical to SEQ ID NO: 10956
  source 1..390: mol_type = other DNA; note = Synthetic coding sequence

SEQ ID NO: 12579 - DNA, 348 bp, synthetic construct
  source 1..348: mol_type = other DNA; note = Synthetic coding sequence
atggtggaggacgagctggccctgttcgacaagagcatcaacgagttctggaacaagttcaagagcaccgacaccagctgccagatggccggcctgagagacacctacaaggacagcatcaaggccttcgccgagaagctgagcgtgaagctgaaggaggaggagagaatggtggagatgttcctggagtaccagaaccagatcagcagacagaacaagctgatccaggagaagaaggacaacctgctgaagctgatcgccgaggtgaagggcaagaagcaggagctggaggtgctgaccgccaacatccaggacctgaaggaggagtacagcagaaagaaggagtag

SEQ ID NO: 12580 - DNA, 402 bp, synthetic construct
  source 1..402: mol_type = other DNA; note = Synthetic coding sequence
atggccagcagcgccagagagcacctgctgttcgtgagaagaagaaacccccagatgagatacaccctgagccccgagaacctgcagagcctggccgcccagagcagcatgcccgagaacatgaccctgcagagagccaacagcgacaccgacctggtgaccagcgagagcagaagcagcctgaccgccagcatgtacgagtacaccctgggccaggcccagaacctgatcatcttctgggacatcaaggaggaggtggaccccagcgactggatcggcctgtaccacatcgacgagaacagccccgccaacttctgggacagcaagaacagaggcgtgaccggcacccagaagggccagatcgtgtggagaatcgagcccggcccctacttcatggagtag

SEQ ID NO: 12581 - DNA, 264 bp, synthetic construct
  source 1..264: mol_type = other DNA; note = Synthetic coding sequence
atgagcctgttcggcaccaccagcggcttcggcaccagcggcaccagcatgttcggcagcgccaccaccgacaaccacaaccccatgaaggacatcgaggtgaccagcagccccgacgacagcatcggctgcctgagcttcagcccccccaccctgcccggcaacttcctgatcgccggcagctgggccaacgacgtgagatgctgggaggtgcaggacagcggccagaccatccccaaggcccagcagatgcacaccggctag

SEQ ID NO: 12582 - DNA, 1329 bp, synthetic construct
  source 1..1329: mol_type = other DNA; note = Synthetic coding sequence
atggccaacagcttcgccgccagaatcttcaccaccctgagcgacctgcagaccaacatggccaacctgaaggtgatcggcatcgtgatcggcaagaccgacgtgaagggcttccccgacagaaagagcatcggcagcgagagatacaccttcagcttcaccatcagagacagccccgcccacttcgtgaacgccgccagctggggcaacgaggactacatcaagagcctgagcgacagcttcagagtgggcgactgcgtgatcatcgagaaccccctgatccagagaaaggagatcgagagagaggagaagttcagccccgccacccccagcaactgcaagctgctgctgagcgagaaccacagcaccgtgaaggtgtgcagcagctacgaggtggacaccaagctgctgagcctgatccacctgcccgtgaaggagagccacgactactacagcctgggcgacatcgtggccaacggccacagcctgaacggcagaatcatcaacgtgctggccgccgtgaagagcgtgggcgagcccaagtacttcaccaccagcgacagaagaaagggccagagatgcgaggtgagactgtacgacgagaccgagagcagcttcgccatgacctgctgggacaacgagagcatcctgctggcccagagctggatgcccagagagaccgtgatcttcgccagcgacgtgagaatcaacttcgacaagttcagaaactgcatgaccgccaccgtgatcagcaagaccatcatcaccaccaaccccgacatccccgaggccaacatcctgctgaacttcatcagagagaacaaggagaccaacgtgctggacgacgagatcgacagctacttcaaggagagcatcaacctgagcaccatcgtggacgtgtacaccgtggagcagctgaagggcaaggccctgaagaacgagggcaaggccgaccccagctacggcatcctgtacgcctacatcagcaccctgaacatcgacgacgagaccaccaaggtggtgagaaacagatgcagcagctgcggctacatcgtgaacgaggccagcaacatgtgcaccacctgcaacaagaacagcctggacttcaagagcgtgttcctgagcttccacgtgctgatcgacctgaccgaccacaccggcaccctgcacagctgcagcctgaccggcagcgtggccgaggagaccctgggctgcaccttcgtgctgagccacagagccagaagcggcctgaagatcagcgtgctgagctgcaagctggccgaccccaccgaggccagcagaaacctgagcggccagaagcacgtgtag

SEQ ID NO: 12583 - DNA, 651 bp, synthetic construct
  source 1..651: mol_type = other DNA; note = Synthetic coding sequence
atgaacaaccagaagcagcagaagcccaccctgagcggccagagattcaagaccagaaagagagacgagaaggagagattcgaccccacccagttccaggactgcatcatccagggcctgaccgagaccggcaccgacctggaggccgtggccaagttcctggacgccagcggcgccaagctggactacagaagatacgccgagaccctgttcgacatcctggtggccggcggcatgctggcccccggcggcaccctggccgacgacatgatgagaaccgacgtgtgcgtgttcgccgcccaggaggacctggagaccatgcaggccttcgcccaggtgttcaacaagctgatcagaagatacaagtacctggagaagggcttcgaggacgaggtgaagaagctgctgctgttcctgaagggcttcagcgagagcgagagaaacaagctggccatgctgaccggcgtgctgctggccaacggcaccctgaacgccagcatcctgaacagcctgtacaacgagaacctggtgaaggagggcgtgagcgccgccttcgccgtgaagctgttcaagagctggatcaacgagaaggacatcaacgccgtggccgccagcctgagaaaggtgagcatggacaacagactgatgtag

SEQ ID NO: 12584 - DNA, 429 bp, synthetic construct; identical to SEQ ID NO: 12103
  source 1..429: mol_type = other DNA; note = Synthetic coding sequence

SEQ ID NO: 12585 - DNA, 447 bp, synthetic construct
  source 1..447: mol_type = other DNA; note = Synthetic coding sequence
gccatccacatcctggacgtgctggtgctgaacggcaccgacgtgagagagcagcacttcaaccagagaatccagctggccgagaagttcgtgaaggccgtgagcaagcccagcagacccgacatgaaccccatcagagtgaaggaggtgtacagactggaggagatggagaagatcttcgtgagactggagatgaagatcatcaagggcagcagcggcacccccaagctgagctacaccggcagagacgacagacacttcgtgcccatgggcctgtacatcgtgagaaccgtgaacgagccctggaccatgggcttcagcaagagcttcaagaagaagttcttctacaacaagaagaccaaggacagcaccttcgacctgccctactaccccttccccagcttcttcttccccaacagaagatacaacctgctgctgttcgtgtag

SEQ ID NO: 12586 - DNA, 300 bp, synthetic construct
  source 1..300: mol_type = other DNA; note = Synthetic coding sequence
atggaggagatccccgcccaggaggccgccggcagccccagagtgcagttccagagcctggagacccagagcgagtgcctgagccccgagccccagttcgtgcaggacaccgacatggagcagggcctgaccggcggcatcctgctgagactgcccaccaccagaatccacagcgtgaacagctgccccgccctgagccacacccaggccagcgccttcagcggcgagaccctggccgtgctgaccgccggcatcagcaagagatggcccaagtacagactgcccatcgacatcgcctag

SEQ ID NO: 12587 - DNA, 2493 bp, synthetic construct
  source 1..2493: mol_type = other DNA; note = Synthetic coding sequence
atgaagagaggcagactgcccagcagcagcgaggacagcgacgacaacggcagcctgagcaccacctggagccagaacagcagaagccagcacagaagaagcagctgcagcagacacgaggacagaaagcccagcgaggtgttcagaaccgacctgatcaccgccatgaagctgcacgacagctaccagctgaaccccgacgagtactacgtgctggccgacccctggagacaggagtgggagaagggcgtgcaggtgcccgtgagccccggcaccatcccccagcccgtggccagacccaagaagtacatcgtgagcagcggcagcgagccccccgagctgggctacgtggacatcagaaccctggccgacagcgtgtgcagatacgacctgaacgacatggacgccgcctggctggagctgaccaacgaggagttcaaggagatgggcatgcccgagctggacgagtacaccatggagagagtgctggaggagttcgagcagagatgctacgacaacatgaaccacgccatcgagaccgaggagggcctgggcatcgagtacgacgaggacgtggtgtgcgacgtgtgccagagccccgacggcgaggacggcaacgagatggtgttctgcgacaagtgcaacatctgcgtgcaccaggcctgctacggcatcctgaaggtgcccgagggcagctggctgtgcagaacctgcgccctgggcgtgcagcccaagtgcctgctgtgccccaagaagggcggcgccatgaagcccaccagaagcggcaccaagtgggtgcacgtgagctgcgccctgtggatccccgaggtgagcatcggcagccccgagaagatggagcccatcaccaaggtgagccacatccccagcagcagatgggccctggtgtgcagcctgtgcaacgagaagttcggcgccagcatccagtgcagcgtgaagaactgcagaaccgccttccacgtgacctgcgccttcgacagaggcctggagatgaagaccatcctggccgagaacgacgaggtgaagttcaagagctactgccccaagcacagcagccacagaaagcccgaggagagcctgggcaagggcgccgcccaggagaacggcgcccccgagtgcagccccagaaaccccctggagcccttcgccagcctggagcagaacagagaggaggcccacagagtgagcgtgagaaagcagaagctgcagcagctggaggacgagttctacaccttcgtgaacctgctggacgtggccagagccctgagactgcccgaggaggtggtggacttcctgtaccagtactggaagctgaagagaaaggtgaacttcaacaagcccctgatcacccccaagaaggacgaggaggacaacctggccaagagagagcaggacgtgctgttcagaagactgcagctgttcacccacctgagacaggacctggagagagtgagaaacctgacctacatggtgaccagaagagagaagatcaagagaagcgtgtgcaaggtgcaggagcagatcttcaacctgtacaccaagctgctggagcaggagagagtgagcggcgtgcccagcagctgcagcagcagcagcctggagaacatgctgctgttcaacagccccagcgtgggccccgacgcccccaagatcgaggacctgaagtggcacagcgccttcttcagaaagcagatgggcaccagcctggtgcacagcctgaagaagccccacaagagagaccccctgcagaacagccccggcagcgagggcaagaccctgctgaagcagcccgacctgtgcggcagaagagagggcatggtggtgcccgagagcttcctgggcctggagaagaccttcgccgaggccagactgatcagcgcccagcagaagaacggcgtggtgatgcccgaccacggcaagagaagagacaacagattccactgcgacctgatcaagggcgacctgaaggacaagagcttcaagcagagccacaagcccctgagaagcaccgacgtgagccagagacacctggacaacaccagagccgccaccagccccggcgtgggccagagcgcccccggcaccagaaaggagatcgtgcccaagtgcaacggcagcctgatcaaggtgaactacaaccagaccgccgtgaaggtgcccaccacccccgccagccccgtgaagaactggggcggcttcagaatccccaagaagggcgagagacagcagcagggcgaggcccacgacggcgcctgccaccagcacagcgactacccctacctgggcctgggcagagtgcccgccaaggagagagccaagagcaagctgaagagcgacaacgagaacgacggctacgtgcccgacgtggagatgagcgacagcgagagcgaggccagcgagaagaagtgcatccacaccagcagcaccatcagcagaagaaccgacatcatcagaagaagcatcctggccagctag

SEQ ID NO: 12588 - DNA, 402 bp, synthetic construct
  source 1..402: mol_type = other DNA; note = Synthetic coding sequence
atggccagcgaggacatcgccaagctggccgagaccctggccaagacccaggtggccggcggccagctgagcttcaagggcaagagcctgaagctgaacaccgccgaggacgccaaggacgtgatcaaggagatcgaggacttcgacagcctggaggccctgagactggagggcaacaccgtgggcgtggaggccgccagagtgatcgccaaggccctggagaagaagagcgagctgaagagatgccactggagcgacatgttcaccggcagactgagaaccgagatcccccccgccctgatcagcctgggcgagggcctgatcaccgccggcgcccagctggtggagctggacctgagcgacaacgccttcggccccgacggcgtgcagggcttcgagtag

SEQ ID NO: 12589 - DNA, 390 bp, synthetic construct
  source 1..390: mol_type = other DNA; note = Synthetic coding sequence
atgagccccggcagcggcgtgaagagcgagtacatgaagagataccaggagcccagatgggaggagtacggcccctgctacagagagctgctgcactacagactgggcagaagactgctggagcaggcccacgccccctggctgtgggacgactggggccccgccggcagcagcgaggacagcgccagcagcgagagcagcggcgccggcggccccgcccccagatgcgccccccccagcccccccccccccgtggagcccgccacccaggaggaggccgagagaagagccagaggcgcccccgaggagcaggacgccgaggccggcgacgccgaggccgaggacgccgaggacgccgccctgcccggcaacgcctggctgagaacctag

SEQ ID NO: 12590 - DNA, 390 bp, synthetic construct; identical to SEQ ID NO: 10956
  source 1..390: mol_type = other DNA; note = Synthetic coding sequence

SEQ ID NO: 12591 - DNA, 402 bp, synthetic construct
  source 1..402: mol_type = other DNA; note = Synthetic coding sequence
atggccgagaagctgatcacccagaccttcagccaccacaaccagctggcccagaagaccagaagagagaagagagccagacaggaggccgagagaagagagaaggccgagagagccgccagactggccaaggaggccaagagcgagaccagcggcccccagatcaaggagctgaccgacgaggaggccgagagactgcagctggagatcgaccagaagaaggacgccgagaaccacgaggcccagctgaagaacggcagcctggacagccccggcaagcaggacaccgaggaggacgaggaggaggacgagaaggacaagggcaagctgaagcccaacctgggcaacggcgccgacctgcccaactacagatggacccagaccctgagcgagctggactag

SEQ ID NO: 12592 - DNA, 2373 bp, synthetic construct; identical to SEQ ID NO: 9490
  source 1..2373: mol_type = other DNA; note = Synthetic coding sequence

SEQ ID NO: 12593 - DNA, 1356 bp, synthetic construct
  source 1..1356: mol_type = other DNA; note = Synthetic coding sequence
atgtacggcgcccccggcgcccccgcccagagcgccagcgtgaccgtggtgagaagcctgagaagaccccccccccaggccaccggcgtgagcttcatgaacaaccagaagcagcagaagcccaccctgagcggccagagattcaagaccagaaagagagacgagaaggagagattcgaccccacccagttccaggactgcatcatccagggcctgaccgagaccggcaccgacctggaggccgtggccaagttcctggacgccagcggcgccaagctggactacagaagatacgccgagaccctgttcgacatcctggtggccggcggcatgctggcccccggcggcaccctggccgacgacatgatgagaaccgacgtgtgcgtgttcgccgcccaggaggacctggagaccatgcaggccttcgcccaggtgttcaacaagctgatcagaagatacaagtacctggagaagggcttcgaggacgaggtgaagaagctgctgctgttcctgaagggcttcagcgagagcgagagaaacaagctggccatgctgaccggcgtgctgctggccaacggcaccctgaacgccagcatcctgaacagcctgtacaacgagaacctggtgaaggagggcgtgagcgccgccttcgccgtgaagctgttcaagagctggatcaacgagaaggacatcaacgccgtggccgccagcctgagaaaggtgagcatggacaacagactgatggagctgttccccgccaacaagcagagcgtggagcacttcaccaagtacttcaccgaggccggcctgaaggagctgagcgagtacgtgagaaaccagcagaccatcggcgccagaaaggagctgcagaaggagctgcaggagcagatgagcagaggcgaccccttcaaggacatcatcctgtacgtgaaggaggagatgaagaagaacaacatccccgagcccgtggtgatcggcatcgtgtggagcagcgtgatgagcaccgtggagtggaacaagaaggaggagctggtggccgagcaggccatcaagcacctgaagcagtacagccccctgctggccgccttcaccacccagggccagagcgagctgaccctgctgctgaagatccaggagtactgctacgacaacatccacttcatgaaggccttccagaagatcgtggtgctgttctacaaggccgaggtgctgagcgaggagcccatcctgaagtggtacaaggacgcccacgtggccaagggcaagagcgtgttcctggagcagatgaagaagttcgtggagtggctgaagaacgccgaggaggagagcgagagcgaggccgaggagggcgactag

SEQ ID NO: 12594 - DNA, 948 bp, synthetic construct
  source 1..948: mol_type = other DNA; note = Synthetic coding sequence
atggccggcggcgccagagaggtgctgaccctgcagctgggccacttcgccggcttcgtgggcgcccactggtggaaccagcaggacgccgccctgggcagagccaccgacagcaaggagccccccggcgagctgtgccccgacgtgctgtacagaaccggcagaaccctgcacggccaggagacctacacccccagactgatcctgatggacctgaagggcagcctgagcagcctgaaggaggagggcggcctgtacagagacaagcagctggacgccgccatcgcctggcagggcaagctgaccacccacaaggaggagctgtaccccaagaacccctacctgcaggacttcctgagcgccgagggcgtgctgagcagcgacggcgtgtggagagtgaagagcatccccaacggcaagggcagcagccccctgcccaccgccaccacccccaagcccctgatccccaccgaggccagcatcagagtgtggagcgacttcctgagagtgcacctgcaccccagaagcatctgcatgatccagaagtacaaccacgacggcgaggccggcagactggaggccttcggccagggcgagagcgtgctgaaggagcccaagtaccaggaggagctggaggacagactgcacttctacgtggaggagtgcgactacctgcaggtggtggcctggcagtgcgccctgcagggcggcagcagcagccaccccgccaactacctgagcagcctgacccccgcccagggcttccagatcctgtgcgacctgcacgacggcttcagcggcgtgggcgccaaggccgccgagctgctgcaggacgagtacagcggcagaggcatcatcacctggggcctgctgcccggcccctaccacagaggcgtgagcggcacctggagaagcaagcacagcaaccccatcggcagagtggcctag

SEQ ID NO: 12595 - DNA, 285 bp, synthetic construct
  source 1..285: mol_type = other DNA; note = Synthetic coding sequence
tgcaccagcagctgcacccccagctgctgccagcagagcagctgccagcccgcctgctgcaccagcagcccctgccagcaggcctgctgcgtgcccgtgtgctgcaagaccgtgtgctgcaagcccagcagctgccagcccgcctgctgcatcagcagcccctgccagcagagctgctgcgtgcccgtgtgctgcaagcccatctgctgcgtgccccccgcctgctgcaccaccagctgctgcagacccagcagcagcgtgagcctgctgtgcagacccgtgtag

SEQ ID NO: 12596 - DNA, 1221 bp, synthetic construct
  source 1..1221: mol_type = other DNA; note = Synthetic coding sequence
atggccgccaacctgagcagaaacggccccgccctgcaggaggcctacgtgagagtggtgaccgagaagagccccaccgactgggccctgttcacctacgagggcaacagcaacgacatcagagtggccggcaccggcgagggcggcctggaggagatggtggaggagctgaacagcggcaaggtgatgtacgccttctgcagagtgaaggaccccaacagcggcctgcccaagttcgtgctgatcaactggggcgcccacgtgaccatcaacgccagagccgaggaggacgtggagcccgagtgcatcatggagaaggtggccaaggccagcggcgccaactacagcttccacaaggagagcggcagattccaggacgtgggcccccaggcccccgtgggcagcgtgtaccagaagaccaacgccgtgagcgagatcaagagagtgggcaaggacagcttctgggccaaggccgagaaggaggaggagaacagaagactggaggagaagagaagagccgaggaggcccagagacagctggagcaggagagaagagagagagagctgagagaggccgccagaagagagcagagataccaggagcagggcggcgaggccagcccccagagcagaacctgggagcagcagcaggaggtggtgagcagaaacagaaacgagcaggagagcgccgtgcaccccagagagatcttcaagcagaaggagagagccatgagcaccaccagcatcagcagcccccagcccggcaagctgagaagccccttcctgcagaagcagctgacccagcccgagacccacttcggcagagagcccgccgccgccatcagcagacccagagccgacctgcccgccgaggagcccgcccccagcacccccccctgcctggtgcaggccgaggaggaggccgtgtacgaggagccccccgagcaggagaccttctacgagcagccccccctggtgcagcagcagggcgccggcagcgagcacatcgaccaccacatccagggccagggcctgagcggccagggcctgtgcgccagagccctgtacgactaccaggccgccgacgacaccgagatcagcttcgaccccgagaacctgatcaccggcatcgaggtgatcgacgagggctggtggagaggctacggccccgacggccacttcggcatgttccccgccaactacgtggagctgatcgagtag

SEQ ID NO: 12597 - DNA, 981 bp, synthetic construct; identical to SEQ ID NO: 11734
  source 1..981: mol_type = other DNA; note = Synthetic coding sequence

SEQ ID NO: 12598 - DNA, 684 bp, synthetic construct
  source 1..684: mol_type = other DNA; note = Synthetic coding sequence
atgctgtgctggggctactggagcctgggccagcccggcatcagcaccaacctgcagggcatcgtggccgagccccaggtgtgcggcttcatcagcgacagaagcgtgaaggaggtggcctgcggcggcaaccacagcgtgttcctgctggaggacggcgaggtgtacacctgcggcctgaacaccaagggccagctgggccacgagagagagggcaacaagcccgagcagatcggcgccctggccgaccagcacatcatccacgtggcctgcggcgagagccacagcctggccctgagcgacagaggccagctgttcagctggggcgccggcagcgacggccagctgggcctgatgaccaccgaggacagcgtggccgtgcccagactgatccagaagctgaaccagcagaccatcctgcaggtgagctgcggcaactggcactgcctggccctggccgccgacggccagttcttcacctggggcaagaacagccacggccagctgggcctgggcaaggagttccccagccaggccagcccccagagagtgagaagcctggagggcatccccctggcccaggtggccgccggcggcgcccacagcttcgccctgagcctgagcggcgccgtgttcggctggggcatgaacaacgccggccagctgggcctgagcgacgagtag

SEQ ID NO: 12599 - DNA, 624 bp, synthetic construct
  source 1..624: mol_type = other DNA; note = Synthetic coding sequence
atgagcagccccctggccagcctgagcaagaccagaaaggtgcccctgcccagcgagcccatgaaccccggcagaagaggcatcagaatctacggcgacgtgcccgccagccacgacagcgagctgatggccttcatgaccagaaagctgtgggacctggagcagcaggtgaaggcccagaccgacgagatcctgagcaaggaccagaagatcgccgccctggaggacctggtgcagaccctgagaccccaccccgccgaggccaccctgcagagacaggaggagctggagaccatgtgcgtgcagctgcagagacaggtgagagagatggagagattcctgagcgactacggcctgcagtgggtgggcgagcccatggaccaggaggacagcgagagcaagaccgtgagcgagcacggcgagagagactggatgaccgccaagaagttctggaagcccggcgacagcctggccccccccgaggtggacttcgacagactgctggccagcctgcaggacctgagcgagctggtggtggagggcgacacccaggtgacccccgtgcccggcggcgccagactgagaaccctggagcccatccccctgaagctgtacagaaactag

SEQ ID NO: 12600 - DNA, 717 bp, synthetic construct; identical to SEQ ID NO: 12544
  source 1..717: mol_type = other DNA; note = Synthetic coding sequence

SEQ ID NO: 12601 - DNA, 369 bp, synthetic construct
  source 1..369: mol_type = other DNA; note = Synthetic coding sequence
gtgagagagctggaggccgagctggacgccgagcagaagaagcacgccgaggccctgaagggcgtgagaaagcacgagagaagagtgaaggagctggcctaccaggccgaggaggacagaaagaacctggccagaatgcaggacctggtggacaagctgcagagcaaggtgaagagctacaagagacagttcgaggaggccgagcagcaggccaacaccaacctggccaagtacagaaaggcccagcacgagctggacgacgccgaggagagagccgacatggccgagacccaggccaacaagctgagagccagaaccagagacgccctgggccccaagctgagcctgagcccccagcacaaggagtag

SEQ ID NO: 12602 - DNA, 483 bp, synthetic construct
  source 1..483: mol_type = other DNA; note = Synthetic coding sequence
tgagagagcctggtgggcctgcaggagggcaagagcaccgagcagggcaaccacgaccagctgaaggagctgtacagcgccggcaacctgaccgtgctggccaccgaccccctgctgcaccaggaccccgtgcagctggacttccacttcagactgaccagccagaccagcgcccactggcacggcctgctgtgcgacagaagactgttcctggacatcccctaccaggccctggaccagggcaacagagagagcctgaccgccaccctggagtacgtggaggagaagaccaacgtggacagcgtgttcgtgaacttccagaacgacagaaacgacagaggcgccctgctgagagccttcagctacatgggcttcgaggtggtgagacccgaccaccccgccctgccccccctggacaacgtgatcttcatggtgtaccccctggagagagacgtgggccacctgcccagcgagcccccctag

SEQ ID NO: 12603 - DNA, 102 bp, synthetic construct
  source 1..102: mol_type = other DNA; note = Synthetic coding sequence
atgagcgtgacctacgacgacagcgtgggcgtggaggtgagcagcgacagcttctgggaggtgggcaactacaagagaaccgtgaagagaatcgacgactag

SEQ ID NO: 12604 - DNA, 402 bp, synthetic construct
  source 1..402: mol_type = other DNA; note = Synthetic coding sequence
atgtggagcctgaccgccagcgagggcgagagcaccaccgcccacttcttcctgggcgccggcgacgagggcctgggcaccagaggcatcggcatgagacccgaggagagcgacagcgagctgctggaggacgaggaggacgaggtgccccccgagccccagatcatcgtgggcatctgcgccatgaccaagaagagcaagagcaagcccatgacccagatcctggagagactgtgcagattcgactacctgaccgtggtgatcctgggcgaggacgtgatcctgaacgagcccgtggagaactggcccagctgccactgcctgatcagcttccacagcaagggcttccccctggacaaggccgtggcctacagcaagctgagaaaccccttcctgatctag

SEQ ID NO: 12605 - DNA, 939 bp, synthetic construct; identical to SEQ ID NO: 11813
  source 1..939: mol_type = other DNA; note = Synthetic coding sequence

SEQ ID NO: 12606 - DNA, 1308 bp, synthetic construct
  source 1..1308: mol_type = other DNA; note = Synthetic coding sequence
tgaagcatcctgaacagcaacgagcacctgctgaaggagaaggagctgctgatcgacaagcagagaaagcacatcagccagctggagcagaaggtgagagagagcgagctgcaggtgcacagcgccctgctgggcagacccgcccccttcggcgacgtgtgcctgctgagactgcaggagctgcagagagagaacaccttcctgagagcccagttcgcccagaagaccgaggccctgagcagagagaagatcgacctggagaagaagctgagcgccagcgaggtggaggtgcagctgatcagagagagcctgaaggtggccctgcagaagcacagcgaggaggtgaagaagcaggaggagagagtgaagggcagagacaagcacatcaacaacctgaagaagaagtgccagaaggagagcgagcagaacagagagaagcagcagagaatcgagaccctggagagatacctggccgacctgcccaccctggaggaccaccagaagcagagccagcagctgaaggacagcgagctgaagagcaccgagctgcaggagaaggtgaccgagctggagagcctgctggaggagacccaggccatctgcagagagaaggagatccagctggagagcctgagacagagagaggccgagttcagcagcgccggccacagcctgcaggacaagcagagcgtggaggagaccagcggcgagggccccgaggtggagatggagagctggcagaagagatacgacagcctgcagaagatcgtggagaagcagcagcagaagatggaccagctgagaagccaggtgcagagcctggagcaggaggtggcccaggaggagggcaccagccaggccctgagagaggaggcccagagaagagacagcgccctgcagcagctgagaaccgccgtgaaggagctgagcgtgcagaaccaggacctgatcgagaagaacctgaccctgcaggagcacctgagacaggcccagcccggcagcccccccagccccgacaccgcccagctggccctggagctgcaccaggagctggccagctgcctgcaggacctgcaggccgtgtgcagcatcgtgacccagagagcccagggccacgaccccaacctgagcctgctgctgggcatccacagccagcaccccgagacccagctggacctgcagaagcccgacgtgatcaagagaaagctggaggaggtgcagcagctgagaagagacatcgaggacctgagaaccaccatgagcgacagatacgcccaggacatgggcgagaactgcgtgacccagtag

SEQ ID NO: 12607 - DNA, 474 bp, synthetic construct
  source 1..474: mol_type = other DNA; note = Synthetic coding sequence
atggagctgagatgcggcggcctgctgttcagcagcagattcgacagcggcaacctggcccacgtggagaaggtggagagcctgagcagcgacggcgagggcgtgggcggcggcgccagcgccctgaccagcggcatcgccagcagccccgactacgagttcaacgtgtggaccagacccgactgcgccgagaccgagttcgagaacggcaacagaagctggttctacttcagcgtgagaggcggcatgcccggcaagctgatcaagatcaacatcatgaacatgaacaagcagagcaagctgtacagccagggcatggcccccttcgtgagaaccctgcccaccagacccagatgggagagaatcagagacagacccaccttcgagatgaccgagacccagttcgtgctgagcttcgtgcacagattcgtggagggcagaggcgccaccaccttcttcgccttctgctactag

SEQ ID NO: 12608 - DNA, 1620 bp, synthetic construct; identical to SEQ ID NO: 10018
  source 1..1620: mol_type = other DNA; note = Synthetic coding sequence

SEQ ID NO: 12609 - DNA, 6141 bp, synthetic construct
  source 1..6141: mol_type = other DNA; note = Synthetic coding sequence
atggacgaggtggagcaggaccagcacgaggccagactgaaggagctgttcgacagcttcgacaccaccggcaccggcagcctgggccaggaggagctgaccgacctgtgccacatgctgagcctggaggaggtggcccccgtgctgcagcagaccctgctgcaggacaacctgctgggcagagtgcacttcgaccagttcaaggaggccctgatcctgatcctgagcagaaccctgagcaacgaggagcacttccaggagcccgactgcagcctggaggcccagcccaagtacgtgagaggcggcaagagatacggcagaagaagcctgcccgagttccaggagagcgtggaggagttccccgaggtgaccgtgatcgagcccctggacgaggaggccagacccagccacatccccgccggcgactgcagcgagcactggaagacccagagaagcgaggagtacgaggccgagggccagctgagattctggaaccccgacgacctgaacgccagccagagcggcagcagccccccccaggactggatcgaggagaagctgcaggaggtgtgcgaggacctgggcatcaccagagacggccacctgaacagaaagaagctggtgagcatctgcgagcagtacggcctgcagaacgtggacggcgagatgctggaggaggtgttccacaacctggaccccgacggcaccatgagcgtggaggacttcttctacggcctgttcaagaacggcaagagcctgacccccagcgccagcaccccctacagacagctgaagagacacctgagcatgcagagcttcgacgagagcggcagaagaaccaccaccagcagcgccatgaccagcaccatcggcttcagagtgttcagctgcctggacgacggcatgggccacgccagcgtggagagaatcctggacacctggcaggaggagggcatcgagaacagccaggagatcctgaaggccctggacttcagcctggacggcaacatcaacctgaccgagctgaccctggccctggagaacgagctgctggtgaccaagaacagcatccaccaggccgccctggccagcttcaaggccgagatcagacacctgctggagagagtggaccaggtggtgagagagaaggagaagctgagaagcgacctggacaaggccgagaagctgaagagcctgatggccagcgaggtggacgaccaccacgccgccatcgagagaagaaacgagtacaacctgagaaagctggacgaggagtacaaggagagaatcgccgccctgaagaacgagctgagaaaggagagagagcagatcctgcagcaggccggcaagcagagactggagctggagcaggagatcgagaaggccaagaccgaggagaactacatcagagacagactggccctgagcctgaaggagaacagcagactggagaacgagctgctggagaacgccgagaagctggccgagtacgagaacctgaccaacaagctgcagagaaacctggagaacgtgctggccgagaagttcggcgacctggaccccagcagcgccgagttcttcctgcaggaggagagactgacccagatgagaaacgagtacgagagacagtgcagagtgctgcaggaccaggtggacgagctgcagagcgagctggaggagtacagagcccagggcagagtgctgagactgcccctgaagaacagccccagcgaggaggtggaggccaacagcggcggcatcgagcccgagcacggcctgggcagcgaggagtgcaaccccctgaacatgagcatcgaggccgagctggtgatcgagcagatgaaggagcagcaccacagagacatctgctgcctgagactggagctggaggacaaggtgagacactacgagaagcagctggacgagaccgtggtgagctgcaagaaggcccaggagaacatgaagcagagacacgagaacgagacccacaccctggagaagcagatcagcgacctgaagaacgagatcgccgagctgcagggccaggccgccgtgctgaaggaggcccaccacgaggccacctgcagacacgaggaggagaagaagcagctgcaggtgaagctggaggaggagaagacccacctgcaggagaagctgagactgcagcacgagatggagctgaaggccagactgacccaggcccaggccagcttcgagagagagagagagggcctgcagagcagcgcctggaccgaggagaaggtgagaggcctgacccaggagctggagcagttccaccaggagcagctgaccagcctggtggagaagcacaccctggagaaggaggagctgagaaaggagctgctggagaagcaccagagagagctgcaggagggcagagagaagatggagaccgagtgcaacagaagaaccagccagatcgaggcccagttccagagcgactgccagaaggtgaccgagagatgcgagagcgccctgcagagcctggagggcagatacagacaggagctgaaggacctgcaggagcagcagagagaggagaagagccagtgggagttcgagaaggacgagctgacccaggagtgcgccgaggcccaggagctgctgaaggagaccctgaagagagagaagaccaccagcctggtgctgacccaggagagagagatgctggagaagacctacaaggagcacctgaacagcatggtggtggagagacagcagctgctgcaggacctggaggacctgagaaacgtgagcgagacccagcagagcctgctgagcgaccagatcctggagctgaagagcagccacaagagagagctgagagagagagaggaggtgctgtgccaggccggcgccagcgagcagctggccagccagagactggagagactggagatggagcacgaccaggagagacaggagatgatgagcaagctgctggccatggagaacatccacaaggccacctgcgagaccgccgacagagagagagccgagatgagcaccgagatcagcagactgcagagcaagatcaaggagatgcagcaggccaccagccccctgagcatgctgcagagcggctgccaggtgatcggcgaggaggaggtggagggcgacggcgccctgagcctgctgcagcagggcgagcagctgctggaggagaacggcgacgtgctgctgagcctgcagagagcccacgagcaggccgtgaaggagaacgtgaagatggccaccgagatcagcagactgcagcagagactgcagaagctggagcccggcctggtgatgagcagctgcctggacgagcccgccaccgagttcttcggcaacaccgccgagcagaccgagcagttcctgcagcagaacagaaccaagcaggtggagggcgtgaccagaagacacgtgctgagcgacctggaggacgacgaggtgagagacctgggcagcaccggcaccagcagcgtgcagagacaggaggtgaagatcgaggagagcgaggccagcgtggagggcttcagcgagctggagaacagcgaggagaccagaaccgagagctgggagctgaagaaccagatcagccagctgcaggagcagctgatgatgctgtgcgccgactgcgacagagccagcgagaagaagcaggacctgctgttcgacgtgagcgtgctgaagaagaagctgaagatgctggagagaatccccgaggccagccccaagtacaagctgctgtacgaggacgtgagcagagagaacgactgcctgcaggaggagctgagaatgatggagaccagatacgacgaggccctggagaacaacaaggagctgaccgccgaggtgttcagactgcaggacgagctgaagaagatggaggaggtgaccgagaccttcctgagcctggagaagagctacgacgaggtgaagatcgagaacgagggcctgaacgtgctggtgctgagactgcagggcaagatcgagaagctgcaggagagcgtggtgcagagatgcgactgctgcctgtgggaggccagcctggagaacctggagatcgagcccgacggcaacatcctgcagctgaaccagaccctggaggagtgcgtgcccagagtgagaagcgtgcaccacgtgatcgaggagtgcaagcaggagaaccagtacctggagggcaacacccagctgctggagaaggtgaaggcccacgagatcgcctggctgcacggcaccatccagacccaccaggagagacccagagtgcagaaccaggtgatcctggaggagaacaccaccctgctgggcttccaggacaagcacttccagcaccaggccaccatcgccgagctggagctggagaagaccaagctgcaggagctgaccagaaagctgaaggagagagtgaccatcctggtgaagcagaaggacgtgctgagccacggcgagaaggaggaggagctgaaggccatgatgcacgacctgcagatcacctgcagcgagatgcagcagaaggtggagctgctgagatacgagagcgagaagctgcagcaggagaacagcatcctgagaaacgagatcaccaccctgaacgaggaggacagcatcagcaacctgaagctgggcaccctgaacggcagccaggaggagatgtggcagaagaccgagaccgtgaagcaggagaacgccgccgtgcagaagatggtggagaacctgaagaagcagatcagcgagctgaagatcaagaaccagcagctggacctggagaacaccgagctgagccagaagaacagccagaaccaggagaagctgcaggagctgaaccagagactgaccgagatgctgtgccagaaggagaaggagcccggcaacagcgccctggaggagagagagcaggagaagttcaacctgaaggaggagctggagagatgcaaggtgcagagcagcaccctggtgagcagcctggaggccgagctgagcgaggtgaagatccagacccacatcgtgcagcaggagaaccacctgctgaaggacgagctggagaagatgaagcagctgcacagatgccccgacctgagcgacttccagcagaagatcagcagcgtgctgagctacaacgagaagctgctgaaggagaaggaggccctgagcgaggagctgaacagctgcgtggacaagctggccaagagcagcctgctggagcacagaatcgccaccatgaagcaggagcagaagagctgggagcaccagagcgccagcctgaagagccagctggtggccagccaggagaaggtgcagaacctggaggacaccgtgcagaacgtgaacctgcagatgagcagaatgaagagcgacctgagagtgacccagcaggagaaggaggccctgaagcaggaggtgatgagcctgcacaagcagctgcagaacgccggcggcaagagctgggcccccgagatcgccacccaccccagcggcctgcacaaccagcagaagagactgagctgggacaagctggaccacctgatgaacgaggagcagcagctgctgtggcaggagaacgagagactgcagaccatggtgcagaacaccaaggccgagctgacccacagcagagagaaggtgagacagctggagagcaacctgctgcccaagcaccagaagcacctgaaccccagcggcaccatgaaccccaccgagcaggagaagctgagcctgaagagagagtgcgaccagttccagaaggagcagagccccgccaacagaaaggtgagccagatgaacagcctggagcaggagctggagaccatccacctggagaacgagggcctgaagaagaagcaggtgaagctggacgagcagctgatggagatgcagcacctgagaagcaccgccacccccagccccagcccccacgcctgggacctgcagctgctgcagcagcaggcctgccccatggtgcccagagagcagttcctgcagctgcagagacagctgctgcaggccgagagaatcaaccagcacctgcaggaggagctggagaacagaaccagcgagaccaacaccccccaggccctgctgcccgagcagagagccgtgcacgccgacagctacagaagaatcggccacctgtag

SEQ ID NO: 12610 - DNA, 1203 bp, synthetic construct
  source 1..1203: mol_type = other DNA; note = Synthetic coding sequence
atggccggcgagaaccaccagtggcagggcagcatcctgtacaacatgctgatgagcgccaagcagaccagagccgcccccgaggcccccgagaccagactggtggaccagtgctggggctgcagctgcggcgacgagcccggcgtgggcagagagggcctgctgggcggcagaaacgtggccctgctgtacagatgctgcttctgcggcaaggaccaccccagacagggcagcatcctgtacagcatgctgaccagcgccaagcagacctacgccgcccccaaggcccccgaggccaccctgggcccctgctggggctgcagctgcggcagcgaccccggcgtgggcagagccggcctgcccggcggcagacccgtggccctgctgtacagatgctgcttctgcggcgaggaccaccccagacagggcagcatcctgtacagcctgctgaccagcagcaagcagacccacgtggcccccgccgcccccgaggccagacccggcggcgcctggtgggacagaagctacttcgcccagagacccggcggcaaggaggccctgcccggcggcagagccaccgccctgctgtacagatgctgcttctgcggcgaggaccacccccagcagggcagcaccctgtactgcgtgcccaccagcaccaaccaggcccaggccgcccccgaggagagacccagagccccctggtgggacaccagcagcggcgccctgagacccgtggccctgaagagcccccaggtggtgtgcgaggccgccagcgccggcctgctgaagaccctgagattcgtgaagtacctgccctgcttccaggtgctgcccctggaccagcagctggtgctggtgagaaactgctgggccagcctgctgatgctggagctggcccaggacagactgcagttcgagaccgtggaggtgagcgagcccagcatgctgcagaagatcctgaccaccagaagaagagagaccggcggcaacgagcccctgcccgtgcccaccctgcagcaccacctggccccccccgccgaggccagaaaggtgcccagcgccagccaggtgcaggccatcaagtgcttcctgagcaagtgctggagcctgaacatcagcaccaaggagtacgcctacctgaagggcaccgtgctgttcaaccccggcaagggcaaggagaacgactgcaaccaccactag

SEQ ID NO: 12611 - DNA, 627 bp, synthetic construct
  source 1..627: mol_type = other DNA; note = Synthetic coding sequence
atgaagcagctggaggaccacgaggccttcgagaccagcagcctgatcggccacagcgccagagtgtacgccctgtactacaaggacggcctgctgtgcaccggcagcgacgacctgagcgccaagctgtgggacgtgagcaccggccagtgcgtgtacggcatccagacccacacctgcgccgccgtgaagttcgacgagcagaagctggtgaccggcagcttcgacaacaccgtggcctgctgggagtggagcagcggcgccagaacccagcacttcagaggccacaccggcgccgtgttcagcgtggactacaacgacgagctggacatcctggtgagcggcagcgccgacttcaccgtgaaggtgtgggccctgagcgccggcacctgcctgaacaccctgaccggccacaccgagtgggtgaccaaggtggtgctgcagaagtgcaaggtgaagagcctgctgcacagccccggcgactacatcctgctgagcgccgacaagtacgagatcaagatctggcccatcggcagagagatcaactgcaagtgcctgaagaccctgagcgtgagcgaggacagaagcatctgcctgcagcccagactgcacttcgacggcaagtag

SEQ ID NO: 12612 - DNA, 639 bp, synthetic construct
  source 1..639: mol_type = other DNA; note = Synthetic coding sequence
atgttcggcgtgaccaagttcggcgacaacatcgaggacgagtggttcatcgtgtacgtgatcaagcagatcaccaaggagttccccgagctggtggccagaatcgaggacaacgacggcgagttcctgctgatcgaggccgccgacttcctgcccaagtggctggaccccgagaacagcaccaacagagtgttcttctgccacggcgagctgtgcatcatccccgcccccagaaagagcggcgccgagagctggctgcccaccaccccccccaccatcccccaggccctgaacatcatcaccgcccacagcgagaagatcctggccagcgagagcatcagagccgccgtgaacagaagaatcagaggctaccccgagaagatccaggccagcctgcacagagcccactgcttcctgcccgccggcatcgtggccgtgctgaagcagagacccagactggtggccgccgccgtgcaggccttctacctgagagaccccatcgacctgagagcctgcagagtgttcaagaccttcctgcccgagaccagaatcatgaccagcgtgaccttcaccaagtgcctgtacgcccagctggtgcagcagagattcgtgcccgacagaagaagcggctacagatag

SEQ ID NO: 12613 - DNA, 474 bp, synthetic construct; identical to SEQ ID NO: 11812
  source 1..474: mol_type = other DNA; note = Synthetic coding sequence

SEQ ID NO: 12614 - DNA, 4773 bp, synthetic construct
  source 1..4773: mol_type = other DNA; note = Synthetic coding sequence
atgagcgccaccagctggttcctggtgagcagcagcggcgccagacacagactgcccagagagctgatcttcgtgggcagagaggagtgcgagctgatgctgcagagcagaagcgtggacaagcagcacgccgtgatcaactacgaccaggacagagacgagcactgggtgaaggacctgggcagcctgaacggcaccttcgtgaacgacatgagaatccccgaccagaagtacgtgaccctgaagctgaacgacgtgatcagattcggctacgacagcaacatgtacgtgctggagagagtgcagcacagagtgcccgaggaggccctgaagcacgagaagtacaccagccagctgcaggtgagcgtgaagggcctggcccccaagagaagcgaggccctgcccgagcacaccccctactgcgaggccagcaaccccagacccgagaagggcgacagaagacccggcaccgaggccgccagctacagaacccccctgtacggccagcccagctggtggggcgaggacgacggcagcaccctgcccgacgcccagagacagggcgagccctaccccgccgagagacccaagggccccgtgcagcaggacggcgagctgcacggcttcagagcccccgccgagccccagggctgcagcttcagaagagagcccagctacttcgagatccccaccaaggagaccccccagcccagccagccccccgaggtgcccgcccacgagatgcccaccaaggacgccgaggccggcggcggcggcgccgcccccgtggtgcagagccacgccagcttcaccatcgagttcgacgactgcagccccggcaagatgaagatcaaggaccacatcaccaagttcagcctgagacagagaagaccccccggcaaggaggccacccccggcgagatggtgagcgccgagaccaaggtggccgactggctggtgcagaacgaccccagcctgctgcacagagtgggccccggcgacgacagacacagcaccaagagcgacctgcccgtgcacaccagaaccctgaagggccacaagcacgaggacggcacccagagcgacagcgaggaccccctggccaaggccgccagcgccgccggcgtgcccctggaggccagcggcgagcaggtgagactgcagagacagatcaagagagacccccaggagctgctgcacaaccagcaggccttcgtgatcgagttcttcgacgaggacacccccagaaagaagagaagccagagcttcacccacagccccagcggcgaccccaaggccgacaagagaagaggccccacccccgccgacagagacagacccagcgtgcccgcccccgtgcaggccggcggcagaagcagcggcccccagagagccggcagcctgaagagagagaagaccgaggagagactgggcagccccagccccgccagcagaacccccgccagacccttcggcagcgtgggcagaagaagcagactggcccaggacttcatggcccagtgcctgagagagagcagccccgccgccagacccagccccgagaaggtgccccccgtgctgcccgcccccctgaccccccacggcaccagccccgtgggcccccccacccccccccccgcccccaccgacccccagctgaccaaggccagaaagcaggaggaggacgacagcctgagcgacgccggcacctacaccatcgagaccgaggcccaggacaccgaggtggaggaggccagaaagatgatcgaccaggtgttcggcgtgctggagagccccgagctgagcagagccagcagcgccaccttcagacccgtgatcagaggcgacagagacgagagcgacgacggcggcgtggcccagagaatggccctgctgcaggagttcgccagcagacccctgggcgccgccccccaggccgagcaccagggcctgcccgtgcccggcagccccggcggccagaagtgggtgagcagatgggccagcctggccgacagctacagcgaccccggcctgaccgaggacggcctgggcagaagaggcggcgagcccgagggcagcctgcccgtgagaatgagaagaagactgccccagctgcccagcgagagagccgacagccccgccggccccgagagcagcagaagaagcggccccggcccccccgagctggacagcgagcagcccagcagactgttcggccaggaggagctggaccccgacagcctgagcgacgccagcggcagcgacggcggcagaggccccgagcccggcgtggagccccaggacagcagaagaagaagcccccaggagggccccacctggagcagaggcagaagaagccccagagcccccggcgagcccacccccgccagcttcttcatcggcgaccagaacggcgacgccgtgctgagcagaaagcccctggccgcccccggcgacggcgagggcctgggccagaccgcccagcccagcccccccgccagagacggcgtgtacgtgagcgccaacggcagaatggtgatccagctgagacccggcagaagccccgagcccgacggccccgcccccgccttcctgagacaggagagcttcaccaaggagcccgccagcggcccccccgcccccggcaagcccccccacatcagcagccaccccctgctgcaggacctggccgccaccagagccgccagaatggacttccacagccaggacacccacctgatcctgaaggagaccgagaccgccctggccgccctggaggccagactgctgagcaacagcgtggacgccgagtgcgagggcggcagcacccccagaccccccgaggacgccctgagcggcgacagcgacgtggacaccgccagcaccgtgagcctgagaagcggcaagagcggccccagccccaccaccccccagcccctgagagcccagaaggagatgagccccagcccccccgccgcccaggaccccggcggcaccgccctggtgagcgccagagagcagagcagcgagagacagcaccaccccctgggccccaccgacatgggcagaggcgagcccgtgagaagaagcgccatcagaagaggccacagacccagaggcagcctggactggcccagcgaggagagaggccccgtgctggcccacctgcccagcagcgacgtgatggccagcaaccacgagacccccgaggccaccggcgccggcagactgggcagcagaagaaagcccgccgcccccccccccagccccgccgccagagaggagcagagcagaagcagcgccagcagccagaagggcccccaggccctgaccagaagcaacagcctgagcacccccagacccaccagagccagcagactgagaagagccagactgggcgacgccagcgacaccgaggccgccgacggcgagagaggcagcctgggcaaccccgagcccgtgggcagacccgccgccgagcaggccaagaagctgagcagactggacatcctggccatgcccagaaagagagccggcagcttcaccggcaccagcgaccccgaggccgcccccgccagaaccagcttcagcggcagaagcgtggagctgtgctgcgccagcagaaagcccaccatggccgaggccagagccgtgagcagaaaggccgccaacaccgccaccaccaccggccccagacagcccttcagcagagccagaagcggcagcgccagatacaccagcaacaccagaagaagacagcagggcagcgactacaccagcaccagcgaggaggagtacggcagcagacacggcagccccaagcacaccagaagccacaccagcaccgccacccagacccccagagccggcagcagcagcagagccagaagcagagcccccggccccagagacaccgacgacgacgaggaggagcccgacccctacggcttcatcgtgcagaccgccgagatcgccgagatcgccagactgagccagaccctggtgaaggacgtggccatcctggcccaggagatccacgacgtggccggcgacggcgacaccctgggcagcagcgagcccgcccacagcgccagcctgagcaacatgcccagcacccccgccagcaccatcagcgccagagaggagctggtgcagagaatccccgaggccagcctgaacttccagaaggtgccccccggcagcctgaacagcagagacttcgaccagaacatgaacgacagctgcgaggacgccctggccaacaagaccagacccagaaacagagaggaggtgatcttcgacaacctgatgctgaaccccgtgagccagctgagccaggccatcagagagaacaccgagcacctggccgagaagatgaagatcctgttccagaacaccggcagagcctgggaggacctggaggccagaatcaacgccgagaacgaggtgcccatcctgaagaccagcaacaaggagatcagcagcatcctgaaggagctgagaagagtgcagaagcagctggaggtgatcaacgccatcgtggaccccagcggcagcctggacctgctgaccggcaacagaagcctggccagcagcgcccagcccggcctgggcaagggcagagtggccgcccagagcccccccagccccgccagcgccgaggccctgctgcccgccctgcccctgagaaacttcccccagagagccagctgcggcccccccagcctgcccgaccccaccttcctgcccgacgccgagagattcctgatctag

SEQ ID NO: 12615 - DNA, 1452 bp, synthetic construct
  source 1..1452: mol_type = other DNA; note = Synthetic coding sequence
atgagcggcggcggccccagcggcggcggccccggcggcagcggcagagccagaaccagcagcttcgccgagcccggcggcggcggcggcggcggcggcggcggccccggcggcagcgccagcggccccggcggcaccggcggcggcaaggccagcgtgggcgccatgggcggcggcgtgggcgccagcagcagcggcggcggccccggcggcagcggcggcggcggcagcggcggccccggcgccggcaccagcttccccccccccggcgtgaagctgggcagagacagcggcaaggtgaccaccgtggtggccaccctgggccagggccccgagagaagccaggaggtggcctacaccgacatcaaggtgatcggcaacggcagcttcggcgtggtgtaccaggccagactggccgagaccagagagctggtggccatcaagaaggtgctgcaggacaagagattcaagaacagagagctgcagatcatgagaaagctggaccactgcaacatcgtgagactgagatacttcttctacagcagcggcgagaagaaggacgagctgtacctgaacctggtgctggagtacgtgcccgagaccgtgtacagagtggccagacacttcaccaaggccaagctgaccatccccatcctgtacgtgaaggtgtacatgtaccagctgttcagaagcctggcctacatccacagccagggcgtgtgccacagagacatcaagccccagaacctgctggtggaccccgacaccgccgtgctgaagctgtgcgacttcggcagcgccaagcagctggtgagaggcgagcccaacgtgagctacatctgcagcagatactacagagcccccgagctgatcttcggcgccaccgactacaccagcagcatcgacgtgtggagcgccggctgcgtgctggccgagctgctgctgggccagcccatcttccccggcgacagcggcgtggaccagctggtggagatcatcaaggtgctgggcacccccaccagagagcagatcagagagatgaaccccaactacaccgagttcaagttcccccagatcaaggcccacccctggaccaaggtgttcaagagcagaaccccccccgaggccatcgccctgtgcagcagcctgctggagtacacccccagcagcagactgagccccctggaggcctgcgcccacagcttcttcgacgagctgagatgcctgggcacccagctgcccaacaacagacccctgccccccctgttcaacttcagcgccggcgagctgagcatccagcccagcctgaacgccatcctgatccccccccacctgagaagccccgccggcaccaccaccctgacccccagcagccaggccctgaccgagacccccaccagcagcgactggcagagcaccgacgccacccccaccctgaccaacagcagctag

SEQ ID NO: 12616 - DNA, 1389 bp, synthetic construct
  source 1..1389: mol_type = other DNA; note = Synthetic coding sequence
atgggcggcgccgaggccgagccctggggcagagcccccggccccgccatcggcggcagaagagccggcgacagctgccccggctggagaagaagaagcagaagcagaggcagaggccagagactgagccacggccccagaagaagaccccagctgctgaccgccgccccccccctgcaggccagaggcgccttcagaagcttcccccacagctggggcgaggacttcctggccagcctgatgttcaagatccagctggagcccctgaagctgagagcctggaccctgaacggcttcgtgaagttcagaaacaaggagaccagcgccggccccgtggccgtgatgggcaaggactactacaagatcctgggcatccccagcggcgccaacgaggacgagatcaagaaggcctacagaaagatggccctgaagtaccaccccgacaagaacaaggagcccaacgccgaggagaagttcaaggagatcgccgaggcctacgacgtgctgagcgaccccaagaagagaggcctgtacgaccagtacggcgaggagggcctgaagaccggcggcggcaccagcggcggcagcagcggcagcttccactacaccttccacggcgacccccacgccaccttcgccagcttcttcggcggcagcaaccccttcgacatcttcttcgccagcagcagaagcaccagacccttcagcggcttcgaccccgacgacatggacgtggacgaggacgaggaccccttcggcgccttcggcagattcggcttcaacggcctgagcagaggccccagaagagcccccgagcccctgtaccccagaagaaaggtgcaggacccccccgtggtgcacgagctgagagtgagcctggaggagatctaccacggcagcaccaagagaatgaagatcaccagaagaagactgaaccccgacggcagaaccgtgagaaccgaggacaagatcctgcacatcgtgatcaagagaggctggaaggagggcaccaagatcaccttccccaaggagggcgacgccacccccgacaacatccccgccgacatcgtgttcgtgctgaaggacaagccccacgcccacttcagaagagacggcaccaacgtgctgtacagcgccctgatcagcctgaaggaggccctgtgcggctgcaccgtgaacatccccaccatcgacggcagagtgatccccctgccctgcaacgacgtgatcaagcccggcaccgtgaagagactgagaggcgagggcctgcccttccccaaggtgcccacccagagaggcgacctgatcgtggagttcaaggtgagattccccgacagactgaccccccagaccagacagatcctgaagcagcacctgccctgcagctag

SEQ ID NO: 12617 - DNA, 279 bp, synthetic construct
  source 1..279: mol_type = other DNA; note = Synthetic coding sequence
gtgtacggcgccaaggacatcgagctgagccccgaggcccaggccaagatcgacagatacacccagcagggcttcggcaacctgcccatctgcatggccaagacccacctgagcctgagccaccagcccgacaagaagggcgtgcccagagacttcatcctgcccatcagcgacgtgagagccagcatcggcgccggcttcatctaccccctggtgggcaccagaagcagccccctggccctggtgggcgagagccagcccaagcaggtgcacccctag

SEQ ID NO: 12618 - DNA, 468 bp, synthetic construct
  source 1..468: mol_type = other DNA; note = Synthetic coding sequence
atgagcgtgacctacgacgacagcgtgggcgtggaggtgagcagcgacagcttctgggaggtgggcaactacaagagaaccgtgaagagaatcgacgacggccacagactgtgcagcgacctgatgaactgcctgcacgagagagccagaatcgagaaggcctacgcccagcagctgaccgagtgggccagaagatggagacagctggtggagaagggcccccagtacggcaccgtggagaaggcctggatggccttcatgagcgaggccgagagagtgagcgagctgcacctggaggtgaaggccagcctgatgaacgacgacttcgagaagatcaagaactggcagaaggaggccttccacaagcagatgatgggcggcttcaaggagaccaaggaggccgaggacggcttcagaaaggcccagaagccctgggccaagaagctgaaggaggtgcacctgagctag

SEQ ID NO: 12619 - DNA, 483 bp, synthetic construct; identical to SEQ ID NO: 10977
  source 1..483: mol_type = other DNA; note = Synthetic coding sequence

SEQ ID NO: 12620 - DNA, 660 bp, synthetic construct; identical to SEQ ID NO: 12147
  source 1..660: mol_type = other DNA; note = Synthetic coding sequence

SEQ ID NO: 12621 - DNA, 318 bp, synthetic construct
  source 1..318: mol_type = other DNA; note = Synthetic coding sequence
atgaacatgatctggagaaacagcatcagctgcctgagactgggcaaggtgccccacagataccagagcggctaccaccccgtggcccccctgggcagcagaatcctgaccgaccccgccaaggtgttcgagcacaacatgtgggaccacatgcagtggagcaaggaggaggaggccgccgccagaaagaaggtgaaggagaacagcgccgtgagagtgctgctggaggagcaggtgaagtacgagagagaggccagcaagtactgggacaccttctacaagatccacaagaacaagttcttcaaggacagaaactag

SEQ ID NO: 12622 - DNA, 366 bp, synthetic construct
  source 1..366: mol_type = other DNA; note = Synthetic coding sequence
tgagagggcgagagccccaccgccagcccccacagcagcgccaccgacgacctgcaccacagcgacagataccagaccttcctgagagtgagagccaacagacagaccagactgaacgccagaatcggcaagatgaagagaagaaagcaggacgagggccaggtgtgccccctgtgcaacagacccctggccggcagcgagcaggagatgagcagacacgtggagcactgcctgagcaagagagagggcagctgcatggccgaggacgacgccgtggacatcgagcacgagaacaacaacagattcgaggagtacgagtggtgcggccagaagagaatcagagccaccaccctgctggagggctag

SEQ ID NO: 12623 - DNA, 1701 bp, synthetic construct; identical to SEQ ID NO: 10391
  source 1..1701: mol_type = other DNA; note = Synthetic coding sequence

SEQ ID NO: 12624 - DNA, 4719 bp, synthetic construct
  source 1..4719: mol_type = other DNA; note = Synthetic coding sequence
atgctgctgcacctgtgcagcgtgaagaacctgtaccagaacagattcctgggcctggccgccatggccagccccagcagaaacagccagagcagaagaagatgcaaggagcccctgagatacagctacaaccccgaccagttccacaacatggacctgagaggcggcccccacgacggcgtgaccatccccagaagcaccagcgacaccgacctggtgaccagcgacagcagaagcaccctgatggtgagcagcagctactacagcatcggccacagccaggacctggtgatccactgggacatcaaggaggaggtggacgccggcgactggatcggcatgtacctgatcgacgaggtgctgagcgagaacttcctggactacaagaacagaggcgtgaacggcagccacagaggccagatcatctggaagatcgacgccagcagctacttcgtggagcccgagaccaagatctgcttcaagtactaccacggcgtgagcggcgccctgagagccaccacccccagcgtgaccgtgaagaacagcgccgcccccatcttcaagagcatcggcgccgacgagaccgtgcagggccagggcagcagaagactgatcagcttcagcctgagcgacttccaggccatgggcctgaagaagggcatgttcttcaaccccgacccctacctgaagatcagcatccagcccggcaagcacagcatcttccccgccctgccccaccacggccaggagagaagaagcaagatcatcggcaacaccgtgaaccccatctggcaggccgagcagttcagcttcgtgagcctgcccaccgacgtgctggagatcgaggtgaaggacaagttcgccaagagcagacccatcatcaagagattcctgggcaagctgagcatgcccgtgcagagactgctggagagacacgccatcggcgacagagtggtgagctacaccctgggcagaagactgcccaccgaccacgtgagcggccagctgcagttcagattcgagatcaccagcagcatccaccccgacgacgaggagatcagcctgagcaccgagcccgagagcgcccagatccaggacagccccatgaacaacctgatggagagcggcagcggcgagcccagaagcgaggcccccgagagcagcgagagctggaagcccgagcagctgggcgagggcagcgtgcccgacggccccggcaaccagagcatcgagctgagcagacccgccgaggaggccgccgtgatcaccgaggccggcgaccagggcatggtgagcgtgggccccgagggcgccggcgagctgctggcccaggtgcagaaggacatccagcccgcccccagcgccgaggagctggccgagcagctggacctgggcgaggaggccagcgccctgctgctggaggacggcgaggcccccgccagcaccaaggaggagcccctggaggaggaggccaccacccagagcagagccggcagagaggaggaggagaaggagcaggaggaggagggcgacgtgagcaccctggagcagggcgagggcagactgcagctgagagccagcgtgaagagaaagagcagaccctgcagcctgcccgtgagcgagctggagaccgtgatcgccagcgcctgcggcgaccccgagacccccagaacccactacatcagaatccacaccctgctgcacagcatgcccagcgcccagggcggcagcgccgccgaggaggaggacggcgccgaggaggagagcaccctgaaggacagcagcgagaaggacggcctgagcgaggtggacaccgtggccgccgaccccagcgccctggaggaggacagagaggagcccgagggcgccacccccggcaccgcccaccccggccacagcggcggccacttccccagcctggccaacggcgccgcccaggacggcgacacccaccccagcaccggcagcgagagcgacagcagccccagacagggcggcgaccacagctgcgagggctgcgacgccagctgctgcagccccagctgctacagcagcagctgctacagcaccagctgctacagcagcagctgctacagcgccagctgctacagccccagctgctacaacggcaacagattcgccagccacaccagattcagcagcgtggacagcgccaagatcagcgagagcaccgtgttcagcagccaggacgacgaggaggaggagaacagcgccttcgagagcgtgcccgacagcatgcagagccccgagctggaccccgagagcaccaacggcgccggcccctggcaggacgagctggccgcccccagcggccacgtggagagaagccccgagggcctggagagccccgtggccggccccagcaacagaagagaggactgggaggccagaatcgacagccacggcagagtgttctacgtggaccacgtgaacagaaccaccacctggcagagacccaccgccgccgccacccccgacggcatgagaagaagcggcagcatccagcagatggagcagctgaacagaagataccagaacatccagagaaccatcgccaccgagagaagcgaggaggacagcggcagccagagctgcgagcaggcccccgccggcggcggcggcggcggcggcagcgacagcgaggccgagagcagccagagcagcctggacctgagaagagagggcagcctgagccccgtgaacagccagaagatcaccctgctgctgcagagccccgccgtgaagttcatcaccaaccccgagttcttcaccgtgctgcacgccaactacagcgcctacagagtgttcaccagcagcacctgcctgaagcacatgatcctgaaggtgagaagagacgccagaaacttcgagagataccagcacaacagagacctggtgaacttcatcaacatgttcgccgacaccagactggagctgcccagaggctgggagatcaagaccgaccagcagggcaagagcttcttcgtggaccacaacagcagagccaccaccttcatcgaccccagaatccccctgcagaacggcagactgcccaaccacctgacccacagacagcacctgcagagactgagaagctacagcgccggcgaggccagcgaggtgagcagaaacagaggcgccagcctgctggccagacccggccacagcctggtggccgccatcagaagccagcaccagcacgagagcctgcccctggcctacaacgacaagatcgtggccttcctgagacagcccaacatcttcgagatgctgcaggagagacagcccagcctggccagaaaccacaccctgagagagaagatccactacatcagaaccgagggcaaccacggcctggagaagctgagctgcgacgccgacctggtgatcctgctgagcctgttcgaggaggagatcatgagctacgtgcccctgcaggccgccttccaccccggctacagcttcagccccagatgcagcccctgcagcagcccccagaacagccccggcctgcagagagccagcgccagagcccccagcccctacagaagagacttcgaggccaagctgagaaacttctacagaaagctggaggccaagggcttcggccagggccccggcaagatcaagctgatcatcagaagagaccacctgctggagggcaccttcaaccaggtgatggcctacagcagaaaggagctgcagagaaacaagctgtacgtgaccttcgtgggcgaggagggcctggactacagcggccccagcagagagttcttcttcctgctgagccaggagctgttcaacccctactacggcctgttcgagtacagcgccaacgacacctacaccgtgcagatcagccccatgagcgccttcgtggagaaccacctggagtggttcagattcagcggcagaatcctgggcctggccctgatccaccagtacctgctggacgccttcttcaccagacccttctacaaggccctgctgagactgccctgcgacctgagcgacctggagtacctggacgaggagttccaccagagcctgcagtggatgaaggacaacaacatcaccgacatcctggacctgaccttcaccgtgaacgaggaggtgttcggccaggtgaccgagagagagctgaagagcggcggcgccaacacccaggtgaccgagaagaacaagaaggagtacatcgagagaatggtgaagtggagagtggagagaggcgtggtgcagcagaccgaggccctggtgagaggcttctacgaggtggtggacagcagactggtgagcgtgttcgacgccagagagctggagctggtgatcgccggcaccgccgagatcgacctgaacgactggagaaacaacaccgagtacagaggcggctaccacgacggccacctggtgatcagatggttctgggccgccgtggagagattcaacaacgagcagagactgagactgctgcagttcgtgaccggcaccagcagcgtgccctacgagggcttcgccgccctgagaggcagcaacggcctgagaagattctgcatcgagaagtggggcaagatcaccagcctgcccagagcccacacctgcttcaacagactggacctgcccccctaccccagctacagcatgctgtacgagaagctgctgaccgccgtggaggagaccagcaccttcggcctggagtag

SEQ ID NO: 12625 - DNA, 1629 bp, synthetic construct
  source 1..1629: mol_type = other DNA; note = Synthetic coding sequence
atgagcggcctggtgctgggccagagagacgagcccgccggccacagactgagccaggaggagatcctgggcagcaccagactggtgagccagggcctggaggccctgagaagcgagcaccaggccgtgctgcagagcctgagccagaccatcgagtgcctgcagcagggcggccacgaggagggcctggtgcacgagaaggccagacagctgagaagaagcatggagaacatcgagctgggcctgagcgaggcccaggaggagaaggagggcgacgccaccaaggacagcctggacgacctgttccccaacgaggaggaggaggaccccagcaacggcctgagcagaggccagggcgccaccgccgcccagcagggcggctacgagatccccgccagactgagaaccctgcacaacctggtgatccagtacgccgcccagggcagatacgaggtggccgtgcccctgtgcaagcaggccctggaggacctggagagaaccagcggcagaggccaccccgacgtggccaccatgctgaacatcctggccctggtgtacagagaccagaacaagtacaaggaggccgcccacctgctgaacgacgccctgagcatcagagagagcaccctgggccccgaccaccccgccgtggccgccaccctgaacaacctggccgtgctgtacggcaagagaggcaagtacaaggaggccgagcccctgtgccagagagccctggagatcagagagaaggtgctgggcaccaaccaccccgacgtggccaagcagctgaacaacctggccctgctgtgccagaaccagggcaagtacgaggccgtggagagatactaccagagagccctggccatctacgagggccagctgggccccgacaaccccaacgtggccagaaccaagaacaacctggccagctgctacctgaagcagggcaagtacgccgaggccgagaccctgtacaaggagatcctgaccagagcccacgtgcaggagttcggcagcgtggacgacgaccacaagcccatctggatgcacgccgaggagagagaggagatgagcaagagcagacaccacgagggcggcaccccctacgccgagtacggcggctggtacaaggcctgcaaggtgagcagccccaccgtgaacaccaccctgagaaacctgggcgccctgtacagaagacagggcaagctggaggccgccgagaccctggaggagtgcgccctgagaagcagaagacagggcaccgaccccatcagccagaccaaggtggccgagctgctgggcgagagcgacggcagaagaaccagccaggagggccccggcgacagcgtgaagttcgagggcggcgaggacgccagcgtggccgtggagtggagcggcgacggcagcggcaccctgcagagaagcggcagcctgggcaagatcagagacgtgctgagaagaagcagcgagctgctggtgagaaagctgcagggcaccgagcccagacccagcagcagcaacatgaagagagccgccagcctgaactacctgaaccagcccagcgccgcccccctgcaggtgagcagaggcctgagcgccagcaccatggacctgagcagcagcagctag

SEQ ID NO: 12626 - DNA, 1548 bp, synthetic construct
  source 1..1548: mol_type = other DNA; note = Synthetic coding sequence
atgtgccaggtgggcgaggactacggcgagcccgcccccgaggagcccccccccgcccccagacccagcagagagcagaagtgcgtgaagtgcaaggaggcccagcccgtggtggtgatcagagccggcgacgccttctgcagagactgcttcaaggccttctacgtgcacaagttcagagccatgctgggcaagaacagactgatcttccccggcgagaaggtgctgctggcctggagcggcggccccagcagcagcagcatggtgtggcaggtgctggagggcctgagccaggacagcgccaagagactgagattcgtggccggcgtgatcttcgtggacgagggcgccgcctgcggccagagcctggaggagagaagcaagaccctggccgaggtgaagcccatcctgcaggccaccggcttcccctggcacgtggtggccctggaggaggtgttcagcctgccccccagcgtgctgtggtgcagcgcccaggagctggtgggcagcgagggcgcctacaaggccgccgtggacagcttcctgcagcagcagcacgtgctgggcgccggcggcggccccggccccacccagggcgaggagcagcccccccagccccccctggacccccagaacctggccagaccccccgcccccgcccagaccgaggccctgagccagctgttctgcagcgtgagaaccctgaccgccaaggaggagctgctgcagaccctgagaacccacctgatcctgcacatggccagagcccacggctacagcaaggtgatgaccggcgacagctgcaccagactggccatcaagctgatgaccaacctggccctgggcagaggcgccttcctggcctgggacaccggcttcagcgacgagagacacggcgacgtggtggtggtgagacccatgagagaccacaccctgaaggaggtggccttctacaacagactgttcagcgtgcccagcgtgttcacccccgccgtggacaccaaggcccccgagaaggccagcatccacagactgatggaggccttcatcctgagactgcagacccagttccccagcaccgtgagcaccgtgtacagaaccagcgagaagctggtgaagggccccagagacggccccgccgccggcgacagcggccccagatgcctgctgtgcatgtgcgccctggacgtggacgccgccgacagcgccaccgccttcggcgcccagaccagcagcagactgagccagatgcagagccccatccccctgaccgagaccagaaccccccccggcccctgctgcagccccggcgtgggctgggcccagagatgcggccagggcgcctgcagaagagaggacccccaggcctgcatcgaggagcagctgtgctacagctgcagagtgaacatgaaggacctgcccagcctggaccccctgcccccctacatcctggccgaggcccagctgagaacccagagagcctggggcctgcaggagatcagagactgcctgatcgaggacagcgacgacgaggccggccagagctag

SEQ ID NO: 12627 - DNA, 1263 bp, synthetic construct
  source 1..1263: mol_type = other DNA; note = Synthetic coding sequence
atgttcaagagaaccgtgctgagctgccccccccccgccgccccccccctgcaggccagaggcgccttcagaagcttcccccacagctggggcgaggacttcctggccagcctgatgttcaagatccagctggagcccctgaagctgagagcctggaccctgaacggcttcgtgaagttcagaaacaaggagaccagcgccggccccgtggccgtgatgggcaaggactactacaagatcctgggcatccccagcggcgccaacgaggacgagatcaagaaggcctacagaaagatggccctgaagtaccaccccgacaagaacaaggagcccaacgccgaggagaagttcaaggagatcgccgaggcctacgacgtgctgagcgaccccaagaagagaggcctgtacgaccagtacggcgaggagggcctgaagaccggcggcggcaccagcggcggcagcagcggcagcttccactacaccttccacggcgacccccacgccaccttcgccagcttcttcggcggcagcaaccccttcgacatcttcttcgccagcagcagaagcaccagacccttcagcggcttcgaccccgacgacatggacgtggacgaggacgaggaccccttcggcgccttcggcagattcggcttcaacggcctgagcagaggccccagaagagcccccgagcccctgtaccccagaagaaaggtgcaggacccccccgtggtgcacgagctgagagtgagcctggaggagatctaccacggcagcaccaagagaatgaagatcaccagaagaagactgaaccccgacggcagaaccgtgagaaccgaggacaagatcctgcacatcgtgatcaagagaggctggaaggagggcaccaagatcaccttccccaaggagggcgacgccacccccgacaacatccccgccgacatcgtgttcgtgctgaaggacaagccccacgcccacttcagaagagacggcaccaacgtgctgtacagcgccctgatcagcctgaaggaggccctgtgcggctgcaccgtgaacatccccaccatcgacggcagagtgatccccctgccctgcaacgacgtgatcaagcccggcaccgtgaagagactgagaggcgagggcctgcccttccccaaggtgcccacccagagaggcgacctgatcgtggagttcaaggtgagattccccgacagactgaccccccagaccagacagatcctgaagcagcacctgccctgcagctag

SEQ ID NO: 12628 - DNA, 2979 bp, synthetic construct
  source 1..2979: mol_type = other DNA; note = Synthetic coding sequence
atgtacggcagcgccagaagcgtgggcaaggtggagcccagcagccagagccccggcagaagccccagactgcccagaagccccagactgggccacagaagaaccaacagcaccggcggcagcagcggcagcagcgtgggcggcggcagcggcaagaccctgagcatggagaacatccagagcctgaacgccgcctacgccaccagcggccccatgtacctgagcgaccacgagaacgtgggcagcgagacccccaagagcaccatgaccctgggcagaagcggcggcagactgccctacggcgtgagaatgaccgccatgggcagcagccccaacatcgccagcagcggcgtggccagcgacaccatcgccttcggcgagcaccacctgccccccgtgagcatggccagcaccgtgccccacagcctgagacaggccagagacaacaccatcatggacctgcagacccagctgaaggaggtgctgagagagaacgacctgctgagaaaggacgtggaggtgaaggagagcaagctgagcagcagcatgaacagcatcaagaccttctggagccccgagctgaagaaggagagagccctgagaaaggacgaggccagcaagatcaccatctggaaggagcagtacagagtggtgcaggaggagaaccagcacatgcagatgaccatccaggccctgcaggacgagctgagaatccagagagacctgaaccagctgttccagcaggacagcagcagcagaaccggcgagccctgcgtggccgagctgaccgaggagaacttccagagactgcacgccgagcacgagagacaggccaaggagctgttcctgctgagaaagaccctggaggagatggagctgagaatcgagacccagaagcagaccctgaacgccagagacgagagcatcaagaagctgctggagatgctgcagagcaagggcctgagcgccaaggccaccgaggaggaccacgagagaaccagaagactggccgaggccgagatgcacgtgcaccacctggagagcctgctggagcagaaggagaaggagaacagcatgctgagagaggagatgcacagaagattcgagaacgcccccgacagcgccaagaccaaggccctgcagaccgtgatcgagatgaaggacagcaagatcagcagcatggagagaggcctgagagacctggaggaggagatccagatgctgaagagcaacggcgccctgagcaccgaggagagagaggaggagatgaagcagatggaggtgtacagaagccacagcaagttcatgaagaacaagatcggccaggtgaagcaggagctgagcagaaaggacaccgagctgctggccctgcagaccaagctggagaccctgaccaaccagttcagcgacagcaagcagcacatcgaggtgctgaaggagagcctgaccgccaaggagcagagagccgccatcctgcagaccgaggtggacgccctgagactgagactggaggagaaggagaccatgctgaacaagaagaccaagcagatccaggacatggccgaggagaagggcacccaggccggcgagatccacgacctgaaggacatgctggacgtgaaggagagaaaggtgaacgtgctgcagaagaagatcgagaacctgcaggagcagctgagagacaaggagaagcagatgagcagcctgaaggagagagtgaagagcctgcaggccgacaccaccaacaccgacaccgccctgaccaccctggaggaggccctggccgagaaggagagaaccatcgagagactgaaggagcagagagacagagacgagagagagaagcaggaggagatcgacaactacaagaaggacctgaaggacctgaaggagaaggtgagcctgctgcagggcgacctgagcgagaaggaggccagcctgctggacctgaaggagcacgccagcagcctggccagcagcggcctgaagaaggacagcagactgaagaccctggagatcgccctggagcagaagaaggaggagtgcctgaagatggagagccagctgaagaaggcccacgaggccgccctggaggccagagccagccccgagatgagcgacagaatccagcacctggagagagagatcaccagatacaaggacgagagcagcaaggcccaggccgaggtggacagactgctggagatcctgaaggaggtggagaacgagaagaacgacaaggacaagaagatcgccgagctggagagcctgttcagcagacaggtgaaggaccagaacaagaaggtggccaacctgaagcacaaggagcaggtggagaagaagaagagcgcccagatgctggaggaggccagaagaagagaggacaacctgaacgacagcagccagcagctgcaggacagcctgagaaagaaggacgacagaatcgaggagctggaggaggccctgagagagagcgtgcagatcaccgccgagagagagatggtgctggcccaggaggagagcgccagaaccaacgccgagaagcaggtggaggagctgctgatggccatggagaaggtgaagcaggagctggagagcatgaaggccaagctgagcagcacccagcagagcctggccgagaaggagacccacctgaccaacctgagagccgagagaagaaagcacctggaggaggtgctggagatgaagcaggaggccctgctggccgccatcagcgagaaggacgccaacatcgccctgctggagctgagcagcagcaagaagaagacccaggaggaggtggccgccctgaagagagagaaggacagactggtgcagcagctgaagcagcagacccagaacagaatgaagctgatggccgacaactacgaggacgaccacttcaagagcagccacagcaaccagaccaaccacaagcccagccccgaccaggacgaggaggagggcatctgggcctag

SEQ ID NO: 12629 - DNA, 180 bp, synthetic construct
  source 1..180: mol_type = other DNA; note = Synthetic coding sequence
atggagcccagcgcccagcagctgcagctggccgccagcctgcccgccaacctgagcaacttctgccagggcagcgagatgcccaccaccagcagacccgccctggacgtgaagggcggcaccagccccgccaaggaggacgccaaccaggagatgagcagcgtggcctacagcaactag

SEQ ID NO: 12630 - DNA, 6978 bp, synthetic construct
  source 1..6978: mol_type = other DNA; note = Synthetic coding sequence
atgaagaagggcagccagcagaagatcttcagcaaggccaagatccccagcagcagccacagccccatccccagcagcatgagcaacatgagaagcagaagcctgagccccctgatcggcagcgagaccctgcccttccacagcggcggccagtggtgcgagcaggtggagatcgccgacgagaacaacatgctgctggactaccaggaccacaagggcgccgacagccacgccggcgtgagatacatcaccgaggccctgatcaagaagctgaccaagcaggacaacctggccctgatcaagagcctgaacctgagcctgagcaaggacggcggcaagaagttcaagtacatcgagaacctggagaagtgcgtgaagctggaggtgctgaacctgagctacaacctgatcggcaagatcgagaagctggacaagctgctgaagctgagagagctgaacctgagctacaacaagatcagcaagatcgagggcatcgagaacatgtgcaacctgcagaagctgaacctggccggcaacgagatcgagcacatccccgtgtggctgggcaagaagctgaagagcctgagagtgctgaacctgaagggcaacaagatcagcagcctgcaggacatcagcaagctgaagcccctgcaggacctgatcagcctgatcctggtggagaaccccgtggtgaccctgccccactacctgcagttcaccatcttccacctgagaagcctggagagcctggagggccagcccgtgaccacccaggacagacaggaggccttcgagagattcagcctggaggaggtggagagactggagagagacctggagaagaagatgatcgagaccgaggagctgaagagcaagcagaccagattcctggaggagatcaagaaccaggacaagctgaacaagagcctgaaggaggaggccatgctgcagaagcagagctgcgaggagctgaagagcgacctgaacaccaagaacgagctgctgaagcagaagaccatcgagctgaccagagcctgccagaagcagtacgagctggagcaggagctggccttctacaagatcgacgccaagttcgagcccctgaactactaccccagcgagtacgccgagatcgacaaggcccccgacgagagcccctacatcggcaagagcagatacaagagaaacatgttcgccaccgagagctacatcatcgacagcgcccaggccgtgcagatcaagaagatggagcccgacgagcagctgagaaacgaccacatgaacctgagaggccacacccccctggacacccagctggaggacaaggagaagaagatcagcgccgcccagaccagactgagcgagctgcacgacgagatcgagaaggccgagcagcagatcctgagagccaccgaggagttcaagcagctggaggaggccatccagctgaagaagatcagcgaggccggcaaggacctgctgtacaagcagctgagcggcagactgcagctggtgaacaagctgagacaggaggccctggacctggagctgcagatggagaagcagaagcaggagatcgccggcaagcagaaggagatcaaggacctgcagatcgccatcgacagcctggacagcaaggaccccaagcacagccacatgaaggcccagaagagcggcaaggagcagcagctggacatcatgaacaagcagtaccagcagctggagagcagactggacgagatcctgagcagaatcgccaaggagaccgaggagatcaaggacctggaggagcagctgaccgagggccagatcgccgccaacgaggccctgaagaaggacctggagggcgtgatcagcggcctgcaggagtacctgggcaccatcaagggccaggccacccaggcccagaacgagtgcagaaagctgagagacgagaaggagaccctgctgcagagactgaccgaggtggagcaggagagagaccagctggagatcgtggccatggacgccgagaacatgagaaaggagctggccgagctggagagcgccctgcaggagcagcacgaggtgaacgccagcctgcagcagacccagggcgacctgagcgcctacgaggccgagctggaggccagactgaacctgagagacgccgaggccaaccagctgaaggaggagctggagaaggtgaccagactgacccagctggagcagagcgccctgcaggccgagctggagaaggagagacaggccctgaagaacgccctgggcaaggcccagttcagcgaggagaaggagcaggagaacagcgagctgcacgccaagctgaagcacctgcaggacgacaacaacctgctgaagcagcagctgaaggacttccagaaccacctgaaccacgtggtggacggcctggtgagacccgaggaggtggccgccagagtggacgagctgagaagaaagctgaagctgggcaccggcgagatgaacatccacagccccagcgacgtgctgggcaagagcctggccgacctgcagaagcagttcagcgagatcctggccagaagcaagtgggagagagacgaggcccaggtgagagagagaaagctgcaggaggagatggccctgcagcaggagaagctggccaccggccaggaggagttcagacaggcctgcgagagagccctggaggccagaatgaacttcgacaagagacagcacgaggccagaatccagcagatggagaacgagatccactacctgcaggagaacctgaagagcatggaggagatccagggcctgaccgacctgcagctgcaggaggccgacgaggagaaggagagaatcctggcccagctgagagagctggagaagaagaagaagctggaggacgccaagagccaggagcaggtgttcggcctggacaaggagctgaagaagctgaagaaggccgtggccaccagcgacaagctggccaccgccgagctgaccatcgccaaggaccagctgaagagcctgcacggcaccgtgatgaagatcaaccaggagagagccgaggagctgcaggaggccgagagattcagcagaaaggccgcccaggccgccagagacctgaccagagccgaggccgagatcgagctgctgcagaacctgctgagacagaagggcgagcagttcagactggagatggagaagaccggcgtgggcaccggcgccaacagccaggtgctggagatcgagaagctgaacgagaccatggagagacagagaaccgagatcgccagactgcagaacgtgctggacctgaccggcagcgacaacaagggcggcttcgagaacgtgctggaggagatcgccgagctgagaagagaggtgagctaccagaacgactacatcagcagcatggccgaccccttcaagagaagaggctactggtacttcatgccccccccccccagcagcaaggtgagcagccacagcagccaggccaccaaggacagcggcgtgggcctgaagtacagcgccagcacccccgtgagaaagcccagacccggccagcaggacggcaaggagggcagccagcccccccccgccagcggctactgggtgtacagccccatcagaagcggcctgcacaagctgttccccagcagagacgccgacagcggcggcgacagccaggaggagagcgagctggacgaccaggaggagccccccttcgtgcccccccccggctacatgatgtacaccgtgctgcccgacggcagccccgtgccccagggcatggccctgtacgccccccccccccccctgcccaacaacagcagacccctgacccccggcaccgtggtgtacggccccccccccgccggcgcccccatggtgtacggcccccccccccccaacttcagcatccccttcatccccatgggcgtgctgcactgcaacgtgcccgagcaccacaacctggagaacgaggtgagcagactggaggacatcatgcagcacctgaagagcaagaagagagaggagagatggatgagagccagcaagagacagagcgagaaggagatggaggagctgcaccacaacatcgacgacctgctgcaggagaagaagagcctggagtgcgaggtggaggagctgcacagaaccgtgcagaagagacagcagcagaaggacttcatcgacggcaacgtggagagcctgatgaccgagctggagatcgagaagagcctgaagcaccacgaggacatcgtggacgagatcgagtgcatcgagaagaccctgctgaagagaagaagcgagctgagagaggccgacagactgctggccgaggccgagagcgagctgagctgcaccaaggagaagaccaagaacgccgtggagaagttcaccgacgccaagagaagcctgctgcagaccgagagcgacgccgaggagctggagagaagagcccaggagaccgccgtgaacctggtgaaggccgaccagcagctgagaagcctgcaggccgacgccaaggacctggagcagcacaagatcaagcaggaggagatcctgaaggagatcaacaagatcgtggccgccaaggacagcgacttccagtgcctgagcaagaagaaggagaagctgaccgaggagctgcagaagctgcagaaggacatcgagatggccgagagaaacgaggaccaccacctgcaggtgctgaaggagagcgaggtgctgctgcaggccaagagagccgagctggagaagctgaagagccaggtgaccagccagcagcaggagatggccgtgctggacagacagctgggccacaagaaggaggagctgcacctgctgcagggcagcatggtgcaggccaaggccgacctgcaggaggccctgagactgggcgagaccgaggtgaccgagaagtgcaaccacatcagagaggtgaagagcctgctggaggagctgagcttccagaagggcgagctgaacgtgcagatcagcgagagaaagacccagctgaccctgatcaagcaggagatcgagaaggaggaggagaacctgcaggtggtgctgagacagatgagcaagcacaagaccgagctgaagaacatcctggacatgctgcagctggagaaccacgagctgcagggcctgaagctgcagcacgaccagagagtgagcgagctggagaagacccaggtggccgtgctggaggagaagctggagctggagaacctgcagcagatcagccagcagcagaagggcgagatcgagtggcagaagcagctgctggagagagacaagagagagatcgagagaatgaccgccgagagcagagccctgcagagctgcgtggagtgcctgagcaaggagaaggaggacctgcaggagaagtgcgacatctgggagaagaagctggcccagaccaagagagtgctggccgccgccgaggagaacagcaagatggagcagagcaacctggagaagctggagctgaacgtgagaaagctgcagcaggagctggaccagctgaacagagacaagctgagcctgcacaacgacatcagcgccatgcagcagcagctgcaggagaagagagaggccgtgaacagcctgcaggaggagctggccaacgtgcaggaccacctgaacctggccaagcaggacctgctgcacaccaccaagcaccaggacgtgctgctgagcgagcagaccagactgcagaaggacatcagcgagtgggccaacagattcgaggactgccagaaggaggaggagaccaagcagcagcagctgcaggtgctgcagaacgagatcgaggagaacaagctgaagctggtgcagcaggagatgatgttccagagactgcagaaggagagagagagcgaggagagcaagctggagaccagcaaggtgaccctgaaggagcagcagcaccagctggagaaggagctgaccgaccagaagagcaagctggaccaggtgctgagcaaggtgctggccgccgaggagagagtgagaaccctgcaggaggaggagagatggtgcgagagcctggagaagaccctgagccagaccaagagacagctgagcgagagagagcagcagctggtggagaagagcggcgagctgctggccctgcagaaggaggccgacagcatgagagccgacttcagcctgctgagaaaccagttcctgaccgagagaaagaaggccgagaagcaggtggccagcctgaaggaggccctgaagatccagagaagccagctggagaagaacctgctggagcagaagcaggagaacagctgcatccagaaggagatggccaccatcgagctggtggcccaggacaaccacgagagagccagaagactgatgaaggagctgaaccagatgcagtacgagtacaccgagctgaagaagcagatggccaaccagaaggacctggagagaagacagatggagatcagcgacgccatgagaaccctgaagagcgaggtgaaggacgagatcagaaccagcctgaagaacctgaaccagttcctgcccgagctgcccgccgacctggaggccatcctggagagaaacgagaacctggagggcgagctggagagcctgaaggagaacctgcccttcaccatgaacgagggccccttcgaggagaagctgaacttcagccaggtgcacatcatggacgagcactggagaggcgaggccctgagagagaagctgagacacagagaggacagactgaaggcccagctgagacactgcatgagcaagcaggccgaggtgctgatcaagggcaagagacagaccgagggcaccctgcacagcctgagaagacaggtggacgccctgggcgagctggtgaccagcaccagcgccgacagcgccagcagccccagcctgagccagctggagagcagcctgaccgaggacagccagctgggccagaaccagaagcagaacaacagcctgagatag

SEQ ID NO: 12631 - DNA, 657 bp, synthetic construct
  source 1..657: mol_type = other DNA; note = Synthetic coding sequence
atggacgagctggtgaccctggaggaggccgacggcggcagcgacatcctgctggtggtgcccaaggccaccgtgctgcagaaccagctggacgagagccagcaggagagaaacgacctgatgcagctgaagctgcagctggagggccaggtgaccgagctgagaagcagagtgcaggagctggagagagccctggccaccgccagacaggagcacaccgagctgatggagcagtacaagggcatcagcagaagccacggcgagatcaccgaggagagagacatcctgagcagacagcagggcgaccacgtggccagaatcctggagctggaggacgacatccagaccatcagcgagaaggtgctgaccaaggaggtggagctggacagactgagagacaccgtgaaggccctgaccagagagcaggagaagctgctgggccagctgaaggaggtgcaggccgacaaggagcagagcgaggccgagctgcaggtggcccagcaggagaaccaccacctgaacctggacctgaaggaggccaagagctggcaggaggagcagagcgcccaggcccagagactgaaggacaaggtggcccagatgaaggacaccctgggccaggcccagcagagagtgagacccagctggagcccctag

SEQ ID NO: 12632 - DNA, 693 bp, synthetic construct
  source 1..693: mol_type = other DNA; note = Synthetic coding sequence
atgaagaagcccagacccgccgccgccgcccccagccccagaccccccgcctgcagcagaggcgcccaccccggcaccgccagcgagctgagagtgcccgccctgagaagaggcggctgcggcgacagaagactgagagaggaggccgcccccgagcaggccgccgccggccccagaagaagcaccgtgggcgccctgctggccagcgagctgggctggaagttctacgacgccgacgactaccaccccgaggagaacagaagaaagatgggcaagggcatccccctgaacgaccaggacagaatcccctggctgtgcaacctgcacgacatcctgctgagagacgtggccagcggccagagagtggtgctggcctgcagcgccctgaagaagacctacagagacatcctgacccagggcaaggacggcgtggccctgaagtgcgaggagagcggcaaggaggccaagcaggccgagatgcagctgctggtggtgcacctgagcggcagcttcgaggtgatcagcggcagactgctgaagagagagggccacttcatgccccccgagctgctgcagagccagttcgagaccctggagccccccgccgcccccgagaacttcatccagatcagcgtggacaagaacgtgagcgagatcatcgccaccatcatggagaccctgaagatgaagtag

SEQ ID NO: 12633 - DNA, 957 bp, synthetic construct
  source 1..957: mol_type = other DNA; note = Synthetic coding sequence
atgtgcagaaccgccctgggcgtgaccaccctgcaggacctgggcgtgtgctggagaaaggagcacgaccccgccgagatgctgagagtgggcagagccgagctgggcggctggaagcccagctgggaggccatcgtgaaggaggtggccgccgccaccggccacaccgtggtgctggtggaccagaccgaggacatcctggccaagagcaagaagggcatcgaggagagcctgagaaaggtggccaagaagaagttcgccgagaacctgaaggccggcgacgagttcgtggagaagaccctgagcaccatcgccaccagcaccgacgccgccagcgtggtgcacagcaccgacctggtggtggaggccatcgtggagaacctgaaggtgaagaacgagctgttcaagagactggacaagttcgccgccgagcacaccatcttcgccagcaacaccagcagcctgcagatcaccagcatcgccaacgccaccaccagacaggacagattcgccggcctgcacttcttcaaccccgtgcccgtgatgaagctggtggaggtgatcaagacccccatgaccagccagaagaccttcgagagcctggtggacttcagcaaggccctgggcaagcaccccgtgagctgcaaggacacccccggcttcatcgtgaacagactgctggtgccctacctgatggaggccatcagactgtacgagagaggcgacgccagcaaggaggacatcgacaccgccatgaagctgggcgccggctaccccatgggccccttcgagctgctggactacgtgggcctggacaccaccaagttcatcgtggacggctggcacgagatggacgccgagaaccccctgcaccagcccagccccagcctgaacaagctggtggccgagaacaagttcggcaagaagaccggcgagggcttctacaagtacaagtag

SEQ ID NO: 12634 - DNA, 666 bp, synthetic construct
  source 1..666: mol_type = other DNA; note = Synthetic coding sequence
atggccatcgtgcagaccctgcccgtgcccctggagcccgcccccgaggccgccaccgccccccaggcccccgtgatgggcagcgtgagcagcctgatcagcggcagaccctgccccggcggccccgccccccccagacaccacggcccccccggccccaccttcttcagacagcaggacggcctgctgagaggcggctacgaggcccaggagcccctgtgccccgccgtgccccccagaaaggccgtgcccgtgaccagcttcacctacatcaacgaggacttcagaaccgagagcccccccagccccagcagcgacgtggaggacgccagagagcagagagcccacaacgcccacctgagaggccccccccccaagctgatccccgtgagcggcaagctggagaagaacatggagaagatcctgatcagacccaccgccttcaagcccgtgctgcccaagcccagaggcgcccccagcctgcccagcttcatgggccccagagccaccggcctgagcggcagccagggcagcctgacccagctgttcggcggccccgccagcagcagcagcagcagcagcagcagcagcgccgccgacaagcccctggccttcagcggctgggccagcggctgccccagcggcaccctgagcgacagcggctag

SEQ ID NO: 12635 - DNA, 585 bp, synthetic construct
  source 1..585: mol_type = other DNA; note = Synthetic coding sequence
atgagagagctggccgccgtggtgagcagagacatctacctgcacaaccccaacatcaagtggaacgacatcatcggcctggacgccgccaagcagctggtgaaggaggccgtggtgtaccccatcagatacccccagctgttcaccggcatcctgagcccctggaagggcctgctgctgtacggcccccccggcaccggcaagaccctgctggccaaggccgtggccaccgagtgcaagaccaccttcttcaacatcagcgccagcaccatcgtgagcaagtggagaggcgacagcgagaagctggtgagagtgctgttcgagctggccagataccacgcccccagcaccatcttcctggacgagctggagagcgtgatgagccagagaggcaccgccagcggcggcgagcacgagggcagcctgagaatgaagaccgagctgctggtgcagatggacggcctggccagaagcgaggacctggtgttcgtgctggccgccagcaacctgccctgcctgaaggccatcgccctgcagcccggcgacagagccagactgagactgaagaagaagaagtgcacctag

SEQ ID NO: 12636 - DNA, 555 bp, synthetic construct
  source 1..555: mol_type = other DNA; note = Synthetic coding sequence
atgaccttccagttcaacttcaccatcgaggaccacctggagaacgagctgacccccatcagagacggcgccctgaccctggacagcagcaaggagctgagcgtgagcgagagccagaagggcgaggagagagacagaaagtgcagcgccgagcagttcgacctgccccaggaccacctgtgggagcacaagagcatggagaacgccgcccccagccaggacaccgacagccccctgagcgccgccagcagcagcagaaacctggagccccacggcaagcagcccagcctgagagccgccaaggagcacgccatgcccaaggacctgaagaagatgctggagaacaaggtgatcgagaccctgcccggcttccagcacgtgaagctgagcgtggtgaagaccatcctgctgaaggagaacttccccggcgagaacatcgtgagcaagagcttcagcagccacagcgacctgatcaccggcgtgtacgagggcggcctgaagatctgggagtgcaccttcgacctgctggcctacttcaccaaggccaaggtgtag

SEQ ID NO: 12637 - DNA, 354 bp, synthetic construct
  source 1..354: mol_type = other DNA; note = Synthetic coding sequence
atggtgctgatcctgggcagaagactgaacagagaggacctgggcgtgagagacagccccgccaccaagagaaaggtgttcgagatggaccccaagagcctgaccggccacgagttcttcgacttcagcagcggcagcagccacgccgagaacatcctgcagatcttcaacgagttcagagacagcagactgttcaccgacgtgatcatctgcgtggagggcaaggagttcccctgccacagagccgtgctgagcgcctgcagcagctacttcagagccatgttctgcaacgaccacagagagagcagagagatgctggtggagatcaacggcatcctggccgaggccatgtag

SEQ ID NO: 12638 - DNA, 498 bp, synthetic construct
  source 1..498: mol_type = other DNA; note = Synthetic coding sequence
atgatcctgaacgtgctggagtacggcagccagcaggtggccgacctgaccctgaacctggacgactacatcgacgccgagcacctgggcgacttccacagaacctacaagaacagcgaggagctgagaagcagaatcgtgagcggcatcatcacccccatccacgagcagtgggagaaggccaacgtgagcagcccccacagagagttcccccccgccaccgccagagaggtggaccccctgagaatccccccccaccacccccacaccagcagacagcccccctggcccagaagaggcggcatgatcgtggaccccctgagaagcggcttccccagagccctgatcgaccccagcagcggcctgcccaacagactgccccccggcgccgtgccccccggcgccagattcgaccccttcggccccatcggcaccagcccccccggccccaaccccgaccacctgcccccccccggctacgacgacatgtacctgtag

SEQ ID NO: 12639 - DNA, 369 bp, synthetic construct
  source 1..369: mol_type = other DNA; note = Synthetic coding sequence
gccctgaccttcagcctgagagccggcgccgccagcgcccaggacggcagatgcccctgcggcgccagaagacccgacagcagactgctgcagctgcacatcaccatgcccttcagcagccccatggaggccgagctggtgagaagaatcctgagcagagacgccgcccccctgcccagacccggcgccgtgctgaaggacttcaccgtgagcggcaacctgctgttcatcagactgaccgccgccgaccacagacagctgcagctgagcatcagcagctgcctgcagcagctgagcctgctgatgtggatcacccagtgcttcctgcccgtgttcctggcccaggcccccagcggccagagaagatag

SEQ ID NO: 12640 - DNA, 2415 bp, synthetic construct
  source 1..2415: mol_type = other DNA; note = Synthetic coding sequence
atgaagagcatcggcgtgaagaccgtgaaggtgtgcggcagcaagagcagcgtgagaatcgagggccagccctgcagcctgggccagagcagaagaaaggtgaagctgatgggcgagagaagctacaccctgagcatcggcaacggcgactacttctgggccaacaaggagatgctgtgggactacgtgcagaccctgagcgaccagggcgccgagaagcacgagggcaccggccagagcagcggcatcaccgaccaggagaaggagctgagcaccaacgccttccaggccttcaccagcggcaactacgacgcctgcctgcagcacctggcctgcctgcaggacatcaacaaggacgactacaagatcatcctgaacaccgccgtggccgagttcttcaagagcaaccagaccaccaccgacaacctgagacagaccctgaaccagctgaagaaccaggtgcacagcgccgtggaggagatggacggcctggacgacgtggagaacagcatgctgtactacaaccaggccgtgatcctgtaccacctgagacagtacaccgaggccatcagcgtgggcgagaagctgtaccagttcatcgagcccttcgaggagaagttcgcccaggccgtgtgcttcctgctggtggacctgtacatcctgacctaccaggccgagaaggccctgcacctgctggccgtgctggagaagatgatcagccagggcaacaacaacaagaacggcaagaacgagaccggcaacaacaacaacaaggacggcagcaaccacaaggccgagagcggcgccctgatcgaggccgccaagagcaagatccaccagtacaaggtgagagcctacatccagatgaagagcctgaaggcctgcaagagagagatcaagagcgtgatgaacaccgccggcaacagcgcccccagcctgttcctgaagagcaacttcgagtacctgagaggcaactacagaaaggccgtgaagctgctgaacagcagcaacatcgccgagcaccccggcttcatgaagaccggcgagtgcctgagatgcatgttctggaacaacctgggctgcatccacttcgccatgagcaagcacaacctgggcatcttctacttcaagaaggccctgcaggagaacgacaacgtgtgcgcccagctgagcgccggcagcaccgaccccggcaagaagttcagcggcagacccatgtgcaccctgctgaccaacaagagatacgagctgctgtacaactgcggcatccagctgctgcacatcggcagacccctggccgccttcgagtgcctgatcgaggccgtgcaggtgtaccacgccaaccccagactgtggctgagactggccgagtgctgcatcgccgccaacaagggcaccagcgagcaggagaccaagggcctgcccagcaagaagggcatcgtgcagagcatcgtgggccagggctaccacagaaagatcgtgctggccagccagagcatccagaacaccgtgtacaacgacggccagagcagcgccatccccgtggccagcatggagttcgccgccatctgcctgagaaacgccctgctgctgctgcccgaggagcagcaggaccccaagcaggagaacggcgccaagaacagcaaccagctgggcggcaacaccgagagcagcgagagcagcgagacctgcagcagcaagagccacgacggcgacaagttcatccccgccccccccagcagccccctgagaaagcaggagctggagaacctgaagtgcagcatcctggcctgcagcgcctacgtggccctggccctgggcgacaacctgatggccctgaaccacgccgacaagctgctgcagcagcccaagctgagcggcagcctgaagttcctgggccacctgtacgccgccgaggccctgatcagcctggacagaatcagcgacgccatcacccacctgaaccccgagaacgtgaccgacgtgagcctgggcatcagcagcaacgagcaggaccagggcagcgacaagggcgagaacgaggccatggagagcagcggcaagagagccccccagtgctaccccagcagcgtgaacagcgccagaaccgtgatgctgttcaacctgggcagcgcctactgcctgagaagcgagtacgacaaggccagaaagtgcctgcaccaggccgccagcatgatccaccccaaggaggtgccccccgaggccatcctgctggccgtgtacctggagctgcagaacggcaacacccagctggccctgcagatcatcaagagaaaccagctgctgcccgccgtgaagacccacagcgaggtgagaaagaagcccgtgttccagcccgtgcaccccatccagcccatccagatgcccgccttcaccaccgtgcagagaaagtag

SEQ ID NO: 12641 - DNA, 1899 bp, synthetic construct; identical to SEQ ID NO: 9855
  source 1..1899: mol_type = other DNA; note = Synthetic coding sequence

SEQ ID NO: 12642 - DNA, 585 bp, synthetic construct
  source 1..585: mol_type = other DNA; note = Synthetic coding sequence
atggaggacctgttcgagaccttccaggacgagatgggcttcagcaacatggaggacgacggccccgaggaggaggagagagtggccgagccccaggccaacttcaacaccccccaggccctgagattcgaggagctgctggccaacctgctgaacgagcagcaccagatcgccaaggagctgttcgagcagctgaagatgaagaagcccagcgccaagcagcagaaggaggtggagaaggtgaagccccagtgcaaggaggtgcaccagaccctgatcctggaccccgcccagagaaagagactgcagcagcagatgcagcagcacgtgcagctgctgacccagatccacctgctggccacctgcaaccccaacctgaaccccgaggccagcagcaccagaatctgcctgaaggagctgggcaccttcgcccagagcagcatcgccctgcaccaccagtacaaccccaagttccagaccctgttccagccctgcaacctgatgggcgccatgcagctgatcgaggacttcagcacccacgtgagcatcgactgcagcccccacaagaccgtgaagaagacctag

SEQ ID NO: 12643 - DNA, 1803 bp, synthetic construct; identical to SEQ ID NO: 9298
  source 1..1803: mol_type = other DNA; note = Synthetic coding sequence

SEQ ID NO: 12644 - DNA, 1620 bp, synthetic construct; identical to SEQ ID NO: 10018
  source 1..1620: mol_type = other DNA; note = Synthetic coding sequence

SEQ ID NO: 12645 - DNA, 567 bp, synthetic construct
  source 1..567: mol_type = other DNA; note = Synthetic coding sequence
tgatacgtgaacgccgtggacagcagatggagcagctacggcaacgaggccaccagcagcgcccactacgtggagagagacagattcatcgtgaccgacctgagcggccacagaaagcacagcagcaccggcgacctgctgagcctggagctgcagcaggccaagagcaacagcctgctgctgcagagagaggccaacgccctggccatgcagcagaagtggaacagcctggacgagggcagacacctgaccctgaacctgctgagcaaggagatcgagctgagaaacggcgagctgcagagcgactacaccgaggacgccaccgacaccaagcccgacagagacatcgagctggagctgagcgccctggacaccgacgagcccgacggccagagcgagcccatcgaggagatcctggacatccagctgggcatcagcagccagaacgaccagctgctgaacggcatggccgtggagaacggccaccccgtgcagcagcaccagaaggagccccccaagcagaagaagcagagcctgggcagaagcaagaagcagttctgcagatag

SEQ ID NO: 12646 - DNA, 1806 bp, synthetic construct
  source 1..1806: mol_type = other DNA; note = Synthetic coding sequence
atggaggagaccatgaagctggccaccatggaggacaccgtggagtactgcctgttcctgatccccgacgagagcagagacagcgacaagcacaaggagatcctgcagaagtacatcgagagaatcatcaccagattcgcccccatgctggtgccctacatctggcagaaccagcccttcaacctgaagtacaagcccggcaagggcggcgtgcccgcccacatgttcggcgtgaccaagttcggcgacaacatcgaggacgagtggttcatcgtgtacgtgatcaagcagatcaccaaggagttccccgagctggtggccagaatcgaggacaacgacggcgagttcctgctgatcgaggccgccgacttcctgcccaagtggctggaccccgagaacagcaccaacagagtgttcttctgccacggcgagctgtgcatcatccccgcccccagaaagagcggcgccgagagctggctgcccaccaccccccccaccatcccccaggccctgaacatcatcaccgcccacagcgagaagatcctggccagcgagagcatcagagccgccgtgaacagaagaatcagaggctaccccgagaagatccaggccagcctgcacagagcccactgcttcctgcccgccggcatcgtggccgtgctgaagcagagacccagactggtggccgccgccgtgcaggccttctacctgagagaccccatcgacctgagagcctgcagagtgttcaagaccttcctgcccgagaccagaatcatgaccagcgcccacggcttcgagatcctgtgcagcaagtgcagcccccacttcagcgactgcaagaagagcctggtgaccgccagccccctgtgggccagcttcctggagagcctgaagaagaacgactacttcaagggcctgatcgagggcagcgcccagtacagagagagactggagatggccgagaactacttccagctgagcgtggactggcccgagagcagcctggccatgagccccggcgaggagatcctgaccctgctgcagaccatccccttcgacatcgaggacctgaagaaggaggccgccaacctgccccccgaggacgacgaccagtggctggacctgagccccgaccagctggaccagctgctgcaggaggccgtgggcaagaaggagagcgagagcgtgagcaaggaggagaaggagcagaactacgacctgaccgaggtgagcgagagcatgaaggccttcatcagcaaggtgagcacccacaagggcgccgagctgcccagagagcccagcgaggcccccatcaccttcgacgccgacagcttcctgaactacttcgacaagatcctgggccccagacccaacgagagcgacagcgacgacctggacgacgaggacttcgagtgcctggacagcgacgacgacctggacttcgagacccacgagcccggcgaggaggccagcctgaagggcaccctggacaacctgaagagctacatggcccagatggaccaggagctggcccacacctgcatcagcaagagcttcaccaccagaaaccaggtggagcccgtgagccagaccaccgacaacaacagcgacgaggaggacagcggcaccggcgagagcgtgatggcccccgtggacgtggacctgaacctggtgagcaacatcctggagagctacagcagccaggccggcctggccggccccgccagcaacctgctgcagagcatgggcgtgcagctgcccgacaacaccgaccacagacccaccagcaagcccaccaagaactag

SEQ ID NO: 12647 - DNA, 405 bp, synthetic construct
  source 1..405: mol_type = other DNA; note = Synthetic coding sequence
atgaagaagaagcacgacggcatcgtgtacgagaccaaggaggtgctgaaccccagccccaaggtgacccactgctgcaagagcctgtggctgaagtacagcttccagaaggcctacatgacccagctggtgagcagccagcccgtgcccgccatgagcagaaaccccgaccacaacctgctgagccagcccaaggagcacagcatcgtgcagaagcaccaccaggaggagatcatccacaagctggccatgcagctgagacacatcggcgacaacatcgaccacagaatggtgagagaggacctgcagcaggacggcagagacgccctggaccacttcgtgttcttcttcttcagaagagtgcaggtgctgctgcacttcttctggaacaaccacctgctgtag

SEQ ID NO: 12648 - DNA, 1791 bp, synthetic construct
  source 1..1791: mol_type = other DNA; note = Synthetic coding sequence
atggaggacgccccccagagactgagatggcaggcccacctggagttcacccacaaccacgacgtgggcgacctgacctgggacaagatcgccgtgagcctgcccagaagcgagaagctgagaagcctggtgctggccggcatcccccacggcatgagaccccagctgtggatgagactgagcggcgccctgcagaagaagagaaacagcgagctgagctacagagagatcgtgaagaacagcagcaacgacgagaccatcgccgccaagcagatcgagaaggacctgctgagaaccatgcccagcaacgcctgcttcgccagcatgggcagcatcggcgtgcccagactgagaagagtgctgagagccctggcctggctgtaccccgagatcggctactgccagggcaccggcatggtggccgcctgcctgctgctgttcctggaggaggaggacgccttctggatgatgagcgccatcatcgaggacctgctgcccgccagctacttcagcaccaccctgctgggcgtgcagaccgaccagagagtgctgagacacctgatcgtgcagtacctgcccagactggacaagctgctgcaggagcacgacatcgagctgagcctgatcaccctgcactggttcctgaccgccttcgccagcgtggtggacatcaagctgctgctgagaatctgggacctgttcttctacgagggcagcagagtgctgttccagctgaccctgggcatgctgcacctgaaggaggaggagctgatccagagcgagaacagcgccagcatcttcaacaccctgagcgacatccccagccagatggaggacgccgagctgctgctgggcgtggccatgagactggccggcagcctgaccgacgtggccgtggagacccagagaagaaagcacctggcctacctgatcgccgaccagggccagctgctgggcgccggcaccctgaccaacctgagccaggtggtgagaagaagaacccagagaagaaagagcaccatcaccgccctgctgttcggcgaggacgacctggaggccctgaaggccaagaacatcaagcagaccgagctggtggccgacctgagagaggccatcctgagagtggccagacacttccagtgcaccgaccccaagaactgcagcgtggagctgacccccgactacagcatggagagccaccagagagaccacgagaactacgtggcctgcagcagaagccacagaagaagagccaaggccctgctggacttcgagagacacgacgacgacgagctgggcttcagaaagaacgacatcatcaccatcgtgagccagaaggacgagcactgctgggtgggcgagctgaacggcctgagaggctggttccccgccaagttcgtggaggtgctggacgagagaagcaaggagtacagcatcgccggcgacgacagcgtgaccgagggcgtgaccgacctggtgagaggcaccctgtgccccgccctgaaggccctgttcgagcacggcctgaagaagcccagcctgctgggcggcgcctgccacccctggctgttcatcgaggaggccgccggcagagaggtggagagagacttcgccagcgtgtacagcagactggtgctgtgcaagaccttcagactggacgaggacggcaaggtgctgacccccgaggagctgctgtacagagccgtgcagagcgtgaacgtgacccacgacgccgtgcacgcccagatggacgtgaagctgagaagcctgatctgcgtgggcctgaagtag

SEQ ID NO: 12649 - DNA, 399 bp, synthetic construct
  source 1..399: mol_type = other DNA; note = Synthetic coding sequence
atggagagcagagtggccgacgccggcaccggcgagaccgccagagccgccggcggcagccccgccgtgggctgcaccaccagaggccccgtggtgagcgcccccctgggcgccgccagatggaagctgctgagacaggtgctgaagcagaagcacctggacgactgcctgagacacgtgagcgtgagaagattcgagagcttcaacctgttcagcgtgaccgagggcaaggagagagagaccgaggaggaggtgggcgcctgggtgcagtacaccagcatcttctgccccgagtacagcatcagcctgagacacaacagcggcagcctgaacgtggaggacgtgctgaccagcttcgacaacaccggcaacgtgtggagcttcagcagaggcaagtag

SEQ ID NO: 12650 - DNA, 1620 bp, synthetic construct; identical to SEQ ID NO: 10018
  source 1..1620: mol_type = other DNA; note = Synthetic coding sequence

SEQ ID NO: 12651 - DNA, 2193 bp, synthetic construct
  source 1..2193: mol_type = other DNA; note = Synthetic coding sequence
atgaacaacagcagcagcgagaccagaggccacccccacagcgccagcagccccagcgagagagtgttccccatgcccctgcccagaaaggcccccctgaacatccccggcacccccgtgctggaggacttcccccagaacgacgacgagaaggagagactgcagagaagaagaagcagagtgttcgacctgcagttcagcaccgacagccccagactgctggccagccccagcagcagaagcatcgacatcagcgccaccatccccaagttcaccaacacccagatcaccgagcactacagcacctgcatcaagctgagcaccgagaacaagatcaccaccaagaacgccttcggcctgcacctgatcgacttcatgagcgagatcctgaagcagaaggacaccgagcccaccaacttcaaggtggccgccggcaccctggacgccagcaccaagatctacgccgtgagagtggacgccgtgcacgccgacgtgtacagagtgctgggcggcctgggcaaggacgcccccagcctggaggaggtggagggccacgtggccgacggcagcgccaccgagatgggcaccaccaagaaggccgtgaagcccaagaagaagcacctgcacagaaccatcgagcagaacatcaacaacctgaacgtgagcgaggccgacagaaagtgcgagatcgaccccatgttccagaagaccgccgccagcttcgacgagtgcagcaccgccggcgtgttcctgagcaccctgcactgccaggactacagaagcgagctgctgttccccagcgacgtgcagaccctgagcaccggcgagcccctggagctgcccgagctgggctgcgtggagatgaccgacctgaaggcccccctgcagcagtgcgccgaggacagacagatctgccccagcctggccggcttccagttcacccagtgggacagcgagacccacaacgagagcgtgagcgccctggtggacaagttcaagaagaacgaccaggtgttcgacatcaacgccgaggtggacgagagcgactgcggcgacttccccgacggcagcctgggcgacgacttcgacgccaacgacgagcccgaccacaccgccgtgggcgaccacgaggagttcagaagctggaaggagccctgccaggtgcagagctgccaggaggagatgatcagcctgggcgacggcgacatcagaaccatgtgccccctgctgagcatgaagcccggcgagtacagctacttcagccccagaaccatgagcatgtgggccggccccgaccactggagattcagacccagaagaaagcaggacgcccccagccagagcgagaacaagaagaagagcaccaagaaggacttcgagatcgacttcgaggacgacatcgacttcgacgtgtacttcagaaagaccaaggccgccaccatcctgaccaagagcaccctggagaaccagaactggagagccaccaccctgcccaccgacttcaactacaacgtggacaccctggtgcagctgcacctgaagcccggcaccagactgctgaagatggcccagggccacagagtggagaccgagcactacgaggagatcgaggactacgactacaacaaccccaacgacaccagcaacttctgccccggcctgcaggccgccgacagcgacgacgaggacctggacgacctgttcgtgggccccgtgggcaacagcgacctgagcccctacccctgccacccccccaagaccgcccagcagaacggcgacacccccgaggcccagggcctggacatcaccacctacggcgagagcaacctggtggccgagccccagaaggtgaacaagatcgagatccactacgccaagaccgccaagaagatggacatgaagaagctgaagcagagcatgtggagcctgctgaccgccctgagcggcaaggaggccgacgccgaggccaaccacagagaggccggcaaggaggccgccctggccgaggtggccgacgagaagatgctgagcggcctgaccaaggacctgcagagaagcctgccccccgtgatggcccagaacctgagcatccccctggccttcgcctgcctgctgcacctggccaacgagaagaacctgaagctggagggcaccgaggacctgagcgacgtgctggtgagacagggcgactag

SEQ ID NO: 12652 - DNA, 900 bp, synthetic construct
  source 1..900: mol_type = other DNA; note = Synthetic coding sequence
atggagacccagttccccgtgagcgagggcaaggtggacccctacagaagctgcggcttcagctacgagcaggaccccaccctgagagaccccgaggccgtggccagaagatggccctggatggtgagcgtgagagccaacggcacccacatctgcgccggcaccatcatcgccagccagtgggtgctgaccgtggcccactgcctgatctggagagacgtgatctacagcgtgagagtgggcagcccctggatcgaccagatgacccagaccgccagcgacgtgcccgtgctgcaggtgatcatgcacagcagatacagagcccagagattctggagctgggtgggccaggccaacgacatcggcctgctgaagctgaagcaggagctgaagtacagcaactacgtgagacccatctgcctgcccggcaccgactacgtgctgaaggaccacagcagatgcaccgtgaccggctggggcctgagcaaggccgacggcatgtggccccagttcagaaccatccaggagaaggaggtgatcatcctgaacaacaaggagtgcgacaacttctaccacaacttcaccaagatccccaccctggtgcagatcatcaagagccagatgatgtgcgccgaggacacccacagagagaagttctgctacgagctgaccggcgagcccctggtgtgcagcatggagggcacctggtacctggtgggcctggtgagctggggcgccggctgccagaagagcgaggccccccccatctacctgcaggtgagcagctaccagcactggatctgggactgcctgaacggccaggccctggccctgcccgcccccagcagaaccctgctgctggccctgcccctgcccctgagcctgctggccgccctgtag

SEQ ID NO: 12653 - DNA, 1089 bp, synthetic construct
  source 1..1089: mol_type = other DNA; note = Synthetic coding sequence
atgctggtgcccggcagcaccagaccctacagcaagaagagacagaacagcaagagcgcccagggcctggccggcctgagaaacctgggcaacacctgcttcatgaacagcatcctgcagtgcctgagcaacaccagagagctgagagactactgcctgcagagactgtacatgagagacctgcaccacggcagcaacgcccacaccgccctggtggaggagttcgccaagctgatccagaccatctggaccagcagccccaacgacgtggtgagccccagcgagttcaagacccagatccagagatacgcccccagattcgtgggctacaaccagcaggacgcccaggagttcctgagattcctgctggacggcctgcacaacgaggtgaacagagtgaccctgagacccaagagcaaccccgagaacctggaccacctgcccgacgacgagaagggcagacagatgtggagaaagtacctggagagagaggacagcagaatcggcgacctgttcgtgggccagctgaagagcagcctgacctgcaccgactgcggctactgcagcaccgtgttcgaccccttctgggacctgagcctgcccatcgccaagagaggctaccccgaggtgaccctgatggactgcatgagactgttcaccaaggaggacgtgctggacggcgacgagaagcccacctgctgcagatgcagaggcagaaagagatgcatcaagaagttcagcatccagagattccccaagatcctggtgctgcacctgaagagattcagcgagagcagaatcagaaccagcaagctgaccaccttcgtgaacttccccctgagagacctggacctgagagagttcgccagcgagaacaccaaccacgccgtgtacaacctgtacgccgtgagcaaccacagcggcaccaccatgggcggccactacaccgcctactgcagaagccccggcaccggcgagtggcacaccttcaacgacagcagcgtgacccccatgagcagcagccaggtgagaaccagcgacgcctacctgctgttctacgagctggccagcccccccagcagaatgtag

SEQ ID NO: 12654 - DNA, 1800 bp, synthetic construct
  source 1..1800: mol_type = other DNA; note = Synthetic coding sequence
atggaccccggcgacgccgccatcctggagagcagcctgagaatcctgtacagactgttcgagagcgtgctgccccccctgcccgccgccctgcagagcagaatgaacgtgatcgaccacgtgagagacatggccgccgccggcctgcacagcaacgtgagactgctgagcagcctgctgctgaccatgagcaacaacaaccccgagctgttcagccccccccagaagtaccagctgctggtgtaccacgccgacagcctgttccacgacaaggagtacagaaacgccgtgagcaagtacaccatggccctgcagcagaagaaggccctgagcaagaccagcaaggtgagacccagcaccggcaacagcgccagcaccccccagagccagtgcctgcccagcgagatcgaggtgaagtacaagatggccgagtgctacaccatgctgaagcaggacaaggacgccatcgccatcctggacggcatccccagcagacagagaacccccaagatcaacatgatgctggccaacctgtacaagaaggccggccaggagagacccagcgtgaccagctacaaggaggtgctgagacagtgccccctggccctggacgccatcctgggcctgctgagcctgagcgtgaagggcgccgaggtggccagcatgaccatgaacgtgatccagaccgtgcccaacctggactggctgagcgtgtggatcaaggcctacgccttcgtgcacaccggcgacaacagcagagccatcagcaccatctgcagcctggagaagaagagcctgctgagagacaacgtggacctgctgggcagcctggccgacctgtacttcagagccggcgacaacaagaacagcgtgctgaagttcgagcaggcccagatgctggacccctacctgatcaagggcatggacgtgtacggctacctgctggccagagagggcagactggaggacgtggagaacctgggctgcagactgttcaacatcagcgaccagcacgccgagccctgggtggtgagcggctgccacagcttctacagcaagagatacagcagagccctgtacctgggcgccaaggccatccagctgaacagcaacagcgtgcaggccctgctgctgaagggcgccgccctgagaaacatgggcagagtgcaggaggccatcatccacttcagagaggccatcagactggccccctgcagactggactgctacgagggcctgatcgagtgctacctggccagcaacagcatcagagaggccatggtgatggccaacaacgtgtacaagaccctgggcgccaacgcccagaccctgaccctgctggccaccgtgtgcctggaggaccccgtgacccaggagaaggccaagaccctgctggacaaggccctgacccagagacccgactacatcaaggccgtggtgaagaaggccgagctgctgagcagagagcagaagtacgaggacggcatcgccctgctgagaaacgccctggccaaccagagcgactgcgtgctgcacagaatcctgggcgacttcctggtggccgtgaacgagtaccaggaggccatggaccagtacagcatcgccctgagcctggaccccaacgaccagaagagcctggagggcatgcagaagatggagaaggaggagagccccaccgacgccacccaggaggaggacgtggacgacatggagggcagcggcgaggagggcgacctggagggcagcgacagcgaggccgcccagtgggccgaccaggagcagtggttcggcatgcagtag

SEQ ID NO: 12655 - DNA, 507 bp, synthetic construct
  source 1..507: mol_type = other DNA; note = Synthetic coding sequence
atgcccgccaccagaaagcccatgagatacggccacaccgagggccacaccgaggtgtgcttcgacgacagcggcagcttcatcgtgacctgcggcagcgacggcgacgtgagaatctgggaggacctggacgacgacgaccccaagttcatcaacgtgggcgagaaggcctacagctgcgccctgaagagcggcaagctggtgaccgccgtgagcaacaacaccatccaggtgcacaccttccccgagggcgtgcccgacggcatcctgaccagattcaccaccaacgccaaccacgtggtgttcaacggcgacggcaccaagatcgccgccggcagcagcgacttcctggtgaagatcgtggacgtgatggacagcagccagcagaagaccttcagaggccacgacgcccccgtgctgagcctgagcttcgaccccaaggacatcttcctggccagcgccagctgcgacggcagcgtgagagtgtggcagatcagcgaccagtag

SEQ ID NO: 12656 - DNA, 141 bp, synthetic construct
  source 1..141: mol_type = other DNA; note = Synthetic coding sequence
atggtgaacagctgctgcggcagcgtgtgcagcgaccagggctgcggcctggagaactgctgcagacccagctgctgccagaccacctgctgcagaaccacctgctgcagacccctgtgctgcgccagcagctgctgctag

SEQ ID NO: 12657 - DNA, 669 bp, synthetic construct
  source 1..669: mol_type = other DNA; note = Synthetic coding sequence
atggccagcgtggtggagtacaagggcctgagagccggctaccactgcggctactgcgacagcaaggagggcaaggccagctgcggcatgtgggcccacagcatgaccgtgcaggactaccaggacctgatcgacagaggctggagaagaagcggcaagtacgtgtacaagcccgtgatgaaccagacctgctgcccccagtacaccatcagatgcagacccctgcagttccagcccagcaagagccacaagaaggtgctgaagaagatgctgaagttcctggccaagggcgaggtgcccaagggcagctgcgaggacgagcccatggacagcaccatggacgacgccgtggccggcgacttcgccctgatcaacaagctggacatccagtgcgacctgaagaccctgagcgacgacatcaaggagagcctggagagcgagggcaagaacagcaagaaggaggagccccaggagctgctgcagagccaggacttcgtgggcgagaagctgggcagcggcgagcccagccacagcgtgaaggtgcacaccgtgcccaagcccggcaagggcgccgacctgagcaagcccccctgcagaaaggccaaggagatcagaaaggagagaaagagactgaagctgatgcagcagaaccccgccggcgagctgtag

SEQ ID NO: 12658 - DNA, 495 bp, synthetic construct
  source 1..495: mol_type = other DNA; note = Synthetic coding sequence
atgctgaaggccgtgatcctgatcggcggcccccagaagggcaccagattcagacccctgagcttcgaggtgcccaagcccctgttccccgtggccggcgtgcccatgatccagcaccacatcgaggcctgcgcccaggtgcccggcatgcaggagatcctgctgatcggcttctaccagcccgacgagcccctgacccagttcctggaggccgcccagcaggagttcaacctgcccgtgagatacctgcaggagttcgcccccctgggcaccggcggcggcctgtaccacttcagagaccagatcctggccggcagccccgaggccttcttcgtgctgaacgccgacgtgtgcagcgacttccccctgagcgccatgctggaggcccacagaagacagagacaccccttcctgctgctgggcaccaccgccaacagaacccagagcctgaactacggctgcatcgtggagaacccccagacccacgaggtgtag

SEQ ID NO: 12659 - DNA, 339 bp, synthetic construct
  source 1..339: mol_type = other DNA; note = Synthetic coding sequence
atgttcgtgagcgacttcagaaaggagttctacgaggtggtgcagagccagagagtgctgctgttcgtggccagcgacgtggacgccctgtgcgcctgcaagatcctgcaggccctgttccagtgcgaccacgtgcagtacaccctggtgcccgtgagcggctggcaggagctggagaccgccttcctggagcacaaggagcagttccactacttcatcctgatcaactgcggcgccaacgtggacctgctggacatcctgcagcccgacgaggacaccatcttcttcgtgtgcgacacccacagacccgtgaacgtggtgaacgtgtacaacgactag

SEQ ID NO: 12660 - DNA, 942 bp, synthetic construct
  source 1..942: mol_type = other DNA; note = Synthetic coding sequence
accctggtggtgagcggcagagacgacccccccacccacagccagcccgacagcgacgacgaggccgaggagatccagtggagcgacgacgagaacaccgccaccctgaccgcccccgagttccccgagttcgccaccaaggtgcaggaggccatcaacagcctgggcggcagcgtgttccccaagctgaactggagcgcccccagagacgcctactggatcgccatgaacagcagcctgaagtgcaagaccctgagcgacatcttcctgctgttcaagagcagcgacttcatcaccagagacttcacccagcccttcatccactgcaccgacgacagccccgacccctgcatcgagtacgagctggtgctgagaaagtggtgcgagctgatccccggcgccgagttcagatgcttcgtgaaggagaacaagctgatcggcatcagccagagagactacacccagtactacgaccacatcagcaagcagaaggaggagatcagaagatgcatccaggacttcttcaagaagcacatccagtacaagttcctggacgaggacttcgtgttcgacatctacagagacagcagagacagccccgccttcagatgcaccaacagcgaggtgaccgtgcagcccagcccctacctgagctacagactgcccaaggacttcgtggacctgagcaccggcgaggacgcccacaagctgatcgacaagagcgccggcggcagactgatgagcgtgctggagctggagaagagaagacccagacccaccgcccccggcgccgcccaccagccccagctgcccgccgaccccgacgccggcggccccagcagcgtggacatcagccacttcctgtacagctgcaccttcacctggggcaagaagagaagagacttcgccacctgcaagaacaacatcatcaacagaagctag

SEQ ID NO: 12661 - DNA, 1017 bp, synthetic construct; identical to SEQ ID NO: 12207
  source 1..1017: mol_type = other DNA; note = Synthetic coding sequence

SEQ ID NO: 12662 - DNA, 1119 bp, synthetic construct; identical to SEQ ID NO: 10871
  source 1..1119: mol_type = other DNA; note = Synthetic coding sequence

SEQ ID NO: 12663 - DNA, 408 bp, synthetic construct
  source 1..408: mol_type = other DNA; note = Synthetic coding sequence
tgacagctggccagcatggtgtggaacaaccccagccagcagcagttcatgcagttcggcggcagcagcggcagccagctgccccagatccagaccgacgtggtgctgcccagctgcaagaagaaggcccccgccgagacccccgtgaaggagagactgttcatcgtgttcaacccccaccccctgcccctggacgtgctggaggacatcttctgcagattcggcaacctgatcgaggtgtacctggtgagcggcaagaacgtgggctacgccaagtacgccgacagaatcagcgccaacgacgccatcgccaccctgcacggcaagatcctgaacggcgtgagactgaaggtgatgctggccgacagccccagagaggagagcaacaagagacagagaacctactag

SEQ ID NO: 12664 - DNA, 1764 bp, synthetic construct; identical to SEQ ID NO: 10411
  source 1..1764: mol_type = other DNA; note = Synthetic coding sequence

SEQ ID NO: 12665 - DNA, 1842 bp, synthetic construct; identical to SEQ ID NO: 9548
  source 1..1842: mol_type = other DNA; note = Synthetic coding sequence

SEQ ID NO: 12666 - DNA, 477 bp, synthetic construct
  source 1..477: mol_type = other DNA; note = Synthetic coding sequence
atgacccactgctgcagcccctgctgccagcccacctgctgcagaaccacctgctgcagaaccacctgctggaagcccaccaccgtgaccacctgcagcagcaccccctgctgccagcccgcctgctgcgtgagcagctgctgccagccctgctgcagacccacctgctgccagaacacctgctgcagaaccacctgctgccagcccacctgccccacctgctgcggcagcagctgctgcggccagaccagctgcggcagcagctgcggccagagcagcagctgcgcccccgtgtactgcagaagaacctgctactaccccaccaccgtgtgcctgcccggctgcctgaaccagagctgcggcagcaactgctgccagccctgctgcagacccgcctgctgcgagaccacctgctgcagaaccacctgcttccagcccacctgcgtgagcagctgctgccagcccagctgctgctag

SEQ ID NO: 12667 - DNA, 1620 bp, synthetic construct; identical to SEQ ID NO: 10018
  source 1..1620: mol_type = other DNA; note = Synthetic coding sequence

SEQ ID NO: 12668 - DNA, 2511 bp, synthetic construct
  source 1..2511: mol_type = other DNA; note = Synthetic coding sequence
atggccgccgccctgggcccccccgaggtgatcgcccagctggagaacgccgccaaggtgctgatgcagaccctggcctgcagcatcctgaccgccctgctgagcgagttcagcagcagcagcaagaccagcaacatcggcctgagcatggagttccacggcaactgcaagagagtgttccaggaggaggacctgagacagatcttcatgctgaccgtggaggtgctgcaggagttcagcagaagagagaacctgaacgcccagatgagcagcgtgttccagagatacctggccctggccaaccaggtgctgagctggaacttcctgccccccaagctgggcagacactacatcgccatgttcgagagcagccagaacgtgctgctgaagcccaccgagagctggagagagaccctgctggacagcagagtgatggagctgttcttcaccgtgcacagaaagatcagagaggacagcgacatggcccaggacagcctgcagtgcctggcccagctggccagcctgcacggccccatcttccccgacgagggcagccaggtggactacctggcccacttcatcgagggcctgctgaacaccatcaacggcatcgagatcgaggacagcgaggccgtgggcatcagcagcatcatcagcaacctgatcaccgtgttccccagaaacgtgctgaccgccatccccagcgagctgttcagcagcttcgtgaactgcctgacccacctgacctgcagcttcggcagaagcgccgccctggaggaggtgctggacaaggacgacatggtgtacatggaggcctacgacaagctgctggagagctggctgaccctggtgcaggacgacaagcacttccacaagggcttcttcacccagcacgccgtgcaggtgttcaacagctacatccagtgccacctggccgcccccgacggcaccagaaacctgaccgccaacggcgtggccagcagagaggaggaggagatcagcgagctgcaggaggacgacagagaccagttcagcgaccagctggccagcgtgggcatgctgggcagaatcgccgccgagcactgcatccccctgctgaccagcctgctggaggagagagtgaccagactgcacggccagctgcagagacaccagcagcagctgctggccagccccggcagcagcaccgtggacaacaagatgctggacgacctgtacgaggacatccactggctgatcctggtgaccggctacctgctggccgacgacacccagggcgagacccccctgatcccccccgagatcatggagtacagcatcaagcacagcagcgaggtggacatcaacaccaccctgcagatcctgggcagccccggcgagaaggccagcagcatccccggctacaacagaaccgacagcgtgatcagactgctgagcgccatcctgagagtgagcgaggtggagagcagagccatcagagccgacctgacccacctgctgagcccccagatgggcaaggacatcgtgtggttcctgaagagatgggccaagacctacctgctggtggacgagaagctgtacgaccagatcagcctgcccttcagcaccgccttcggcgccgacaccgagggcagccagtggatcatcggctacctgctgcagaaggtgatcagcaacctgagcgtgtggagcagcgagcaggacctggccaacgacaccgtgcagctgctggtgaccctggtggagagaagagagagagccaacctggtgatccagtgcgagaactggtggaacctggccaagcagttcgccagcagaagcccccccctgaacttcctgagcagccccgtgcagagaaccctgatgaaggccctggtgctgggcggcttcgcccacatggacaccgagaccaagcagcagtactggaccgaggtgctgcagcccctgcagcagagattcctgagagtgatcaaccaggagaacttccagcagatgtgccagcaggaggaggtgaagcaggagatcaccgccaccctggaggccctgtgcggcatcgccgaggccacccagatcgacaacgtggccatcctgttcaacttcctgatggacttcctgaccaactgcatcggcctgatggaggtgtacaagaacacccccgagaccgtgaacctgatcatcgaggtgttcgtggaggtggcccacaagcagatctgctacctgggcgagagcaaggccatgaacctgtacgaggcctgcctgaccctgctgcaggtgtacagcaagaacaacctgggcagacagagaatcgacgtgaccgccgaggaggagcagtaccaggacctgctgctgatcatggagctgctgaccaacctgctgagcaaggagttcatcgacttcagcgacaccgacgaggtgttcagaggccacgagcccggccaggccgccaacagaagcgtgagcgccgccgacgtggtgctgtacggcgtgaacctgatcctgcccctgatgtag

SEQ ID NO: 12669 - DNA, 1008 bp, synthetic construct
  source 1..1008: mol_type = other DNA; note = Synthetic coding sequence
atggacttcctgctgggcaaccccttcagcagccccgtgggccagagaatcgagaaggccaccgacggcagcctgcagagcgaggactgggccctgaacatggagatctgcgacatcatcaacgagaccgaggagggccccaaggacgccctgagagccgtgaagaagagaatcgtgggcaacaagaacttccacgaggtgctggagacctgcgtgaagaactgcggccacagattccacgtgctggtggccagccaggacttcgtggagagcgtgctggtgagaaccatcctgcccaagaacaacccccccaccatcgtgcacgacaaggtgctgaacctgatccagagctgggccgacgccttcagaagcagccccgacctgaccggcgtggtgaccatctacgaggacctgagaagaaagggcctggagttccccatgaccgacctggacatgctgagccccatccacaccccccagagaaccgtgttcaacagcgagacccagagcggccaggacagcgtgggcaccgacagcagccagcaggaggacagcggccagcacgccgcccccctgcccgccccccccatcctgagcggcgacacccccatcgcccccacccccgagcagatcggcaagctgagaagcgagctggagatggtgagcggcaacgtgagagtgatgagcgagatgctgaccgagctggtgcccacccaggccgagcccgccgacctggagctgctgcaggagctgaacagaacctgcagagccatgcagcagagagtgctggagctgatcccccagatcgccaacgagcagctgaccgaggagctgctgatcgtgaacgacaacctgaacaacgtgttcctgagacacgagagattcgagagattcagaaccggccagaccaccaaggcccccagcgaggccgagcccgccgccgacctgatcgacatgggccccgaccccgccgccaccggcaacctgagcagccagctggccggctag

SEQ ID NO: 12670 - DNA, 5193 bp, synthetic construct
  source 1..5193: mol_type = other DNA; note = Synthetic coding sequence
atgggcaacagcgacagccagtacaccctgcagggcagcaagaaccacagcaacaccatcaccggcgccaagcagatcccctgcagcctgaagatcagaggcatccacgccaaggaggagaagagcctgcacggctggggccacggcagcaacggcgccggctacaagagcagaagcctggccagaagctgcctgagccacttcaagagcaaccagccctacgccagcagactgggcggccccacctgcaaggtgagcagaggcgtggcctacagcacccacagaaccaacgcccccggcaaggacttccagggcatcagcgccgccttcagcaccgagaacggcttccacagcgtgggccacgagctggccgacaaccacatcaccagcagagactgcaacggccacctgctgaactgctacggcagaaacgagagcatcgccagcaccccccccggcgaggacagaaagagccccagagtgctgatcaagaccctgggcaagctggacggctgcctgagagtggagttccacaacggcggcaaccccagcaaggtgcccgccgaggactgcagcgagcccgtgcagctgctgagatacagccccaccctggccagcgagaccagccccgtgcccgaggccagaagaggcagcagcgccgacagcctgcccagccacagacccagccccaccgacagcagactgagaagcagcaagggcagcagcctgagcagcgagagcagctggtacgacagcccctggggcaacgccggcgagctgagcgaggccgagggcagcttcctggcccccggcatgcccgaccccagcctgcacgccagcttcccccccggcgacgccaagaagcccttcaaccagagcagcagcctgagcagcctgagagagctgtacaaggacgccaacctgggcagcctgagccccagcggcatcagactgagcgacgagtacatgggcacccacgccagcctgagcaacagagtgagcttcgccagcgacatcgacgtgcccagcagagtggcccacggcgaccccatccagtacagcagcttcaccctgccctgcagaaagcccaaggccttcgtggaggacaccgccaagaaggacagcctgaaggccagaatgagaagaatcagcgactggaccggcagcctgagcagaaagaagagaaagctgcaggagcccagaagcaaggagggcagcgactacttcgacagcagaagcgacggcctgaacaccgacgtgcagggcagcagccaggccagcgccttcctgtggagcggcggcagcacccagatcctgagccagagaagcgagagcacccacgccatcggcagcgaccccctgagacagaacatctacgagaacttcatgagagagctggagatgagcagaaccaacaccgagaacatcgagaccagcaccgagaccgccgagagcagcagcgagagcctgagcagcctggagcagctggacctgctgttcgagaaggagcagggcgtggtgagaaaggccggctggctgttcttcaagcccctggtgaccgtgcagaaggagagaaagctggagctggtggccagaagaaagtggaagcagtactgggtgaccctgaagggctgcaccctgctgttctacgagacctacggcaagaacagcatggaccagagcagcgcccccagatgcgccctgttcgccgaggacagcatcgtgcagagcgtgcccgagcaccccaagaaggagaacgtgttctgcctgagcaacagcttcggcgacgtgtacctgttccaggccaccagccagaccgacctggagaactgggtgaccgccgtgcacagcgcctgcgccagcctgttcgccaagaagcacggcaaggaggacaccctgagactgctgaagaaccagaccaagaacctgctgcagaagatcgacatggacagcaagatgaagaagatggccgagctgcagctgagcgtggtgagcgaccccaagaacagaaaggccatcgagaaccagatccagcagtgggagcagaacctggagaagttccacatggacctgttcagaatgagatgctacctggccagcctgcagggcggcgagctgcccaaccccaagagcctgctggccgccgccagcagacccagcaagctggccctgggcagactgggcatcctgagcgtgagcagcttccacgccctggtgtgcagcagagacgacagcgccctgagaaagagaaccctgagcctgacccagagaggcagaaacaagaagggcatcttcagcagcctgaagggcctggacaccctggccagaaagggcaaggagaagagacccagcatcacccaggtggacgagctgctgcacatctacggcagcaccgtggacggcgtgcccagagacaacgcctgggagatccagacctacgtgcacttccaggacaaccacggcgtgaccgtgggcatcaagcccgagcacagagtggaggacatcctgaccctggcctgcaagatgagacagctggagcccagccactacggcctgcagctgagaaagctggtggacgacaacgtggagtactgcatccccgccccctacgagtacatgcagcagcaggtgtacgacgagatcgaggtgttccccctgaacgtgtacgacgtgcagctgaccaagaccggcagcgtgtgcgacttcggcttcgccgtgaccgcccaggtggacgagagacagcacctgagcagaatcttcatcagcgacgtgctgcccgacggcctggcctacggcgagggcctgagaaagggcaacgagatcatgaccctgaacggcgaggccgtgagcgacctggacctgaagcagatggaggccctgttcagcgagaagagcgtgggcctgaccctgatcgccagaccccccgacaccaaggccaccctgtgcaccagctggagcgacagcgacctgttcagcagagaccagaagagcctgctgcccccccccaaccagagccagctgctggaggagttcctggacaacttcaagaagaacaccgccaacgacttcagcaacgtgcccgacatcaccaccggcctgaagagaagccagaccgacggcaccctggaccaggtgagccacagagagaagatggagcagaccttcagaagcgccgagcagatcaccgccctgtgcagaagcttcaacgacagccaggccaacggcatggagggccccagagagaaccaggaccccccccccagaagcctggccagacacctgagcgacgccgacagactgagaaaggtgatccaggagctggtggacaccgagaagagctacgtgaaggacctgagctgcctgttcgagctgtacctggagcccctgcagaacgagaccttcctgacccaggacgagatggagagcctgttcggcagcctgcccgagatgctggagttccagaaggtgttcctggagaccctggaggacggcatcagcgccagcagcgacttcaacaccctggagacccccagccagttcagaaagctgctgttcagcctgggcggcagcttcctgtactacgccgaccacttcaagctgtacagcggcttctgcgccaaccacatcaaggtgcagaaggtgctggagagagccaagaccgacaaggccttcaaggccttcctggacgccagaaaccccaccaagcagcacagcagcaccctggagagctacctgatcaagcccgtgcagagagtgctgaagtaccccctgctgctgaaggagctggtgagcctgaccgaccaggagagcgaggagcactaccacctgaccgaggccctgaaggccatggagaaggtggccagccacatcaacgagatgcagaagatctacgaggactacggcaccgtgttcgaccagctggtggccgagcagagcggcaccgagaaggagcagcccgagtggagcagcgaggtgatggacgtgctggaccccagaggcaagctgaccaagggcaccctggaggagcccagaaccctggtgaccgagctgagcatgggcgagctgctgatgcacagcaccgtgagctggctgaaccccttcctgagcctgggcaaggccagaaaggacctggagctgaccgtgttcgtgttcaagagagccgtgatcctggtgtacaaggagaactgcaagctgaagaagaagctgcccagcaacagcagacccgcccacaacagcaccgacctggaccccttcaagttcagatggctgatccccatcagcgccctgcaggtgagactgggcaaccccgccggcaccgagaacaacagcatctgggagctgatccacaccaagagcgagatcgagggcagacccgagaccatcttccagctgtgctgcagcgacagcgagagcaagaccaacatcgtgaaggtgatcagaagcatcctgagagagaacttcagaagacacatcaagtgcgagctgcccctggagaagacctgcaaggacagactggtgcccctgaagaacagagtgcccgtgagcgccaagctggccagcagcagaagcctgaaggtgctgaagaacagcagcagcaacgagtggaccggcgagaccggcaagggcaccctgctggacagcgacgagggcagcctgagcagcggcacccagagcagcggctgccccaccgccgagggcagacaggacagcaagagcaccagccccggcaagtacccccaccccggcctggccgacttcgccgacaacctgatcaaggagagcgacatcctgagcgacgaggacgacgaccacagacagaccgtgaagcagggcagccccaccaaggacatcgagatccagttccagagactgagaatcagcgaggaccccgacgtgcaccccgaggccgagcagcagcccggccccgagagcggcgagggccagaagggcggcgagcagcccaagctggtgagaggccacttctgccccatcaagagaaaggccaacagcaccaagagagacagaggcaccctgctgaaggcccagatcagacaccagagcctggacagccagagcgagaacgccaccatcgacctgaacagcgtgctggagagagagttcagcgtgcagagcctgaccagcgtggtgagcgaggagtgcttctacgagaccgagagccacggcaagagctag

SEQ ID NO: 12671 - DNA, 348 bp, synthetic construct
  source 1..348: mol_type = other DNA; note = Synthetic coding sequence
atggcccccgccaagaagggcggcgagaagaagaagggcagaagcgccatcaacgaggtggtgaccagagagtacaccatcaacatccacaagagaatccacggcgtgggcttcaagaagagagcccccagagccctgaaggagatcagaaagttcgccatgaaggagatgggcacccccgacgtgagaatcgacaccagactgaacaaggccgtgtgggccaagggcatcagaaacgtgccctacagaatcagagtgagactgagcagaaagagaaacgaggacgaggacagccccaacaagctgtacaccctggtgacctacgtgcccgtgaccaccttcaagtag

SEQ ID NO: 12672 - DNA, 747 bp, synthetic construct
  source 1..747: mol_type = other DNA; note = Synthetic coding sequence
atggccctggaggtgggcgacatggaggacggccagctgagcgacagcgacagcgacatgaccgtggcccccagcgacagacccctgcagctgcccaaggtgctgggcggcgacagcgccatgagagccttccagaacaccgccaccgcctgcgcccccgtgagccactacagagccgtggagagcgtggacagcagcgaggagagcttcagcgacagcgacgacgacagctgcctgtggaagagaaagagacagaagtgcttcaaccccccccccaagcccgagcccttccagttcggccagagcagccagaagccccccgtggccggcggcaagaagatcaacaacatctggggcgccgtgctgcagaagctgagaaaggagagccaggagcacaccaaggacctggacaaggagctggacgagtacatgcacggcggcaagaagatgggcagcaaggaggaggagaacggccagggccacctgaagagaaagagacccgtgaaggacagactgggcaacagacccgagatgaactacaagggcagatacgagatcaccgccgaggacagccaggagaaggtggccgacgagatcagcttcagactgcaggagcccaagaaggacctgatcgccagagtggtgagaaacaagctgagaaccttcagcaccctgaagaccaagagaaacatgaagatcaagaagctgctgggcagaggcgagcacaagtgctggggcaagagatag

SEQ ID NO: 12673 - DNA, 78 bp, synthetic construct
  source 1..78: mol_type = other DNA; note = Synthetic coding sequence
atggccatggcccccagccccagcctggtgcaggtgtacaccagccccgccgccgtggccgtgtgggagtggcagtag

SEQ ID NO: 12674 - DNA, 171 bp, synthetic construct
  source 1..171: mol_type = other DNA; note = Synthetic coding sequence
atgagctactaccagagacccttcagccccagcgcctacagcctgcccgccagcctgaacagcagcatcgtgatgcagcacggcaccagcctggacagcaccgacacctacccccagcacgcccagagcctggacggcaccaccagcagcagcatccccctgtacagatag

SEQ ID NO: 12675 - DNA, 450 bp, synthetic construct
  source 1..450: mol_type = other DNA; note = Synthetic coding sequence
gtgagagagctggaggccgagctggacgccgagcagaagaagcacgccgaggccctgaagggcgtgagaaagcacgagagaagagtgaaggagctggcctaccaggccgaggaggacagaaagaacctggccagaatgcaggacctggtggacaagctgcagagcaaggtgaagagctacaagagacagttcgaggaggccgagcagcaggccaacaccaacctggccaagtacagaaaggcccagcacgagctggacgacgccgaggagagagccgacatggccgagacccaggccaacaagctgagagccagaaccagagacgccctgggccccaaggtgagaagcggcagaggcatcgccctgtgcgccggcggcctgtggggcctgaccggcagcaccgcccacagcgccatccccttcagcagcgcccagggcgtgaccgcctag

SEQ ID NO: 12676 - DNA, 468 bp, synthetic construct
  source 1..468: mol_type = other DNA; note = Synthetic coding sequence
agcaacgtgatggaggccaacgccgccagacaggccacccccgccgagtggagccaggacgacagcaacgacatgtgggaggaccaggaggaggaggaggaggaggaggaggacggcctggccggccagctgctgagcgacatcctggccaccagcaagtacgaggaggactactacgaggacgacgaggaggacgaccccgacgccctgaaggaccccctgtaccagatcgacctgcaggccaccctgatgaccatgagaggcgagttctacagacccagcgccagcaagaagggcagcctgagcaccttcgcccccagcggccccgccgccaaccacttcgccgccctgaccggcctggagatgcacttcctgctgaacctgaagtggcacctggacccctggcccctggccagcgccgtgaccctgatgaccatccagaccagactgaccggcgccgtgacctag

SEQ ID NO: 12677 - DNA, 1620 bp, synthetic construct; identical to SEQ ID NO: 10018
  source 1..1620: mol_type = other DNA; note = Synthetic coding sequence

SEQ ID NO: 12678 - DNA, 645 bp, synthetic construct
  source 1..645: mol_type = other DNA; note = Synthetic coding sequence
atgcccagcccctggggctggttcgccgtgaccgcctgcggcgcccagagaaacaacttcgaggagcccgtggccctgcaggagatggacaccagcaacggcgtgctgctgcccttctacgaccccgacagcagcatcgtgtacctgtgcggcaagggcgacagcagcatcagatacttcgagatcaccgacgagccccccttcgtgcactacctgaacaccttcagcagcaaggagccccagagaggcatgggcttcatgcccaagagaggcctggacgtgagcaagtgcgagatcgccagattctacaagctgcacgagagaaagtgcgagcccatcatcatgaccgtgcccagaaagagcgacctgttccaggacgccgagcccgtgctgatcagcctgagagacggctacgtgccccccaagcacagagagctgagagtgaccaagagaaacatcctggacgtgagaccccccagcggccccagaagaagccagagcgccagcgacgcccccctgagccagcacaccctggagaccctgctggaggagatcaaggccctgagagagagagtgcaggcccaggagcagagaatcaccgccctggagaacatgctgtgcgagctggtggacggcaccgactag

SEQ ID NO: 12679 - DNA, 690 bp, synthetic construct
  source 1..690: mol_type = other DNA; note = Synthetic coding sequence
atgctgcagctgagagacagcgtggacagcgccggcaccagccccaccgccgtgctggccgccggcgaggagcccggcagcatcgagcaggccgtggaggagatcagagtggtggtgagacccgtggaggacggcgagatccagggcgtgtggctgctgaccgaggtggaccactggaacaacgagaaggagagactggtgctggtgaccgagcagagcctgctgatctgcaagtacgacttcatcagcctgcagtgccagcaggtggtgagaatcgccctgaacgccgtggacaccatcagctacggcgagttccagttcccccccaagagcctgaacaagagagagggcttcggcatcagaatccagtgggacaagcagagcagacccagcttcatcaacagatggaacccctggagcaccaacgtgccctacgccaccttcaccgagcaccccatggccggcgccgacgagaagaccgccagcctgtgccagctggagagcttcaaggccctgctgatccaggccgtgaagaaggcccagaaggagagccccctgcccggccaggccaacggcgtgctgatcctggagagacccctgctgatcgagacctacgtgggcctgatgagcttcatcaacaacgaggccaagctgggctacagcatgaccagaggcaagatcggcttctag

SEQ ID NO: 12680 - DNA, 390 bp, synthetic construct
  source 1..390: mol_type = other DNA; note = Synthetic coding sequence
atgtgcgaggtgagcagaggctggaagccctgcaccgagggcatcctgaaggtgagacccaccagaaagatcagctacgagggcaacatcacccccaccgtggagctgaacgccctgtgcatgaagctgggcaagaagcccatgtacaagcccgtggacccctacagcagaatgcagagcacctacaactacaacatgagaggcggcgcctacccccccagatacttctaccccttccccgtgccccccctgctgtaccaggtggagctgagcgtgggcggccagcagttcaacggcaagggcaagaccagacaggccgccaagcacgacgccgccgccaaggccctgagaatcctgcagaacgagcccctgcccgagagactggagtag

SEQ ID NO: 12681 - DNA, 3042 bp, synthetic construct
  source 1..3042: mol_type = other DNA; note = Synthetic coding sequence
atggacctgttcagaatgagatgctacctggccagcctgcagggcggcgagctgcccaaccccaagagcctgctggccgccgccagcagacccagcaagctggccctgggcagactgggcatcctgagcgtgagcagcttccacgccctggtgtgcagcagagacgacagcgccctgagaaagagaaccctgagcctgacccagagaggcagaaacaagaagggcatcttcagcagcctgaagggcctggacaccctggccagaaagggcaaggagaagagacccagcatcacccaggtggacgagctgctgcacatctacggcagcaccgtggacggcgtgcccagagacaacgcctgggagatccagacctacgtgcacttccaggacaaccacggcgtgaccgtgggcatcaagcccgagcacagagtggaggacatcctgaccctggcctgcaagatgagacagctggagcccagccactacggcctgcagctgagaaagctggtggacgacaacgtggagtactgcatccccgccccctacgagtacatgcagcagcaggtgtacgacgagatcgaggtgttccccctgaacgtgtacgacgtgcagctgaccaagaccggcagcgtgtgcgacttcggcttcgccgtgaccgcccaggtggacgagagacagcacctgagcagaatcttcatcagcgacgtgctgcccgacggcctggcctacggcgagggcctgagaaagggcaacgagatcatgaccctgaacggcgaggccgtgagcgacctggacctgaagcagatggaggccctgttcagcgagaagagcgtgggcctgaccctgatcgccagaccccccgacaccaaggccaccctgtgcaccagctggagcgacagcgacctgttcagcagagaccagaagagcctgctgcccccccccaaccagagccagctgctggaggagttcctggacaacttcaagaagaacaccgccaacgacttcagcaacgtgcccgacatcaccaccggcctgaagagaagccagaccgacggcaccctggaccaggtgagccacagagagaagatggagcagaccttcagaagcgccgagcagatcaccgccctgtgcagaagcttcaacgacagccaggccaacggcatggagggccccagagagaaccaggaccccccccccagaagcctggccagacacctgagcgacgccgacagactgagaaaggtgatccaggagctggtggacaccgagaagagctacgtgaaggacctgagctgcctgttcgagctgtacctggagcccctgcagaacgagaccttcctgacccaggacgagatggagagcctgttcggcagcctgcccgagatgctggagttccagaaggtgttcctggagaccctggaggacggcatcagcgccagcagcgacttcaacaccctggagacccccagccagttcagaaagctgctgttcagcctgggcggcagcttcctgtactacgccgaccacttcaagctgtacagcggcttctgcgccaaccacatcaaggtgcagaaggtgctggagagagccaagaccgacaaggccttcaaggccttcctggacgccagaaaccccaccaagcagcacagcagcaccctggagagctacctgatcaagcccgtgcagagagtgctgaagtaccccctgctgctgaaggagctggtgagcctgaccgaccaggagagcgaggagcactaccacctgaccgaggccctgaaggccatggagaaggtggccagccacatcaacgagatgcagaagatctacgaggactacggcaccgtgttcgaccagctggtggccgagcagagcggcaccgagaaggaggtgaccgagctgagcatgggcgagctgctgatgcacagcaccgtgagctggctgaaccccttcctgagcctgggcaaggccagaaaggacctggagctgaccgtgttcgtgttcaagagagccgtgatcctggtgtacaaggagaactgcaagctgaagaagaagctgcccagcaacagcagacccgcccacaacagcaccgacctggaccccttcaagttcagatggctgatccccatcagcgccctgcaggtgagactgggcaaccccgccggcaccgagaacaacagcatctgggagctgatccacaccaagagcgagatcgagggcagacccgagaccatcttccagctgtgctgcagcgacagcgagagcaagaccaacatcgtgaaggtgatcagaagcatcctgagagagaacttcagaagacacatcaagtgcgagctgcccctggagaagacctgcaaggacagactggtgcccctgaagaacagagtgcccgtgagcgccaagctggccagcagcagaagcctgaaggtgctgaagaacagcagcagcaacgagtggaccggcgagaccggcaagggcaccctgctggacagcgacgagggcagcctgagcagcggcacccagagcagcggctgccccaccgccgagggcagacaggacagcaagagcaccagccccggcaagtacccccaccccggcctggccgacttcgccgacaacctgatcaaggagagcgacatcctgagcgacgaggacgacgaccacagacagaccgtgaagcagggcagccccaccaaggacatcgagatccagttccagagactgagaatcagcgaggaccccgacgtgcaccccgaggccgagcagcagcccggccccgagagcggcgagggccagaagggcggcgagcagcccaagctggtgagaggccacttctgccccatcaagagaaaggccaacagcaccaagagagacagaggcaccctgctgaaggcccagatcagacaccagagcctggacagccagagcgagaacgccaccatcgacctgaacagcgtgctggagagagagttcagcgtgcagagcctgaccagcgtggtgagcgaggagtgcttctacgagaccgagagccacggcaagagctag

SEQ ID NO: 12682 - DNA, 1149 bp, synthetic construct
  source 1..1149: mol_type = other DNA; note = Synthetic coding sequence
atggccgccaacctgagcagaaacggccccgccctgcaggaggcctacgtgagagtggtgaccgagaagagccccaccgactgggccctgttcacctacgagggcaacagcaacgacatcagagtggccggcaccggcgagggcggcctggaggagatggtggaggagctgaacagcggcaaggtgatgtacgccttctgcagagtgaaggaccccaacagcggcctgcccaagttcgtgctgatcaactggaccggcgagggcgtgaacgacgtgagaaagggcgcctgcgccagccacgtgagcaccatggccagcttcctgaagggcagcgtgtaccagaagaccaacgccgtgagcgagatcaagagagtgggcaaggacagcttctgggccaaggccgagaaggaggaggagaacagaagactggaggagaagagaagagccgaggaggcccagagacagctggagcaggagagaagagagagagagctgagagaggccgccagaagagagcagagataccaggagcagggcggcgaggccagcccccagagcagaacctgggagcagcagcaggaggtggtgagcagaaacagaaacgagcaggagagcgccgtgcaccccagagagatcttcaagcagaaggagagagccatgagcaccaccagcatcagcagcccccagcccggcaagctgagaagccccttcctgcagaagcagctgacccagcccgagacccacttcggcagagagcccgccgccgccatcagcagacccagagccgacctgcccgccgaggagcccgcccccagcacccccccctgcctggtgcaggccgaggaggaggccgtgtacgaggagccccccgagcaggagaccttctacgagcagccccccctggtgcagcagcagggcgccggcagcgagcacatcgaccaccacatccagggccagggcctgagcggccagggcctgtgcgccagagccctgtacgactaccaggccgccgacgacaccgagatcagcttcgaccccgagaacctgatcaccggcatcgaggtgatcgacgagggctggtggagaggctacggccccgacggccacttcggcatgttccccgccaactacgtggagctgatcgagtag

SEQ ID NO: 12683 - DNA, 660 bp, synthetic construct
  source 1..660: mol_type = other DNA; note = Synthetic coding sequence
atggtggtgctgagcgtgcccgccgaggtgaccgtgatcctgctggacatcgagggcaccaccacccccatcgccttcgtgaaggacatcctgttcccctacatcgaggagaacgtgaaggagtacctgcagacccactgggaggaggaggagtgccagcaggacgtgagcctgctgagaaagcaggccgaggaggacgcccacctggacggcgccgtgcccatccccgccgccagcggcaacggcgtggacgacctgcagcagatgatccaggccgtggtggacaacgtgtgctggcagatgagcctggacagaaagaccaccgccctgaagcagctgcagggccacatgtggagagccgccttcaccgccggcagaatgaaggccgagttcttcgccgacgtggtgcccgccgtgagaaagtggagagaggccggcatgaaggtgtacatctacagcagcggcagcgtggaggcccagaagctgctgttcggccacagcaccgagggcgacatcctggagctggtggacggccacttcgacaccaagatcggccacaaggtggagagcgagagctacaaggactgcagacagcactgggtgctgaaccagcagcacttcgtgagcgacagatgctacagcagaggccagtgctgctag

SEQ ID NO: 12684 - DNA, 1446 bp, synthetic construct; identical to SEQ ID NO: 12062
  source 1..1446: mol_type = other DNA; note = Synthetic coding sequence

SEQ ID NO: 12685 - DNA, 1644 bp, synthetic construct; identical to SEQ ID NO: 10555
  source 1..1644: mol_type = other DNA; note = Synthetic coding sequence

SEQ ID NO: 12686 - DNA, 1887 bp, synthetic construct; identical to SEQ ID NO: 12474
  source 1..1887: mol_type = other DNA; note = Synthetic coding sequence

SEQ ID NO: 12687 - DNA, 474 bp, synthetic construct
  source 1..474: mol_type = other DNA; note = Synthetic coding sequence
atgagaagcggcttcagatgcgacgagcccgccgaggccgtggcccccgagagacagaccgtgagcggcgccgtggccctggccagcttcaccagcccccacacccaccccgtggacgacggcggcagacactacagctggggcagccccaagagaatcctgggcctgggccccggcgacgccgccaaggaggccggcctggtgagacccctgcagggccagagcgagaagatcctgctgagaaccagaaacagacagcccatggagccccccatggagcccagcggcggcgagcaggagcccggcgccgtgagattcctggacctgccctgggaggacgtgctgctgccccacgtgctgaacagagtgcccctgagacagctgctgagactgcagagagtgagcagagccttcagaagcctggtgcagctgcacctggccggcctgagaagattcgacgccgcccaggtgtag

SEQ ID NO: 12688 - DNA, 483 bp, synthetic construct; identical to SEQ ID NO: 10977
  source 1..483: mol_type = other DNA; note = Synthetic coding sequence

SEQ ID NO: 12689 - DNA, 402 bp, synthetic construct
  source 1..402: mol_type = other DNA; note = Synthetic coding sequence
atggccgccctgagacccctggtgaagcccaagatcgtgaagaagagaaccaagaagttcatcagacaccagagcgacagatacgtgaagatcaagagaaactggagaaagcccagaggcatcgacaacagagtgagaagaagattcaagggccagatcctgatgcccaacatcggctacggcagcaacaagaagaccaagcacatgctgcccagcggcttcagaaagttcctggtgcacaacgtgaaggagctggaggtgctgctgatgtgcaacaagagctactgcgccgagatcgcccacaacgtgagcagcaagaacagaaaggccatcgtggagagagccgcccagctggccatcagagtgaccaaccccaacgccagactgagaagcgaggagtag

SEQ ID NO: 12690 - DNA, 639 bp, synthetic construct
  source 1..639: mol_type = other DNA; note = Synthetic coding sequence
atggacctgttcggcgacctgcccgagcccgagagaagccccagacccgccgccggcaaggaggcccagaagggccccctgctgttcgacgacctgccccccgccagcagcaccgacagcggcagcggcggccccctgctgttcgacgacctgccccccgccagcagcggcgacagcggcagcctggccaccagcatcagccagatggtgaagaccgagggcaagggcgccaagagaaagaccagcgaggaggagaagaacggcagcgaggagctggtggagaagaaggtgagcagcagcgtgatcttcggcctgaagggctacgtggccgagagaaagggcgagagagaggagatgcaggacgcccacgtgatcctgaacgacatcaccgaggagtgcagaccccccagcagcctgatcaccagagtgagctacttcgccgtgttcgacggccacggcggcatcagagccagcaagttcgccgcccagaacctgcaccagaacctgatcagaaagttccccaagggcgacgtgatcagcgtggagaagaccgtgaagagatgcctgctggacaccttcaagcacaccgacgaggagttcctgaagcaggccagcagccagaagcccgcctggaagtag

SEQ ID NO: 12691 - DNA, 1131 bp, synthetic construct; identical to SEQ ID NO: 10331
  source 1..1131: mol_type = other DNA; note = Synthetic coding sequence

SEQ ID NO: 12692 - DNA, 1485 bp, synthetic construct
  source 1..1485: mol_type = other DNA; note = Synthetic coding sequence
atggccgccgccgccgagtgcgacgtggtgatggccgccaccgagcccgagctgctggacgaccaggaggccaagagagaggccgagaccttcaaggagcagggcaacgcctactacgccaagaaggactacaacgaggcctacaactactacaccaaggccatcgacatgtgccccaagaacgccagctactacggcaacagagccgccaccctgatgatgctgggcagattcagagaggccctgggcgacgcccagcagagcgtgagactggacgacagcttcgtgagaggccacctgagagagggcaagtgccacctgagcctgggcaacgccatggccgcctgcagaagcttccagagagccctggagctggaccacaagaacgcccaggcccagcaggagttcaagaacgccaacgccgtgatggagtacgagaagatcgccgagaccgacttcgagaagagagacttcagaaaggtggtgttctgcatggacagagccctggagttcgcccccgcctgccacagattcaagatcctgaaggccgagtgcctggccatgctgggcagataccccgaggcccagagcgtggccagcgacatcctgagaatggacagcaccaacgccgacgccctgtacgtgagaggcctgtgcctgtactacgaggactgcatcgagaaggccgtgcagttcttcgtgcaggccctgagaatggcccccgaccacgagaaggcctgcatcgcctgcagaaacgccaaggccctgaaggccaagaaggaggacggcaacaaggccttcaaggagggcaactacaagctggcctacgagctgtacaccgaggccctgggcatcgaccccaacaacatcaagaccaacgccaagctgtactgcaacagaggcaccgtgaacagcaagctgagaaagctggacgacgccatcgaggactgcaccaacgccgtgaagctggacgacacctacatcaaggcctacctgagaagagcccagtgctacatggacaccgagcagtacgaggaggccgtgagagactacgagaaggtgtaccagaccgagaagaccaaggagcacaagcagctgctgaagaacgcccagctggagctgaagaagagcaagagaaaggactactacaagatcctgggcgtggacaagaacgccagcgaggacgagatcaagaaggcctacagaaagagagccctgatgcaccaccccgacagacacagcggcgccagcgccgaggtgcagaaggaggaggagaagaagttcaaggaggtgggcgaggccttcaccatcctgagcgaccccaagaagaagaccagatacgacagcggccaggacctggacgaggagggcatgaacatgggcgacttcgaccccaacaacatcttcaaggccttcttcggcggccccggcggcttcagcttcgaggccagcggccccggcaacttcttcttccagttcggctag

SEQ ID NO: 12693 - DNA, 1329 bp, synthetic construct
  source 1..1329: mol_type = other DNA; note = Synthetic coding sequence
aacgaggtgtacaacctgacccaggagttcttcagacacgacaagcccgtgaacgccgagagccagaacagcgtgggcgtgttcaccagagaggaggtgagaaacagaatcagaaacgaccccgacgaccccgaggccaccaagagactgaagctggccatgatccagcagtacctgaaggtggagagctgcgagagcagcagccacagcatggacgaggtgagcctgagcgccttcggcgagtggaccgagatccccggcgcccaccacatcatccccagcggcttcatgagagtggtggagctgctggccgagggcatccccgcccacgtgatccagctgggcaagcccgtgagatgcatccactgggaccaggccagcgccagacccagaggccccgagatcgagcccagaggcgagggcgaccacaaccacgacaccggcgagggcggccagggcggcgaggagcccagaggcggcagatgggacgaggacgagcagtggagcgtggtggtggagtgcgaggactgcgagctgatccccgccgaccacgtgatcgtgaccgtgagcctgggcgtgctgaagagacagtacaccagcttcttcagacccggcctgcccaccgagaaggtggccgccatccacagactgggcatcggcaccaccgacaagatcttcctggagttcgaggagcccttctggggccccgagtgcaacagcctgcagttcgtgtgggaggacgaggccgagagccacaccctgacctacccccccgagctgtggtacagaaagatctgcggcttcgacgtgctgtacccccccgagagatacggccacgtgctgagcggctggatctgcggcgaggaggccctggtgatggagaagtgcgacgacgaggccgtggccgagatctgcaccgagatgctgagacagttcaccggcaaccccaacatccccaagcccagaagaatcctgagaagcgcctggggcagcaacccctacttcagaggcagctacagctacacccaggtgggcagcagcggcgccgacgtggagaagctggccaagcccctgccctacaccgagagcagcaagaccgcccacggcagcagcaccaagcagcagcccggccacctgttcagcagcaagtgccccgagcagcccctggacgccaacagaggcgccgtgaagcccatgcaggtgctgttcagcggcgaggccacccacagaaagtactacagcaccacccacggcgccctgctgagcggccagagagaggccgccagactgatcgagatgtacagagacctgttccagcagggcacctag

SEQ ID NO: 12694 - DNA, 180 bp, synthetic construct
  source 1..180: mol_type = other DNA; note = Synthetic coding sequence
atgagctactaccagagacccttcagccccagcgcctacagcctgcccgccagcctgaacagcagcatcgtgatgcagcacggcaccagcctggacagcaccgacacctacccccagcacgcccagagcctggacggcaccaccagcagcagcatccccctgtacagaagcagcgagtag

SEQ ID NO: 12695 - DNA, 837 bp, synthetic construct
  source 1..837: mol_type = other DNA; note = Synthetic coding sequence
atgaagtgcgagcactgcaccagaaaggagtgcagcaagaagaccaagaccgacgaccaggagaacgtgagcgccgacgcccccagccccgcccaggagaacggcgagaagggcgagttccacaagctggccgacgccaagatcttcctgagcgactgcctggcctgcgacagctgcatgaccgccgaggagggcgtgcagctgagccagcagaacgccaaggacttcttcagagtgctgaacctgaacaagaagtgcgacaccagcaagcacaaggtgctggtggtgagcgtgtgcccccagagcctgccctacttcgccgccaagttcaacctgagcgtgaccgacgccagcagaagactgtgcggcttcctgaagagcctgggctgggtgagatacgccgagagagtgctgggcagacccatcaccgcccacctgtgcaccgccaagagcccccagcaggtgatgggcagcctggtgaaggactacttcgccagacagcagaacctgagccccgagaagatcttccacgtgatcgtggccccctgctacgacaagaagctggaggccctgcaggagagcctgccccccgccctgcacggcagcagaggcgccgactgcgtgctgaccagcggcaccggcagcctgtgggagtgcacccccgtgatcaccgccacccaggaggccgccgccagagagagcctggagcccggcagacagagactgcagagagacaagatcgcccccctggacagcagcctgggcggcggcggcgagatcgcccagatcatggagcagggcgacctgagcgtgagagacgccgccgtggacacctag

SEQ ID NO: 12696 - DNA, 471 bp, synthetic construct
  source 1..471: mol_type = other DNA; note = Synthetic coding sequence
tgaggcaaggcccagagaaagatcagcgccatccacatcctggacgtgctggtgctgaacggcaccgacgtgagagagcagcacttcaaccagagaatccagctggccgagaagttcgtgaaggccgtgagcaagcccagcagacccgacatgaaccccatcagagtgaaggaggtgtacagactggaggagatggagaagatcttcgtgagactggagatgaagatcatcaagggcagcagcggcacccccaagctgagctacaccggcagagacgacagacacttcgtgcccatgggcctgtacatcgtgagaaccgtgaacgagccctggaccatgggcttcagcaagagcttcaagaagaagttcttctacaacaagaagaccaaggacagcaccttcgacctgcccgccgacagcatcgcccccttccacctgcccagcctggcctgcctgagcaagatggactag

SEQ ID NO: 12697 - DNA, 1200 bp, synthetic construct; identical to SEQ ID NO: 12045
  source 1..1200: mol_type = other DNA; note = Synthetic coding sequence

SEQ ID NO: 12698 - DNA, 819 bp, synthetic construct
  source 1..819: mol_type = other DNA; note = Synthetic coding sequence
atggccagcctgctgcaggaccagctgaccaccgaccaggacctgctgctgatgcaggagggcatgcccatgagaaaggtgagaagcaagagctggaagaagctgagatacttcagactgcagaacgacggcatgaccgtgtggcacgccagacaggccagaggcagcgccaagcccagcttcagcatcagcgacgtggagaccatcagaaacggccacgacagcgagctgctgagaagcctggccgaggagctgcccctggagcagggcttcaccatcgtgttccacggcagaagaagcaacctggacctgatggccaacagcgtggaggaggcccagatctggatgagaggcctgcagctgctggtggacctggtgaccagcatggaccaccaggagagactggacagatggctgagcgactggttccagagaggcgacaagaaccaggacggcaagatgagcttccaggaggtgcagagactgctgcacctgatgaacgtggagatggaccaggagtacgccttcagcctgttccaggccgccgacaccagccagagcggcaccctggagggcgaggagttcgtgcagttctacaaggccctgaccaagagagccgaggtgcaggagctgttcgagagcttcagcgccgacggccagaagctgaccctgctggagttcctggacttcctgcaggaggagcagaaggagagagactgcaccagcgagctggccctggagctgatcgacagatacgagcccagcgacagcggcgccagcgaggaggaccccggcgagggcgaggaggtgaacacctag

SEQ ID NO: 12699 - DNA, 360 bp, synthetic construct; identical to SEQ ID NO: 11623
  source 1..360: mol_type = other DNA; note = Synthetic coding sequence

SEQ ID NO: 12700 - DNA, 1881 bp, synthetic construct; identical to SEQ ID NO: 10843
  source 1..1881: mol_type = other DNA; note = Synthetic coding sequence

SEQ ID NO: 12701 - DNA, 189 bp, synthetic construct
  source 1..189: mol_type = other DNA; note = Synthetic coding sequence
atggccatggcccccagccccagcctggtgcaggtgtacaccagccccgccgccgtggccgtgtgggagtggcaggacggcctgggcacctggcacccctacagcgccaccgtgtgcagcttcatcgagcagcagttcgtgcagcagaagggccagagattcggcctgggcagcctggcccacagctag

SEQ ID NO: 12702 - DNA, 228 bp, synthetic construct
  source 1..228: mol_type = other DNA; note = Synthetic coding sequence
atgagactgagcctgcccctgctgctgctgctgctgggcgcctgggccatccccggcggcctgggcgacagagcccccctgaccgccaccgccccccagctggacgacgaggagatgtacagcgcccacatgcccgcccacctgagatgcgacgcctgcagagccgtggcctaccagagactgtgcagctaccccccccacctgcccctgaccgagcagcagagctag

SEQ ID NO: 12703 - DNA, 2619 bp, synthetic construct
  source 1..2619: mol_type = other DNA; note = Synthetic coding sequence
atgggcgacagcgacgacgagtacgacagaagaagaagagacaagttcagaagagagagaagcgactacgacagaagcagagagagagacgagagaagaagaggcgacgactggaacgacagagagtgggacagaggcagagagagaagaagcagaggcgagtacagagactacgacagaaacagaagagagagattcagcccccccagacacgagctgagccccccccagaagagaatgagaagagactgggacgagcacagcagcgacccctaccacagcggctacgagatgccctacgccggcggcggcggcggccccacctacggccccccccagccctggggccaccccgacgtgcacatcatgcagcaccacgtgctgcccatccaggccagactgggcagcatcgccgagatcgacctgggcgtgcccccccccgtgatgaagaccttcaaggagttcctgctgagcctggacgacagcgtggacgagaccgaggccgtgaagagatacaacgactacaagctggacttcagaagacagcagatgcaggacttcttcctggcccacaaggacgaggagtggttcagaagcaagtaccaccccgacgaggtgggcaagagaagacaggaggccagaggcgccctgcagaacagactgagagtgttcctgagcctgatggagaccggctggttcgacaacctgctgctggacatcgacaaggccgacgccatcgtgaagatgctggacgccgccgtgatcaagatggagggcggcaccgagaacgacctgagaatcctggagcaggaggaggaggaggagcaggccggcaagcccggcgagcccagcaagaaggaggagggcagagccggcgccggcctgggcgacggcgagagaaagaccaacgacaaggacgagaagaaggaggacggcaagcaggccgagaacgacagcagcaacgacgacaagaccaagaagagcgagggcgacggcgacaaggaggagaagaaggaggacagcgagaaggaggccaagaagagcagcaagaagagaaacagaaagcacagcggcgacgacagcttcgacgagggcagcgtgagcgagagcgagagcgagagcgagagcggccaggccgaggaggagaaggaggaggccgaggaggccctgaaggagaaggagaagcccaaggaggaggagtgggagaagcccaaggacgccgccggcctggagtgcaagcccagacccctgcacaagacctgcagcctgttcatgagaaacatcgcccccaacatcagcagagccgagatcatcagcctgtgcaagagataccccggcttcatgagagtggccctgagcgagccccagcccgagagaagattcttcagaagaggctgggtgaccttcgacagaagcgtgaacatcaaggagatctgctggaacctgcagaacatcagactgagagagtgcgagctgagccccggcgtgaacagagacctgaccagaagagtgagaaacatcaacggcatcacccagcacaagcagatcgtgagaaacgacatcaagctggccgccaagctgatccacaccctggacgacagaacccagctgtgggccagcgagcccggcaccccccccctgcccaccagcctgcccagccagaaccccatcctgaagaacatcaccgactacctgatcgaggaggtgagcgccgaggaggaggagctgctgggcagcagcggcggcgccccccccgaggagccccccaaggagggcaaccccgccgagatcaacgtggagagagacgagaagctgatcaaggtgctggacaagctgctgctgtacctgagaatcgtgcacagcctggactactacaacacctgcgagtaccccaacgaggacgagatgcccaacagatgcggcatcatccacgtgagaggccccatgccccccaacagaatcagccacggcgaggtgctggagtggcagaagaccttcgaggagaagctgacccccctgctgagcgtgagagagagcctgagcgaggaggaggcccagaagatgggcagaaaggaccccgagcaggaggtggagaagttcgtgaccagcaacacccaggagctgggcaaggacaagtggctgtgccccctgagcggcaagaagttcaagggccccgagttcgtgagaaagcacatcttcaacaagcacgccgagaagatcgaggaggtgaagaaggaggtggccttcttcaacaacttcctgaccgacgccaagagacccgccctgcccgagatcaagcccgcccagccccccggccccgcccagagcctgacccccggcctgccctacccccaccagaccccccagggcctgatgccctacggccagcccagaccccccatcctgggctacggcgccggcgccgtgagacccgccgtgcccaccggcggccccccctacccccacgccccctacggcgccggcagaggcaactacgacgccttcagaggccagggcggctaccccggcaagcccagaaacagaatggtgagaggcgaccccagagccatcgtggagtacagagacctggacgcccccgacgacgtggacttcttctag

SEQ ID NO: 12704 - DNA, 483 bp, synthetic construct
  source 1..483: mol_type = other DNA; note = Synthetic coding sequence
tgacccgaggacgtgcaggccctggtgagcggcaagctggccctgagatacgccggcagacagaccgaggccctgaagtgcgtggcccaggccagcaagaacagaagcctggccgacttcgagaaggccctgaccgactacagagccgagctgagagacgaccccatcatcagcacccacctggccaagctgtacgacaacctgctggagcagaacctgatcagagtgatcgagcccttcagcagagtgcagatcgagcacatcagcagcctgatcaagctgagcaaggccgacgtggagagaaagctgagccagatgatcctggacaagaagttccacggcatcctggaccagggcgagggcgtgctgatcatcttcgacgagccccccgtggacaagacctacgaggccgccctggagaccatccagaacatgagcaaggtggtggacagcctgtacaacaaggccaagaagctgacctag

SEQ ID NO: 12705 - DNA, 3906 bp, synthetic construct
  source 1..3906: mol_type = other DNA; note = Synthetic coding sequence
atgtggagaagaaagcaccccagaaccagcggcggcaccagaggcgtgctgagcggcaacagaggcgtggagtacggcagcggcagaggccacctgggcaccttcgagggcagatggagaaagctgcccaagatgcccgaggccgtgggcaccgaccccagcaccagcagaaagatggccgagctggaggaggtgaccctggacggcaagcccctgcaggccctgagagtgaccgacctgaaggccgccctggagcagagaggcctggccaagagcggccagaagagcgccctggtgaagagactgaagggcgccctgatgctggagaacctgcagaagcacagcaccccccacgccgccttccagcccaacagccagatcggcgaggagatgagccagaacagcttcatcaagcagtacctggagaagcagcaggagctgctgagacagagactggagagagaggccagagaggccgccgagctggagggcaagagcagcagcatcagcgaggagaagggcgacagcgacgacgagaagcccagaaagggcgagagaagaagcagcagagtgagacaggccagagccgccaagctgagcgagggcagccagcccgccgaggaggaggaggaccaggagacccccagcagaaacctgagagtgagagccgacagaaacctgaagaccgaggaggaggaggaggaggaggaggaggaggaggaggacgacgaggaggaggagggcgacgacgagggccagaagagcagagaggcccccatcctgaaggagttcaaggaggagggcgaggagatccccagagtgaagcccgaggagatgatggacgagagacccaagaccagaagccaggagcaggaggtgctggagagaggcggcagattcaccagaagccaggaggaggccagaaagagccacctggccagacagcagcaggagaaggagatgaagaccaccagccccctggaggaggaggagagagagatcaagagcagccagggcctgaaggagaagagcaagagccccagcccccccagactgaccgaggacagaaagaaggccagcctggtggccctgcccgagcagaccgccagcgaggaggagacccccccccccctgctgaccaaggaggccagcagcccccccccccacccccagctgcacagcgaggaggagatcgagcccatggagggccccgcccccgccgtgctgatccagctgagcccccccaacaccgacgccgacaccagagagctgctggtgagccagcacaccgtgcagctggtgggcggcctgagccccctgagcagccccagcgacaccaaggccgagagccccgccgagaaggtgcccgaggagagcgtgctgcccctggtgcagaagagcaccctggccgactacagcgcccagaaggacctggagcccgagagcgacagaagcgcccagcccctgcccctgaagatcgaggagctggccctggccaagggcatcaccgaggagtgcctgaagcagcccagcctggagcagaaggagggcagaagagccagccacaccctgctgcccagccacagactgaagcagagcgccgacagcagcagcagcagaagcagcagcagcagcagcagcagcagcagaagcagaagcagaagccccgacagcagcggcagcagaagccacagccccctgagaagcaagcagagagacgtggcccaggccagaacccacgccaaccccagaggcagacccaagatgggcagcagaagcaccagcgagagcagaagcagaagcagaagcagaagcagaagcgccagcagcaacagcagaaagagcctgagccccggcgtgagcagagacagcagcaccagctacaccgagaccaaggaccccagcagcggccaggaggtggccaccccccccgtgccccagctgcaggtgtgcgagcccaaggagagaaccagcaccagcagcagcagcgtgcaggccagaagactgagccagcccgagagcgccgagaagcacgtgacccagagactgcagcccgagagaggcagccccaagaagtgcgaggccgaggaggccgagccccccgccgccacccagccccagaccagcgagacccagaccagccacctgcccgagagcgagagaatccaccacaccgtggaggagaaggaggaggtgaccatggacaccagcgagaacagacccgagaacgacgtgcccgagccccccatgcccatcgccgaccaggtgagcaacgacgacagacccgagggcagcgtggaggacgaggagaagaaggagagcagcctgcccaagagcttcaagagaaagatcagcgtggtgagcgccaccaagggcgtgcccgccggcaacagcgacaccgagggcggccagcccggcagaaagagaagatggggcgccagcaccgccaccacccagaagaagcccagcatcagcatcaccaccgagagcctgaagagcctgatccccgacatcaagcccctggccggccaggaggccgtggtggacctgcacgccgacgacagcagaatcagcgaggacgagaccgagagaaacggcgacgacggcacccacgacaagggcctgaagatctgcagaaccgtgacccaggtggtgcccgccgagggccaggagaacggccagagagaggaggaggaggaggagaaggagcccgaggccgagccccccgtgcccccccaggtgagcgtggaggtggccctgcccccccccgccgagcacgaggtgaagaaggtgaccctgggcgacaccctgaccagaagaagcatcagccagcagaagagcggcgtgagcatcaccatcgacgaccccgtgagaaccgcccaggtgcccagcccccccagaggcaagatcagcaacatcgtgcacatcagcaacctggtgagacccttcaccctgggccagctgaaggagctgctgggcagaaccggcaccctggtggaggaggccttctggatcgacaagatcaagagccactgcttcgtgacctacagcaccgtggaggaggccgtggccaccagaaccgccctgcacggcgtgaagtggccccagagcaaccccaagttcctgtgcgccgactacgccgagcaggacgagctggactaccacagaggcctgctggtggacagacccagcgagaccaagaccgaggagcagggcatccccagacccctgcacccccccccccccccccccgtgcagcccccccagcaccccagagccgagcagagagagcaggagagagccgtgagagagcagtgggccgagagagagagagagatggagagaagagagagaaccagaagcgagagagagtgggacagagacaaggtgagagagggccccagaagcagaagcagaagcagagacagaagaagaaaggagagagccaagagcaaggagaagaagagcgagaagaaggagaaggcccaggaggagccccccgccaagctgctggacgacctgttcagaaagaccaaggccgccccctgcatctactggctgcccctgaccgacagccagatcgtgcagaaggaggccgagagagccgagagagccaaggagagagagaagagaagaaaggagcaggaggaggaggagcagaaggagagagagaaggaggccgagagagagagaaacagacagctggagagagagaagagaagagagcacagcagagagagagacagagagagagagagagagagagagagagacagaggcgacagagacagagacagagagagagacagagagagaggcagagagagagacagaagagacaccaagagacacagcagaagcagaagcagaagcacccccgtgagagacagaggcggcagaagatag

SEQ ID NO: 12706 - DNA, 231 bp, synthetic construct
  source 1..231: mol_type = other DNA; note = Synthetic coding sequence
atgctgctggagaacctgaccgacaacgagagcgagaacaccaacctgaagaagaaggtgttcgagaaggaggcccacatccaggagctgagctgcctgttccagagcgagaagagcctggagaccaagatcgccaagtggaacctgcagagcagaatgaacaagaacgaggccatcgtgatgaaggaggccagcagacagaagaccgtggccctgaagaaggccagctag

SEQ ID NO: 12707 - DNA, 1749 bp, synthetic construct
  source 1..1749: mol_type = other DNA; note = Synthetic coding sequence
atggaggtgagagccagcctgcagaaggtgagcggcagcagcgacagcgtggccaccatgaacagcgaggagttcgtgctggtgccccagtacgccgacgacaacagcaccaagcacgaggagaagccccagctgaagatcgtgagcaacggcgacgagcagctggagaaggccatggaggagatcctgagagacagcgagaagagacccagcagcctgctggtggactgccagagcagcagcgagatcagcgaccacagcttcggcgacatccccgccagccagaccaacaagcccagcctgcagctgatcctggaccccagcaacaccgagatcagcacccccagacccagcagccccggcggcctgcccgaggaggacagcgtgctgttcaacaagctgacctacctgggctgcatgaaggtgagcagccccagaaacgaggtggaggccctgagagccatggccaccatgaagagcagcagccagtaccccttccccgtgaccctgtacgtgcccaacgtgcccgagggcagcgtgagaatcatcgaccagagcagcaacgtggagatcgccagcttccccatctacaaggtgctgttctgcgccagaggccacgacggcaccaccgagagcaactgcttcgccttcaccgagagcagccacggcagcgaggagttccagatccacgtgttcagctgcgagatcaaggaggccgtgagcagaatcctgtacagcttctgcaccgccttcaagagaagcagcagacaggtgagcgacgtgaaggacagcgtgatccccacccccgacagcgacgtgttcaccttcagcgtgagcctggaggtgaaggaggacgacggcaagggcaacttcagactgctggtgatccccatccccttcgagtacttcagccccgtgcccaaggacagagacaagttctacttcaagctgaagcagggcatcgagaagaaggtggtgatcaccgtgcagcagctgagcaacaaggagctggccatcgagagatgcttcggcatgctgctgagccccggcagaaacgtgaagaacagcgacatgcacctgctggacatggagagcatgggcaagagctacgacggcagagcctacgtgatcaccggcatgtggaaccccaacgcccccgtgttcctggccctgaacgaggagacccccaaggacaagcaggtgtacatgaccgtggccgtggacatggtggtgaccgaggtggtggagcccgtgagattcctgctggagaccgtggtgagagtgtaccccgccaacgagagattctggtacttcagcagaaagaccttcaccgagaccttcttcatgagactgaagcagagcgagggcaagggccacaccaacgccggcgacgccatctacgaggtggtgagcctgcagagagagagcgacaaggaggagcccgtgacccccaccagcggcggcggccccatgagcccccaggacgacgaggccgaggaggagagcgacaacgagctgagcagcggcaccggcgacgtgagcaaggactgccccgagaagatcctgtacagctggggcgagctgctgggcaagtggcacagcaacctgggcgccagacccaagggcctgagcaccctggtgaagagcggcgtgcccgaggccctgagagccgaggtgtggcagctgctggccggctgccacgacaaccaggccatgctggacagatacagaatcctgatcaccaagtag

SEQ ID NO: 12708 - DNA, 138 bp, synthetic construct
  source 1..138: mol_type = other DNA; note = Synthetic coding sequence
atggacgccgacagcgacgtggccctggacatcctgatcaccaacgtggtgtgcgtgttcagaaccagatgccacctgaacctgagaaagatcgccctggagggcgccaacgtgatctacaagagagacgtgggctag

SEQ ID NO: 12709 - DNA, 762 bp, synthetic construct
  source 1..762: mol_type = other DNA; note = Synthetic coding sequence
atggaggacgccccccagagactgagatggcaggcccacctggagttcacccacaaccacgacgtgggcgacctgacctgggacaagatcgccgtgagcctgcccagaagcgagaagctgagaagcctggtgctggccggcatcccccacggcatgagaccccagctgtggatgagactgagcggcgccctgcagaagaagagaaacagcgagctgagctacagagagatcgtgaagaacagcagcaacgacgagaccatcgccgccaagcagatcgagaaggacctgctgagaaccatgcccagcaacgcctgcttcgccagcatgggcagcatcggcgtgcccagactgagaagagtgctgagagccctggcctggctgtaccccgagatcggctactgccagggcaccggcatggtggccgcctgcctgctgctgttcctggaggaggaggacgccttctggatgatgagcgccatcatcgaggacctgctgcccgccagctacttcagcaccaccctgctgggcgtgcagaccgaccagagagtgctgagacacctgatcgtgcagtacctgcccagactggacaagctgctgcaggagcacgacatcgagctgagcctgatcaccctgcactggttcctgaccgccttcgccagcgtggtggacatcaagctgctgctgagaatctgggacctgttcttctacgagggcagcagagtgctgttccagctgaccctgggcatgctgcacctgaagtag

SEQ ID NO: 12710 - DNA, 336 bp, synthetic construct
  source 1..336: mol_type = other DNA; note = Synthetic coding sequence
tgacccctggtgaaggtgcagatcttcggcgtgagactggacaccgccagacaggagaccaactacgtggagaacaacggcttcaacccctactggggccagaccctgtgcttcagagtgctggtgcccgagctggccatgctgagattcgtggtgatggactacgactggaagagcagaaacgacttcatcggccagtacaccctgccctggacctgcatgcagcagggctacagacacatccacctgctgagcaaggacggcatcagcctgagacccgccagcatcttcgtgtacatctgcatccaggagggcctggagggcgacgagagctag

SEQ ID NO: 12711 - DNA, 552 bp, synthetic construct; identical to SEQ ID NO: 10168
  source 1..552: mol_type = other DNA; note = Synthetic coding sequence

SEQ ID NO: 12712 - DNA, 1215 bp, synthetic construct
  source 1..1215: mol_type = other DNA; note = Synthetic coding sequence
atgatgctgagcaccgagggcagagagggcttcgtggtgaaggtgagaggcctgccctggagctgcagcgccgacgaggtgatgagattcttcagcgactgcaagatccagaacggcaccagcggcatcagattcatctacaccagagagggcagacccagcggcgaggccttcgtggagctggagagcgaggaggaggtgaagctggccctgaagaaggacagagagaccatgggccacagatacgtggaggtgttcaagagcaacagcgtggagatggactggatgaccctgcccgtggacttccagggcagaagcaccggcgaggccttcgtgcagttcgccagccaggagatcgccgagaaggccctgaagaagcacaaggagagaatcggccacagatacatcgagatcttcaagagcagcagagccgaggtgagaacccactacgacccccccagaaagctgatggccatgcagagacccggcccctacgacagacccggcgccggcagaggctacaacagcatcggcagaggcgccggcttcgagagaatgagaagaggcgcctacggcggcggctacggcggctacgacgactacggcggctacaacgacggctacggcttcggcagcgacagattcggcagagacctgaactactgcttcagcggcatgagcgaccacagatacggcgacggcggcagcagcttccagagcaccaccggccactgcgtgcacatgagaggcctgccctacagagccaccgagaacgacatctacaacttcttcagccccctgaaccccatgagagtgcacatcgagatcggccccgacggcagagtgaccggcgaggccgacgtggagttcgccacccacgaggacgccgtggccgccatggccaaggacaaggccaacatgcagcacagatacgtggagctgttcctgaacagcaccgccggcaccagcggcggcgcctacgaccacagctacgtggagctgttcctgaacagcaccgccggcgccagcggcggcgcctacggcagccagatgatgggcggcatgggcctgagcaaccagagcagctacggcggccccgccagccagcagctgagcggcggctacggcggcggctacggcggccagagcagcatgagcggctacgaccaggtgctgcaggagaacagcagcgactaccagagcaacctggcctag

SEQ ID NO: 12713 - DNA, 1545 bp, synthetic construct; identical to SEQ ID NO: 12127
  source 1..1545: mol_type = other DNA; note = Synthetic coding sequence

SEQ ID NO: 12714 - DNA, 2928 bp, synthetic construct
  source 1..2928: mol_type = other DNA; note = Synthetic coding sequence
atgaagttcgtgagcgaggacctgcacagatgcgccctgctgaccgccgacagcttcggcgaccccttcttccccagaaccacccagatcctgctggagtaccagctgggcagatgggtgcccagactgagagagcccagagacctgtacggcgtgagcagcagcggccccctgagccccaccagatggccctaccactgcgaggtgatcgacgagaaggtgcagcacatcgactggacccccagctgccccgagcccgtgtacatccccaccggcctggagaccgagcccctgtaccccgacagcaaggaggccaccgtggtgtacctggccgaggacgcctacaaggagccctgcttcgtgtacagcagagtgggcggcaacagaacccccctgaagcagcccgtggactacagagacaacaccctgatgttcgaggccagattcgagagcggcaacctgcagaaggtggtgaaggtggccgagtacgagtaccagctgaccgtgagacccgacctgttcaccaacaagcacacccagtggtactacttccaggtgaccaacatgagagccggcatcgtgtacagattcaccatcgtgaacttcaccaagcccgccagcctgtacagcagaggcatgagacccctgttctacagcgagaaggaggccaaggcccaccacatcggctggcagagaatcggcgaccagatcaagtactacagaaacaaccccggccaggacggcagacactacttcagcctgacctggaccttccagttcccccacaacaaggacacctgctacttcgcccactgctacccctacacctacaccaacctgcaggagtacctgagcggcatcaacaacgaccccgtgagaagcaagttctgcaagatcagagtgctgtgccacaccctggccagaaacatggtgtacatcctgaccatcaccacccccctgaagaacagcgacagcagaaagagaaaggccgtgatcctgaccgccagagtgcaccccggcgagaccaacagcagctggatcatgaagggcttcctggactacatcctgggcaacagcagcgacgcccagctgctgagagacaccttcgtgttcaaggtggtgcccatgctgaaccccgacggcgtgatcgtgggcaactacagatgcagcctggccggcagagacctgaacagaaactacaccagcctgctgaaggagagcttccccagcgtgtggtacaccagaaacatggtgcacagactgatggagaagagagaggtgatcctgtactgcgacctgcacggccacagcagaaaggagaacatcttcatgtacggctgcgacggcagcgacagaagcaagaccctgtacctgcagcagagaatcttccccctgatgctgagcaagaactgccccgacaagttcagcttcagcgcctgcaagttcaacgtgcagaagagcaaggagggcaccggcagagtggtgatgtggaagatgggcatcagaaacagcttcaccatggaggccaccttctgcggcagcaccctgggcaacaagagaggcacccacttcagcaccaaggacctggagagcatgggctaccacttctgcgacagcctgctggactactgcgaccccgacagaaccaagtactacagatgcctgaaggagctggaggagatggagagacacatcaccctggagaaggtgttcgaggacagcgacacccccgtgatcgacatcaccctggacgtggagagcagcagcagaggcagcgacagcagcgagagcatcgacagcctgacctacctgctgaagctgaccagccagaagaagcacctgaagaccaagaaggagagaaacagcaccatcgccagccaccagaacgccagaggccaggaggtgtacgacagaggccacctgctgcagagacacacccagagcaacagcgacgtgaaggacaccagacccaacgagcccgacgactacatggtggactacttcagaagacagctgcccaaccagggcctggcccactgcaagctgagactgcccggcagcagacacagccccgccagcgccagcagagtggccggcaccaccggcaccagacaccacacctggctgatcttcgtgttcctggtggagatgggcaagaagatccccctgaagggcaccgacctgtacggcaactgcttcaaggtgaccagcctgcagagccccatgggcaagcagaccagcacctggaccgagaagaccagaatccccaccgaggacctgcaccacaacctgaagagcaagatcaaggagtgcatcagcttccagagcaagaagaccggcatcaactggaccgacgacgagaagagaagctacaaggacaagggcatcgtgcagacccaggagatcctgcagtacctgctgcccatcgtgcacagcaccaagaacatgcagaccacccagatcaagcagctgttcaaccccagaaccaacttccagatccagcaccagctgaaccccgccacctgcagaaacatcaagaagtacagcaccagctggaccgcccccagaaaccaccccttcgtgatccagggcgacgtgatggccaacagcagcgagtgggtgcagagcaagccccacagaagcctggagagcctgagccccctgaagggccccaagaagaacaagcacagccagatctgggccatcaagaacgaggacatcaagcccctgagcagcaagtgggagaccgccagcagcagcttcggcatggacgccaacgtgctgaagtacaagagcctgcaggccgaggagaccaaccagcagagcagcaagcacaccgccctgcacctgaccaagaacaaggacgagcaggccaacaagaacgacggccagcccaccctgtacctgaagttccagagagagagctag

SEQ ID NO: 12715 - DNA, 1626 bp, synthetic construct
  source 1..1626: mol_type = other DNA; note = Synthetic coding sequence
atgagcagcagcggctacccccccaaccagggcgccttcagcaccgagcagagcagataccccccccacagcgtgcagtacaccttccccaacaccagacaccagcaggagttcgccgtgcccgactacagaagcagccacctggaggtgagccaggccagccagctgctgcagcagcagcagcagcagcagctgagaagaagacccagcctgctgagcgagttccaccccggcagcgacagaccccaggagagaagaaccagctacgagcccttccaccccggccccagccccgtggaccacgacagcctggagagcaagagacccagactggagcaggtgagcgacagccacttccagagagtgagcgccgccgtgctgcccctggtgcaccccctgcccgagggcctgagagccagcgccgacgccaagaaggaccccgccttcggcggcaagcacgaggcccccagcagccccatcagcggccagccctgcggcgacgaccagaacgccagccccagcaagctgagcaaggaggagctgatccagagcatggacagagtggacagagagatcgccaaggtggagcagcagatcctgaagctgaagaagaagcagcagcagctggaggaggaggccgccaagccccccgagcccgagaagcccgtgagccccccccccgtggagcagaagcacagaagcatcgtgcagatcatctacgacgagaacagaaagaaggccgaggaggcccacaagatcttcgagggcctgggccccaaggtggagctgcccctgtacaaccagcccagcgacaccaaggtgtaccacgagaacatcaagaccggcgtgcccgccagaagaatgatgaagaaccaggtgatgagaaagaagctgatcctgttcttcaagagaagaaaccacgccagaaagcagagagagcagaagatctgccagagatacgaccagctgatggaggcctgggagaagaaggtggacagaatcgagaacaaccccagaagaaaggccaaggagagcaagaccagagagtactacgagaagcagttccccgagatcagaaagcagagagagcagcaggagagattccagagagtgggccagagaggcgccggcctgagcgccaccatcgccagaagcgagcacgagatcagcgagatcatcgacggcctgagcgagcaggagaacaacgagaagcagatgagacagctgagcgtgatcccccccatgatgttcgacgccgagcagagaagagtgaagttcatcaacatgaacggcctgatggaggaccccatgaaggtgtacaaggacagacagttcatgaacgtgtggaccgaccacgagaaggagatcttcaaggacaagttcatccagcaccccaagaacttcggcctgatcgccagctacctggagagaaagagcgtgcccgactgcgtgctgtactactacctgaccaagaagaacgagaactacaaggccctggtgagaagaaactacggcaagagaagaggcagaaaccagcagatcgccagacccagccaggaggagaaggtggaggagaaggaggaggacaaggccgagaagaccgagaagaaggaggaggagaagtag

SEQ ID NO: 12716 - DNA, 840 bp, synthetic construct
  source 1..840: mol_type = other DNA; note = Synthetic coding sequence
atgaagttccccttcctgcccatcctggtgatgaagttcatcgagaaggcccagaacatgagcaagtacgtgctgatcgacacccccggccagatcgaggtgttcacctggagcgccagcggcaccatcatcaccgaggccctggccagcagcttccccaccgtggtgatctacgtgatggacaccagcagaagcaccaaccccgtgaccttcatgagcaacatgctgtacgcctgcagcatcctgtacaagaccaagctgcccttcatcgtggtgatgaacaagaccgacatcatcgaccacagcttcgccgtggagtggatgcaggacttcgaggccttccaggacgccctgaaccaggagaccacctacgtgagcaacctgaccagaagcatgagcctggtgctggacgagttctacagcagcctgagagtggtgggcgtgagcgccgtgctgggcaccggcctggacgagctgttcgtgcaggtgaccagcgccgccgaggagtacgagagagagtacagacccgagtacgagagactgaagaagagcctggccaacgccgagagccagcagcagagagagcagctggagagactgagaaaggacatgggcagcgtggccctggacgccggcaccgccaaggacagcctgagccccgtgctgcaccccagcgacctgatcctgaccagaggcaccctggacgaggaggacgaggaggccgacagcgacaccgacgacatcgaccacagagtgaccgaggagagccacgaggagcccgccttccagaacttcatgcaggagagcatggcccagtactggaagagaaacaacaagtag

SEQ ID NO: 12717 - DNA, 1230 bp, synthetic construct
  source 1..1230: mol_type = other DNA; note = Synthetic coding sequence
atgaaggacacccaggacatccaggaggccagcaaggccatgcagaacaaggtgcacgagcaggaggacaagaacgagaagcagaagcagagagaggacaagctgggcgtgtacagcctggtgcacttcagccccaagatgctgggcagcgtggccaccaccctgcccctgagcagcagcaacagcagcggcatgcccctgggctactacctgagcagcccccagatcagcagagtgaccatcagcaccaccggccagctgaccagcaaggccaccgtgggcagctgcagcagagtggagaacagcctggacgccagccccttcagcgtgcccaagaagcaggacgagagccccatgatcggcgacggcgaggactacttcctgagcctgttcggcgacagcaagaagctgaccgcccacagcaactacacccagaagaccctgaagtacttcagcatgatcctggaggaggtgggccagttcaccagcagcagcctgggcgacgtggagatcgccgaggtgaacgtgaagggcctgttcgtgaagctgatcaacagcagcctggacaaggagatggccatcggcgaccacatcctgcagcagaacgtgaacggccagaccatcagcctgtacagattcctgcccaacatcgtgatgcaggccaacagcaccgtgaccgtgtgggccgccgccagcgaggccaagcaccagccccccagcgacttcctgtggaaggagcaggacaagttcagagccagccccgactgcatcaccatcctgtgcaagcccaacggccaggccatcgcctggtacacccccatccactggaagcaggcctgggagaagctggacgccgacgtggagttcaacagatgcagcgtggtgagccccaccttcagaaagagagtgttccagtggaccgccagcaccgccaccatcaccaaggagaagcaggaccagcccaagaaggacatcagcaactaccaggtggagcaggcccaggtgctgctgaagagagagaaggagatcccccccaccgtgttccccaacagaagcccctggtgccagaacccctacgtgagcgcccacccctactgccccctgatcgagccccacaacaccagcaccgccggcggcagactggacagacagcccagaaccagaagcaccagacccaacagagccagcggcagcaagaagaagaagaccagcgagagccagaagcagtag

SEQ ID NO: 12718 - DNA, 2442 bp, synthetic construct; identical to SEQ ID NO: 11863
  source 1..2442: mol_type = other DNA; note = Synthetic coding sequence

SEQ ID NO: 12719 - DNA, 1773 bp, synthetic construct
  source 1..1773: mol_type = other DNA; note = Synthetic coding sequence
atgcccagcccccagctgctggtgctgttcggcagccagaccggcaccgcccaggacgtgagcgagagactgggcagagaggccagaagaagaagactgggctgcagagtgcaggccctggacagctaccccgtggtgaacctgatcaacgagcccctggtgatcttcgtgtgcgccaccaccggccagggcgacccccccgacaacatgaagaacttctggagattcatcttcagaaagaacctgcccagcaccgccctgtgccagatggacttcgccgtgctgggcctgggcgacagcagctacgccaagttcaacttcgtggccaagaagctgcacagaagactgctgcagctgggcggcagcgccctgctgcccgtgtgcctgggcgacgaccagcacgagctgggccccgacgccgccgtggacccctggctgagagacctgtgggacagagtgctgggcctgtacccccccccccccggcctgaccgagatcccccccggcgtgcccctgcccagcaagttcaccctgctgttcctgcaggaggcccccagcaccggcagcgagggccagagagtggcccaccccggcagccaggagccccccagcgagagcaagcccttcctggcccccatgatcagcaaccagagagtgaccggccccagccacttccaggacgtgagactgatcgagttcgacatcctgggcagcggcatcagcttcgccgccggcgacgtggtgctgatccagcccagcaacagcgccgcccacgtgcagagattctgccaggtgctgggcctggaccccgaccagctgttcatgctgcagcccagagagcccgacgtgagcagccccaccagactgccccagccctgcagcatgagacacctggtgagccactacctggacatcgccagcgtgcccagaagaagcttcttcgagctgctggcctgcctgagcctgcacgagctggagagagagaagctgctggagttcagcagcgcccagggccaggaggagctgttcgagtactgcaacagacccagaagaaccatcctggaggtgctgtgcgacttcccccacaccgccgccgccatcccccccgactacctgctggacctgatccccgtgatcagacccagagccttcagcatcgccagcagcctgctgatcctggtggccgtggtgcagttccagaccagactgaaggagcccagaagaggcctgtgcagcagctggctggccagcctggaccccggccagggccccgtgagagtgcccctgtgggtgagacccggcagcctggccttccccgagacccccgacacccccgtgatcatggtgggccccggcaccggcgtggcccccttcagagccgccatccaggagagagtggcccagggccagaccggcaacttcctgttcttcggctgcagatggagagaccaggacttctactgggaggccgagtggcaggagctggagaagagagactgcctgaccctgatccccgccttcagcagagagcaggagcagaaggtgtacgtgcagcacagactgagagagctgggcagcctggtgtgggagctgctggacagacagggcgcctacttctacctggccggcaacgccaagagcatgcccgccgacgtgagcgaggccctgatgagcatcttccaggaggagggcggcctgtgcagccccgacgccgccgcctacctggccagactgcagcagaccagaagattccagaccgagacctgggcctag

SEQ ID NO: 12720 - DNA, 2436 bp, synthetic construct; identical to SEQ ID NO: 10003
  source 1..2436: mol_type = other DNA; note = Synthetic coding sequence

SEQ ID NO: 12721 - DNA, 189 bp, synthetic construct
  source 1..189: mol_type = other DNA; note = Synthetic coding sequence
atgcccgagatcagagtgacccccctgggcgcctgccccgtgctgagctggaacctggtgctgccccccggcagaggcagcagagcccccagcagcaccgacaccagaaccggcttccacgtgctgccccacggcgtgagcgccagcagcgagggcgcccccagacccggcgtggacaccgtgctgtag

SEQ ID NO: 12722 - DNA, 948 bp, synthetic construct
  source 1..948: mol_type = other DNA; note = Synthetic coding sequence
atgagcggcctggtgctgggccagagagacgagcccgccggccacagactgagccaggaggagatcctgggcagcaccagactggtgagccagggcctggaggccctgagaagcgagcaccaggccgtgctgcagagcctgagccagaccatcgagtgcctgcagcagggcggccacgaggagggcctggtgcacgagaaggccagacagctgagaagaagcatggagaacatcgagctgggcctgagcgaggcccaggtgatgctggccctggccagccacctgagcaccgtggagagcgagaagcagaagctgagagcccaggtgagaagactgtgccaggagaaccagtggctgagagacgagctggccggcacccagcagagactgcagagaagcgagcaggccgtggcccagctggaggaggagaagaagcacctggagttcctgggccagctgagacagtacgacgaggacggccacaccagcgaggagaaggagggcgacgccaccaaggacagcctggacgacctgttccccaacgaggaggaggaggaccccagcaacggcctgagcagaggccagggcgccaccgccgcccagcagggcggctacgagatccccgccagactgagaaccctgcacaacctggtgatccagtacgccgcccagggcagatacgaggtggccgtgcccctgtgcaagcaggccctggaggacctggagagaaccagcggcagaggccaccccgacgtggccaccatgctgaacatcctggccctggtgtacagagaccagaacaagtacaaggaggccgcccacctgctgaacgacgccctgagcatcagagagagcaccctgggccccgaccaccccgccgtgagcatcccctgccccccccaccccacccccagaaccccccaccactgctgcttcggcctgagctag

SEQ ID NO: 12723 - DNA, 2055 bp, synthetic construct; identical to SEQ ID NO: 9385
  source 1..2055: mol_type = other DNA; note = Synthetic coding sequence

SEQ ID NO: 12724 - DNA, 4050 bp, synthetic construct
  source 1..4050: mol_type = other DNA; note = Synthetic coding sequence
atggaggagaacgagagccagaagtgcgagccctgcctgccctacagcgccgacagaagacagatgcaggagcagggcaagggcaacctgcacgtgaccagccccgaggacgccgagtgcagaagaaccaaggagagactgagcaacggcaacagcagaggcagcgtgagcaagagcagcagaaacatccccagaagacacaccctgggcggccccagaagcagcaaggagatcctgggcatgcagaccagcgagatggacagaaagagagaggccttcctggagcacctgaagcagaagtacccccaccacgccagcgccatcatgggccaccaggagagactgagagaccagaccagaagccccaagctgagccacagcccccagccccccagcctgggcgaccccgtggagcacctgagcgagaccagcgccgacagcctggaggccatgagcgagggcgacgcccccacccccttcagcagaggcagcagaaccagagccagcctgcccgtggtgagaagcaccaaccagaccaaggagagaagcctgggcgtgctgtacctgcagtacggcgacgagaccaagcagctgagaatgcccaacgagatcaccagcgccgacaccatcagagccctgttcgtgagcgccttcccccagcagctgaccatgaagatgctggagagccccagcgtggccatctacatcaaggacgagagcagaaacgtgtactacgagctgaacgacgtgagaaacatccaggacagaagcctgctgaaggtgtacaacaaggaccccgcccacgccttcaaccacacccccaagaccatgaacggcgacatgagaatgcagagagagctggtgtacgccagaggcgacggccccggcgcccccagacccggcagcaccgcccaccccccccacgccatccccaacagcccccccagcacccccgtgccccacagcatgccccccagccccagcagaatcccctacggcggcaccagaagcatggtggtgcccggcaacgccaccatccccagagacagaatcagcagcctgcccgtgagcagacccatcagccccagccccagcgccatcctggagagaagagacgtgaagcccgacgaggacatgagcggcaagaacatcgccatgtacagaaacgagggcttctacgccgacccctacctgtaccacgagggcagaatgagcatcgccagcagccacggcggccaccccctggacgtgcccgaccacatcatcgcctaccacagaaccgccatcagaagcgccagcgcctactgcaaccccagcatgcaggccgagatgcacatggagcagagcctgtacagacagaagagcagaaagtaccccgacagccacctgcccaccctgggcagcaagaccccccccgccagcccccacagagtgagcgacctgagaatgatcgacatgcacgcccactacaacgcccacggccccccccacaccatgcagcccgacagagccagccccagcagacaggccttcaagaaggagcccggcaccctggtgtacatcgagaagcccagaagcgccgccggcctgagcagcctggtggacctgggcccccccctgatggagaagcaggtgttcgcctacagcaccgccaccatccccaaggacagagagaccagcgagaagatgatgaagaccaccgccaacagaaaccacaccgacagcgccggcaccccccacgtgagcggcggcaagatgctgagcgccctggagagcaccgtgccccccagccagcccccccccgtgggcaccagcgccatccacatgagcctgctggagatgagaagaagcgtggccgagctgagactgcagctgcagcagatgagacagctgcagctgcagaaccaggagctgctgagagccatgatgaagaaggccgagctggagatcagcggcaaggtgatggagaccatgaagagactggaggaccccgtgcagagacagagagtgctggtggagcaggagagacagaagtacctgcacgaggaggagaagatcgtgaagaagctgtgcgagctggaggacttcgtggaggacctgaagaaggacagcaccgccgccagcagactggtgaccctgaaggacgtggaggacggcgccttcctgctgagacaggtgggcgaggccgtggccaccctgaagggcgagttccccaccctgcagaacaagatgagagccatcctgagaatcgaggtggaggccgtgagattcctgaaggaggagccccacaagctggacagcctgctgaagagagtgagaagcatgaccgacgtgctgaccatgctgagaagacacgtgaccgacggcctgctgaagggcaccgacgccgcccaggccgcccagtacatggccatggagaaggccaccgccgccgaggtgctgaagagccaggaggaggccgcccacaccagcggccagcccttccacagcaccggcgcccccggcgacgccaagagcgaggtggtgcccctgagcggcatgatggtgagacacgcccagagcagccccgtggtgatccagcccagccagcacagcgtggccctgctgaaccccgcccagaacctgccccacgtggccagcagccccgccgtgccccaggaggccaccagcaccctgcagatgagccaggccccccagagcccccagatccccatgaacggcagcgccatgcagagcctgttcatcgaggagatccacagcgtgagcgccaagaacagagccgtgagcatcgagaaggccgagaagaagtgggaggagaagagacagaacctggaccactacaacggcaaggagttcgagaagctgctggaggaggcccaggccaacatcatgaagagcatccccaacctggagatgccccccgccaccggccccctgcccagaggcgacgcccccgtggacaaggtggagctgagcgaggacagccccaacagcgagcaggacctggagaagctgggcggcaagagcccccccccccccccccccccccccagaagaagctacctgcccggcagcggcctgaccaccaccagaagcggcgacgtggtgtacaccggcagaaaggagaacatcaccgccaaggccagcagcgaggacgccggccccagcccccagaccagagccaccaagtaccccgccgaggagcccgccagcgcctggacccccagccccccccccgtgaccaccagcagcagcaaggacgaggaggaggaggaggaggagggcgacaagatcatggccgagctgcaggccttccagaagtgcagcttcatggacgtgaacagcaacagccacgccgagcccagcagagccgacagccacgtgaaggacaccagaagcggcgccaccgtgccccccaaggagaagaagggcagcagcggcgccccccagaccagcagaatgcccgtgcccatgagcgccaagaacagacccggcaccctggacaagcccggcaagcagagcaagctgcaggaccccagacagtacagacaggccaacggcagcgccaagaagagcggcggcgacttcaagcccaccagccccagcctgcccgccagcaagatccccgccctgagccccagcagcggcaagagcagcagcctgcccagcagcagcggcgacagcagcaacctgcccaacccccccgccaccaagcccagcatcgccagcaaccccctgagcccccagaccggcccccccgcccacagcgccagcctgatccccagcgtgagcaacggcagcctgaagttccagagcctgacccacaccggcaagggccaccacctgagcttcagcccccagagccagaacggcagagcccccccccccctgagcttcagcagcagcccccccagccccgccagcagcgtgagcctgaaccagggcgccaagggcaccagaaccatccacacccccagcctgaccagctacaaggcccagaacggcagcagcagcaaggccacccccagcaccgccaaggagaccagctag

SEQ ID NO: 12725 - DNA, 177 bp, synthetic construct
  source 1..177: mol_type = other DNA; note = Synthetic coding sequence
tgaatcatccacaagctggccatgcagctgagacacatcggcgacaacatcgaccacagaatggtgagagaggacctgcagcaggacggcagagacgccctggaccacttcgtgttcttcttcttcagaagagtgcaggtgctgctgcacttcttctggaacaaccacctgctgtag

SEQ ID NO: 12726 - DNA, 429 bp, synthetic construct
  source 1..429: mol_type = other DNA; note = Synthetic coding sequence
atgcccgaggaccaggtgggcaagctggaggccaccgagaacaccatcagcgccatggccgccgccgccgccgagcagcagcagttctacctgctgctgggcaacctgctgagccccgacaacgtggtgagaaagcaggccgaggagacctacgagaacatccccggccagagcaagatcaccttcctgctgcaggccatcagaaacaccaccgccgccgaggaggccagacagatggccgccgtgctgctgagaagactgctgagcagcgccttcgacgaggtgtaccccgccctgcccagcgacgtgcagaccgccatcaagagcgagctgctgatgatcatccagatggagacccagagcagcatgagaaagaaggtgtgcgacatcgccgccgagctggccagaaacctgatcggcgtgtactag

SEQ ID NO: 12727 - DNA, 93 bp, synthetic construct
  source 1..93: mol_type = other DNA; note = Synthetic coding sequence
atgggcagcagaaagaaggagatcgccctgcaggtgaacatcagcacccaggagctgtgggaggagatgctgagcagcaagggcctgacctag

SEQ ID NO: 12728 - DNA, 645 bp, synthetic construct; identical to SEQ ID NO: 9749
  source 1..645: mol_type = other DNA; note = Synthetic coding sequence

SEQ ID NO: 12729 - DNA, 1158 bp, synthetic construct; identical to SEQ ID NO: 9880
  source 1..1158: mol_type = other DNA; note = Synthetic coding sequence

SEQ ID NO: 12730 - DNA, 255 bp, synthetic construct
  source 1..255: mol_type = other DNA; note = Synthetic coding sequence
atgagcggcctggtgctgggccagagagacgagcccgccggccacagactgagccaggaggagatcctgggcagcaccagactggtgagccagggcctggaggccctgagaagcgagcaccaggccgtgctgcagagcctgagccagaccatcgagtgcctgcagcagggcggccacgaggagggcctggtgcacgagaaggccagacagctgagaagaagcatggagaacatcgagctgggcctgagcgagtag

SEQ ID NO: 12731 - DNA, 483 bp, synthetic construct
  source 1..483: mol_type = other DNA; note = Synthetic coding sequence
atgagcgtgaacagcgagaagagcagcagcagcgagagacccgagccccagcagaaggcccccctggtgcccccccccccccccccccccccccccccccccccccccctgcccgaccccaccccccccgagcccgaggaggagatcctgggcagcgacgacgaggagcaggaggaccccgccgactactgcaagggcggctaccaccccgtgaagatcggcgacctgttcaacggcagataccacgtgatcagaaagctgggctggggccacttcagcaccgtgtggctgtgctgggacatgcagggcaagagattcgtggccatgaaggtggtgaagagcgcccagcactacaccgagaccgccctggacgagatcaagctgctgaagtgcgtgagagagagcgaccccagcgaccccaacaaggacatggtggtgcagctgatcgacgacttcaagatcagcggcatgaacggcatctag

SEQ ID NO: 12732 - DNA, 66 bp, synthetic construct
  source 1..66: mol_type = other DNA; note = Synthetic coding sequence
atgaaccccgccagcgcccccccccccctgcccccccccggccagcaggtgatccacgtgacctag

SEQ ID NO: 12733 - DNA, 1212 bp, synthetic construct; identical to SEQ ID NO: 9962
  source 1..1212: mol_type = other DNA; note = Synthetic coding sequence

SEQ ID NO: 12734 - DNA, 5106 bp, synthetic construct; identical to SEQ ID NO: 9923
  source 1..5106: mol_type = other DNA; note = Synthetic coding sequence

SEQ ID NO: 12735 - DNA, 408 bp, synthetic construct
  source 1..408: mol_type = other DNA; note = Synthetic coding sequence
atgggcaagagctgcaaggtggtggtgtgcggccaggccagcgtgggcaagaccagcatcctggagcagctgctgtacggcaaccacgtggtgggcagcgagatgatcgagacccaggaggacatctacgtgggcagcatcgagaccgacagaggcgtgagagagcaggtgaccatcgtggtgctgggcaacaagtgcgacctgcaggagcagagaagagtggaccccgacgtggcccagcactgggccaagagcgagaaggtgaagctgtgggaggtgagcgtggccgacagaagaagcctgctggagcccttcgtgtacctggccagcaagatgacccagccccagagcaagagcgccttccccctgagcagaaagaacaagggcagcggcagcctggacggctag

SEQ ID NO: 12736 - DNA, 3693 bp, synthetic construct; identical to SEQ ID NO: 10512
  source 1..3693: mol_type = other DNA; note = Synthetic coding sequence

SEQ ID NO: 12737 - DNA, 267 bp, synthetic construct
  source 1..267: mol_type = other DNA; note = Synthetic coding sequence
atgcccgaggaccaggtgggcaagctggaggccaccgagaacaccatcagcgccatggccgccgccgccgccgagcagcagcagttctacctgctgctgggcaacctgctgagccccgacaacgtggtgagaaagcaggccgaggagacctacgagaacatccccggccagagcaagatcaccttcctgctgcaggccatcagaaacaccaccgccgccgaggaggccagacagatggccgccgtgctgctgagaagactgctgtag

SEQ ID NO: 12738 - DNA, 3627 bp, synthetic construct; identical to SEQ ID NO: 10567
  source 1..3627: mol_type = other DNA; note = Synthetic coding sequence

SEQ ID NO: 12739 - DNA, 1743 bp, synthetic construct
  source 1..1743: mol_type = other DNA; note = Synthetic coding sequence
atggtgctggtgggcacccaggacgccatcagcgccgccaaccccagagtgatcgacgacagcagagccagaaagctgagcaccgacctgaagagatgcacctactacgagacctgcgccacctacggcctgaacgtggagagagtgttccaggacgtggcccagaaggtggtggccctgagaaagaagcagcagctggccatcggcccctgcaagagcctgcccaacagccccagccacagcgccgtgagcgccgccagcatccccgccgtgcacatcaaccaggccaccaacggcggcggcagcgccttcagcgactacagcagcagcgtgcccagcacccccagcatcagccagagagagctgagaatcgagaccatcgccgccagcagcacccccacccccatcagaaagcagagcaagagaagaagcaacatcttcaccagcagaaagggcgccgacctggacagagagaagaaggccgccgagtgcaaggtggacagcatcggcagcggcagagccatccccatcaagcagggcatcctgctgaagagaagcggcaagagcctgaacaaggagtggaagaagaagtacgtgaccctgtgcgacaacggcctgctgacctaccaccccagcctgcacgactacatgcagaacatccacggcaaggagatcgacctgctgagaaccaccgtgaaggtgcccggcaagagactgcccagagccacccccgccaccgcccccggcaccagccccagagccaacggcctgagcgtggagagaagcaacacccagctgggcggcggcaccgaggccgaggagagcttcgagttcgtggtggtgagcctgaccggccagacctggcacttcgaggccagcaccgccgaggagagagagctgtgggtgcagagcgtgcaggcccagatcctggccagcctgcagggctgcagaagcgccaaggacaagaccagactgggcaaccagaacgccgccctggccgtgcaggccgtgagaaccgtgagaggcaacagcttctgcatcgactgcgacgcccccaaccccgactgggccagcctgaacctgggcgccctgatgtgcatcgagtgcagcggcatccacagacacctgggcgcccacctgagcagagtgagaagcctggacctggacgactggccccccgagctgctggccgtgatgaccgccatgggcaacgccctggccaacagcgtgtgggagggcgccctgggcggctacagcaagcccggccccgacgcctgcagagaggagaaggagagatggatcagagccaagtacgagcagaagctgttcctggcccccctgcccagcagcgacgtgcccctgggccagcagctgctgagagccgtggtggaggacgacctgagactgctggtgatgctgctggcccacggcagcaaggaggaggtgaacgagacctacggcgacggcgacggcagaaccgccctgcacctgagcagcgccatggccaacgtggtgttcacccagctgctgatctggtacggcgtggacgtgagaagcagagacgccagaggcctgacccccctggcctacgccagaagagccggcagccaggagtgcgccgacatcctgatccagcacggctgccccggcgagggctgcggcctggcccccacccccaacagagagcccgccaacggcaccaaccccagcgccgagctgcacagaagccccagcctgctgtag

SEQ ID NO: 12740 - DNA, 312 bp, synthetic construct
  source 1..312: mol_type = other DNA; note = Synthetic coding sequence
atggccgagctgatccagaagaagctgcagggcgaggtggagaagtaccagcagctgcagaaggacctgagcaagagcatgagcggcagacagaagctggaggcccagctgaccgagaacaacatcgtgaaggaggagctggccctgctggacggcagcaacgtggtgttcaagctgctgggccccgtgctggtgaagcaggagctgggcgaggccagagccaccgtgggcaagagactggactacatcaccgccgagatcttcctgagaaccatccccgaccccggcgacgtgcccgacagcttcttctag

SEQ ID NO: 12741 - DNA, 453 bp, synthetic construct
  source 1..453: mol_type = other DNA; note = Synthetic coding sequence
atgaccagcagaaagaaggtgctgctgaaggtgatcatcctgggcgacagcggcgtgggcaagaccagcctgatgaaccagtacgtgaacaagaagttcagcaaccagtacaaggccaccatcggcgccgacttcctgaccaaggaggtgatggtggacgacagactggtgaccatgcagatctgggacaccgccggccaggagagattccagagcctgggcgtggccttctacagaggcgccgactgctgcgtgctggtgttcgacgtgaccgcccccaacaccttcaagaccctggacagctggagagacgagttcctgatccaggccagccccagagaccccgagaacttccccttcgtggtgctgggcaacaagatcgacctggagaacagacaggtggccaccaagagagcccaggcctggtgctacagcaagaacaacatcccctag

SEQ ID NO: 12742 - DNA, 540 bp, synthetic construct; identical to SEQ ID NO: 11327
  source 1..540: mol_type = other DNA; note = Synthetic coding sequence

SEQ ID NO: 12743 - DNA, 171 bp, synthetic construct
  source 1..171: mol_type = other DNA; note = Synthetic coding sequence
atggacagcagcatccacctgagcagcctgatcagcagacacgacgacgaggccaccagaaccagcaccagcgagggcctggaggagggcgaggtggagggcgagaccctgctgatcgtggagagcgaggaccaggccagcgtggacctgagccacgaccagagcggctag

SEQ ID NO: 12744 - DNA, 153 bp, synthetic construct
  source 1..153: mol_type = other DNA; note = Synthetic coding sequence
atgtgcagcaccagcggctgcgacctggaggagatccccctggacgacgacgacctgaacaccatcgagttcaagatcctggcctactacaccagacaccacgtgttcaagagcacccccgccctgttcagccccaagctgctgagaacctag

SEQ ID NO: 12745 - DNA, 1203 bp, synthetic construct; identical to SEQ ID NO: 10536
  source 1..1203: mol_type = other DNA; note = Synthetic coding sequence

SEQ ID NO: 12746 - DNA, 513 bp, synthetic construct
  source 1..513: mol_type = other DNA; note = Synthetic coding sequence
atgcccagaaagggcacccagcccagcaccgccagaagaagagaggagggcccccccccccccagccccgacggcgccagcagcgacgccgagcccgagccccccagcggcagaaccgagagccccgccaccgccgccgagaccgccagcgaggagctggacaacagaagcctggaggagatcctgaacagcatcccccccccccccccccccgccatgaccaacgaggccggcgcccccagactgatgatcacccacatcgtgaaccagaacttcaagagctacgccggcgagaagatcctgggccccttccacaagagattcagctgcatcatcggccccaacggcagcggcaagagcaacgtgatcgacagcatgctgttcgtgttcggctacagagcccagaagatcagaagcaagaagctgagcgtgctgatccacaacagcgacgagcacaaggacatccagagctgcaccgtggaggtgcacttccagaagatcatcgacaagtag

SEQ ID NO: 12747 - DNA, 504 bp, synthetic construct
  source 1..504: mol_type = other DNA; note = Synthetic coding sequence
atggagaaggccgtgaacgacggcagccacagcgaggagctgttctgccacctgaagaccatcagcgagaaggaggacctgcccagatgcaccagcgagagccacctgagctgcctgaagcaggacatcctgaacgagaagaccgagctggaggccaccctgaaggaggccgagctggtgacccacagcgtggagctgctgctgcccctgttcaaggacaccatcgagaagatcaacttcgagaacgccaacctgagcgccctgaacctgaagatcagcgagcagaaggagatcctgatcaaggagctggacaccttcaagagcgtgaagctggccctggagcacctgctgagaaagagagactacaagcagaccggcgacaacctgagcagcatgctgctggagaacctgaccgacaacgagagcgagaacaccaacctgaagaagaaggtgttcgagaaggaggcccacatccaggagctgagctgcctgttccagagctag

SEQ ID NO: 12748 - DNA, 2376 bp, synthetic construct; identical to SEQ ID NO: 9995
  source 1..2376: mol_type = other DNA; note = Synthetic coding sequence

SEQ ID NO: 12749 - DNA, 687 bp, synthetic construct
  source 1..687: mol_type = other DNA; note = Synthetic coding sequence
atgaccgaccagacctactgcgacagactggtgcaggacacccccttcctgaccggccacggcagactgagcgagcagcaggtggacagaatcatcctgcagctgaacagatactacccccagatcctgaccaacaaggaggccgagaagttcagaaaccccaaggccagcctgagagtgagactgtgcgacctgctgagccacctgcagagaagcggcgagagagactgccaggagttctacagagccctgtacatccacgcccagcccctgcacagcagactgcccagcagacacgccctgagaaagttccacatcaccaaccacgcctgcctggtgctggccagaggcggccaccccagcctgcccctgatggcctggatgagcagcatgaccacccaggtgtgctgcagccccggcctggccagccccctggccagcgcccccccccagagaccccccagcggccccgagggcagagtgtggcaggcccaggccgtgcagatgctggtgagcgtgagccacttcctgcccctgccccccagcctgagccacggcagcttccacaccgcctggggcatcctgtacgtgcacagctgccccagcttcagcaacctgatccccagaggcagcctgcacgtgtgcgtggacagcaacctggtgcccaccgccgcctggagaagctag

SEQ ID NO: 12750 - DNA, 948 bp, synthetic construct; identical to SEQ ID NO: 9362
  source 1..948: mol_type = other DNA; note = Synthetic coding sequence

SEQ ID NO: 12751 - DNA, 1203 bp, synthetic construct; identical to SEQ ID NO: 10536
  source 1..1203: mol_type = other DNA; note = Synthetic coding sequence

SEQ ID NO: 12752 - DNA, 381 bp, synthetic construct
  source 1..381: mol_type = other DNA; note = Synthetic coding sequence
atggtgctgatcctgggcagaagactgaacagagaggacctgggcgtgagagacagccccgccaccaagagaaaggtgttcgagatggaccccaagagcctgaccggccacgagttcttcgacttcagcagcggcagcagccacgccgagaacatcctgcagatcttcaacgagttcagagacagcagactgttcaccgacgtgatcatctgcgtggagggcaaggagttcccctgccacagagccgtgctgagcgcctgcagcagctacttcagagccatgttctgcaacgaccacagagagagcagagagatgctggtggagatcaacggcatcctggccgaggccatggagtgcttcctgcagtacgtgtacacctag

SEQ ID NO: 12753 - DNA, 312 bp, synthetic construct; identical to SEQ ID NO: 12740
  source 1..312: mol_type = other DNA; note = Synthetic coding sequence

SEQ ID NO: 12754 - DNA, 237 bp, synthetic construct
  source 1..237: mol_type = other DNA; note = Synthetic coding sequence
atggtgctgatcctgggcagaagactgaacagagaggacctgggcgtgagagacagccccgccaccaagagaaaggtgttcgagatggaccccaagagcctgaccggccacgagttcttcgacttcagcagcggcagcagccacgccgagaacatcctgcagatcttcaacgagttcagagacagcagactgttcaccgacgtgatcatctgcgtggagggcaaggagttcccctag

SEQ ID NO: 12755 - DNA, 1320 bp, synthetic construct
  source 1..1320: mol_type = other DNA; note = Synthetic coding sequence
atggccgccaacctgagcagaaacggccccgccctgcaggaggcctacgtgagagtggtgaccgagaagagccccaccgactgggccctgttcacctacgagggcaacagcaacgacatcagagtggccggcaccggcgagggcggcctggaggagatggtggaggagctgaacagcggcaaggtgatgtacgccttctgcagagtgaaggaccccaacagcggcctgcccaagttcgtgctgatcaactggaccggcgagggcgtgaacgacgtgagaaagggcgcctgcgccagccacgtgagcaccatggccagcttcctgaagggcgcccacgtgaccatcaacgccagagccgaggaggacgtggagcccgagtgcatcatggagaaggtggccaaggccagcggcgccaactacagcttccacaaggagagcggcagattccaggacgtgggcccccaggcccccgtgggcagcgtgtaccagaagaccaacgccgtgagcgagatcaagagagtgggcaaggacagcttctgggccaaggccgagaaggaggaggagaacagaagactggaggagaagagaagagccgaggaggcccagagacagctggagcaggagagaagagagagagagctgagagaggccgccagaagagagcagagataccaggagcagggcggcgaggccagcccccagagcagaacctgggagcagcagcaggaggtggtgagcagaaacagaaacgagcagggcagcacctgcgccagcctgcaggagagcgccgtgcaccccagagagatcttcaagcagaaggagagagccatgagcaccaccagcatcagcagcccccagcccggcaagctgagaagccccttcctgcagaagcagctgacccagcccgagacccacttcggcagagagcccgccgccgccatcagcagacccagagccgacctgcccgccgaggagcccgcccccagcacccccccctgcctggtgcaggccgaggaggaggccgtgtacgaggagccccccgagcaggagaccttctacgagcagccccccctggtgcagcagcagggcgccggcagcgagcacatcgaccaccacatccagggccagggcctgagcggccagggcctgtgcgccagagccctgtacgactaccaggccgccgacgacaccgagatcagcttcgaccccgagaacctgatcaccggcatcgaggtgatcgacgagggctggtggagaggctacggccccgacggccacttcggcatgttccccgccaactacgtggagctgatcgagtag

SEQ ID NO: 12756 - DNA, 219 bp, synthetic construct
  source 1..219: mol_type = other DNA; note = Synthetic coding sequence
atgagctaccagcagcagcagtgcaagcagccctgccagcccccccccgtgtgccccgcccccaagtgccccgagccctgccccccccccaagtgccccgagccctgcccccccagcaagtgcccccagagctgccccccccagcagtgccagcagaagtgcccccccgtgacccccagccccccctgccagcccaagtgcccccccaagagcaagtag

SEQ ID NO: 12757 - DNA, 342 bp, synthetic construct
  source 1..342: mol_type = other DNA; note = Synthetic coding sequence
atgagcgccatccagaacctgcacagcttcgaccccttcgccgacgccagcaagggcgacgacctgctgcccgccggcaccgaggactacatccacatcagaatccagcagagaaacggcagaaagaccctgaccaccgtgcagggcatcgccgacgactacgacaagaagaagctggtgaaggccttcaagaagaagttcgcctgcaacggcaccgtgatcgagcaccccgagtacggcgaggtgatccagctgcagggcgaccagagaaagaacatctgccagttcctggtggagatcggcctggccaaggacgaccagctgaaggtgcacggcttctag

SEQ ID NO: 12758 - DNA, 927 bp, synthetic construct; identical to SEQ ID NO: 9961
  source 1..927: mol_type = other DNA; note = Synthetic coding sequence

SEQ ID NO: 12759 - DNA, 1809 bp, synthetic construct
  source 1..1809: mol_type = other DNA; note = Synthetic coding sequence
atgatcgagaagatgcagggcagcagaatggacgagcagagatgcagcttccccccccccctgaagaccgaggaggactacatcccctaccccagcgtgcacgaggtgctgggcagagagggccccttccccctgatcctgctgccccagttcggcggctactggatcgagggcaccaaccacgagatcaccagcatccccgagaccgagcccctgcagagccccaccaccaaggtgaagctggagtgcaaccccaccgccagaatctacagaaagcacttcctgggcaaggagcacttcaactactacagcctggacgccgccctgggccacctggtgttcagcctgaagtacgacgtgatcggcgaccaggagcacctgagactgctgctgagaaccaagtgcagaacctaccacgacgtgatccccatcagctgcctgaccgagttccccaacgtggtgcagatggccaagctggtgtgcgaggacgtgaacgtggacagattctaccccgtgctgtaccccaaggccagcagactgatcgtgaccttcgacgagcacgtgatcagcaacaacttcaagttcggcgtgatctaccagaagctgggccagaccagcgaggaggagctgttcagcaccaacgaggagagccccgccttcgtggagttcctggagttcctgggccagaaggtgaagctgcaggacttcaagggcttcagaggcggcctggacgtgacccacggccagaccggcaccgagagcgtgtactgcaacttcagaaacaaggagatcatgttccacgtgagcaccaagctgccctacaccgagggcgacgcccagcagctgcagagaaagagacacatcggcaacgacatcgtggccgtggtgttccaggacgagaacacccccttcgtgcccgacatgatcgccagcaacttcctgcacgcctacgtggtggtgcaggccgagggcggcggccccgacggccccctgtacaaggtgagcgtgaccgccagagacgacgtgcccttcttcggcccccccctgcccgaccccgccgtgttcagaaagggccccgagttccaggagttcctgctgaccaagctgatcaacgccgagtacgcctgctacaaggccgagaagttcgccaagctggaggagagaaccagagccgccctgctggagaccctgtacgaggagctgcacatccacagccagagcatgatgggcctgggcggcgacgaggacaagatggagaacggcagcggcggcggcggcttcttcgagagcttcaagagagtgatcagaagcagaagccagagcatggacgccatgggcctgagcaacaagaagcccaacaccgtgagcaccagccacagcggcagcttcgcccccaacaaccccgacctggccaaggccgccggcatcagcctgatcgtgcccggcaagagccccaccagaaagaagagcggccccttcggcagcagaagaagcagcgccatcggcatcgagaacatccaggaggtgcaggagaagagagagagcccccccgccggccagaagacccccgacagcggccacgtgagccaggagcccaagagcgagaacagcagcacccagagcagccccgagatgcccaccaccaagaacagagccgagaccgccgcccagagagccgaggccctgaaggacttcagcagaagcagcagcagcgccagcagcttcgccagcgtggtggaggagaccgagggcgtggacggcgaggacaccggcctgcacgtggccggcggccagtgccagcaccactag

SEQ ID NO: 12760 - DNA, 177 bp, synthetic construct
  source 1..177: mol_type = other DNA; note = Synthetic coding sequence
atgggcagagtgtgggacctgcccggcgtgctgaaggtggagggcttcagagccaccatggcccagagactggtgagagtgctgcagatctgcgccggccacgtgcccggcgtgagcgccctgaacctgctgagcctgctgagaagcagcgagggccccagcctggaggacctgtag

SEQ ID NO: 12761 - DNA, 2199 bp, synthetic construct
  source 1..2199: mol_type = other DNA; note = Synthetic coding sequence
atgctgccctgcgccgccggcgccagaggcagaggcgccatggtggtgctgagagccggcaagaagaccttcctgccccccctgtgcagagccttcgcctgcagaggctgccagctggcccccgagagaggcgccgagagaagagacaccgcccccagcggcgtgagcagattctgcccccccagaaagagctgccacgactggatcggcccccccgacaagtacagcaacctgagacccgtgcacttctacatccccgagaacgagagccccctggagcagaagctgagaaagctgagacaggagacccaggagtggaaccagcagttctgggccaaccagaacctgaccttcagcaaggagaaggaggagttcatccacagcagactgaagaccaagggcctgggcctgagaaccgagagcggccagaaggccaccctgaacgccgaggagatggccgacttctacaaggagttcctgagcaagaacttccagaagcacatgtactacaacagaatgtacgacaacatgagcaccatggtgtacatcaaggaggacaagctggagaagctgacccaggacgagatcatcagcaagaccaagcaggtgatccagggcctggaggccctgaagaacgagcacaacagcatcctgcagagcctgctggagaccctgaagtgcctgaagaaggacgacgagagcaacctggtggaggagaagagcaacatgatcagaaagagcctggagatgctggagctgggcctgagcgaggcccaggtgatgatggccctgagcaaccacctgaacgccgtggagagcgagaagcagaagctgagagcccaggtgagaagactgtgccaggagaaccagtggctgagagacgagctggccaacacccagcagaagctgcagaagagcgagcagagcgtggcccagctggaggaggagaagaagcacctggagttcatgaaccagctgaagaagtacgacgacgacatcagccccagcgaggacaaggacaccgacagcaccaaggagcccctggacgacctgttccccaacgacgaggacgaccccggccagggcatccagcagcagcacagcagcgccgccgccgccgcccagcagggcggctacgagatccccgccagactgagaaccctgcacaacctggtgatccagtacgccagccagggcagatacgaggtggccgtgcccctgtgcaagcaggccctggaggacctggagaagaccagcggccacgaccaccccgacgtggccaccatgctgaacatcctggccctggtgtacagagaccagaacaagtacaaggacgccgccaacctgctgaacgacgccctggccatcagagagaagaccctgggcaaggaccaccccgccgtggccgccaccctgaacaacctggccgtgctgtacggcaagagaggcaagtacaaggaggccgagcccctgtgcaagagagccctggagatcagagagaaggtgctgggcaaggaccaccccgacgtggccaagcagctgaacaacctggccctgctgtgccagaaccagggcaagtacgaggaggtggagtactactaccagagagccctggagatctaccagaccaagctgggccccgacgaccccaacgtggccaagaccaagaacaacctggccagctgctacctgaagcagggcaagttcaagcaggccgagaccctgtacaaggagatcctgaccagagcccacgagagagagttcggcagcgtggacgacgagaacaagcccatctggatgcacgccgaggagagagaggagtgcaagggcaagcagaaggacggcaccagcttcggcgagtacggcggctggtacaaggcctgcaaggtggacagccccaccgtgaccaccaccctgaagaacctgggcgccctgtacagaagacagggcaagttcgaggccgccgagaccctggaggaggccgccatgagaagcagaaagcagggcctggacaacgtgcacaagcagagagtggccgaggtgctgaacgaccccgagaacatggagaagagaagaagcagagagagcctgaacgtggacgtggtgaagtacgagagcggccccgacggcggcgaggaggtgagcatgagcgtggagtggaacggcatgagaaagatgaagctgggcctggtgaactag

SEQ ID NO: 12762 - DNA, 249 bp, synthetic construct
  source 1..249: mol_type = other DNA; note = Synthetic coding sequence
atgagcggcctggtgctgggccagagagacgagcccgccggccacagactgagccaggaggagatcctgggcagcaccagactggtgagccagggcctggaggccctgagaagcgagcaccaggccgtgctgcagagcctgagccagaccatcgagtgcctgcagcagggcggccacgaggagggcctggtgcacgagaaggccagacagctgagaagaagcatggagaacatcgagctgggcctgtag

SEQ ID NO: 12763 - DNA, 222 bp, synthetic construct
  source 1..222: mol_type = other DNA; note = Synthetic coding sequence
atggtgctgatcctgggcagaagactgaacagagaggacctgggcgtgagagacagccccgccaccaagagaaaggtgttcgagatggaccccaagagcctgaccggccacgagttcttcgacttcagcagcggcagcagccacgccgagaacatcctgcagatcttcaacgagttcagagacagcagactgttcaccgacgtgatcatctgcgtggagtag

SEQ ID NO: 12764 - DNA, 1191 bp, synthetic construct
  source 1..1191: mol_type = other DNA; note = Synthetic coding sequence
atgaacttccaggccggcggcggccagagcccccagcagcagcagagcctggccgcccccggcggcggcggcgccgccgcccagcagctggtgtgcggcggccagttcggcggcgccggccccggcgccggcggcggcggcggccccagccagcagctggccggcggccccccccagcagttcgccctgagcaacagcgccgccatcagagccgagatccagagattcgagagcgtgcaccccaacatctacgccatctacgacctgatcgagagaatcgaggacctggccctgcagaaccagatcagagagcacgtgatcagcatcgaggacagcttcgtgaacagccaggagtggaccctgagcagaagcgtgcccgagctgaaggtgggcatcgtgggcaacctgagcagcggcaagagcgccctggtgcacagatacctgaccggcacctacgtgcaggaggagagccccgagggcggcagattcaagaaggagatcgtggtggacggccagagctacctgctgctgatcagagacgagggcggcccccccgagctgcagttcgccgcctgggtggacgccgtggtgttcgtgttcagcctggaggacgagatcagcttccagaccgtgtacaactacttcctgagactgtgcagcttcagaaacgccagcgaggtgcccatggtgctggtgggcacccaggacgccatcagcgccgccaaccccagagtgatcgacgacagcagagccagaaagctgagcaccgacctgaagagatgcacctactacgagacctgcgccacctacggcctgaacgtggagagagtgttccaggacgtggcccagaaggtggtggccctgagaaagaagcagcagctggccatcggcccctgcaagagcctgcccaacagccccagccacagcgccgtgagcgccgccagcatccccgccgtgcacatcaaccaggccaccaacggcggcggcagcgccttcagcgactacagcagcagcgtgcccagcacccccagcatcagccagagagagctgagaatcgagaccatcgccgccagcagcacccccacccccatcagaaagcagagcaagagaagaagcaacatcttcaccatctgcgccaccgtgagcaacttcagcagcaccaagagacccttccagctgctgcccaactag

SEQ ID NO: 12765 - DNA, 1110 bp, synthetic construct
  source 1..1110: mol_type = other DNA; note = Synthetic coding sequence
atggacagctgcctgatggtgtggcacatgaagccccagagcagagcctacagattcaccggccacaaggacgccgtgacctgcgtgaacttcagccccagcggccacctgctggccagcggcagcagagacaagaccgtgagaatctgggtgcccaacgtgaagggcgagagcaccgtgttcagagcccacaccgccaccgtgagaagcgtgcacttctgcagcgacggccagagcttcgtgaccgccagcgacgacaagaccgtgaaggtgtgggccacccacagacagaagttcctgttcagcctgagccagcacatcaactgggtgagatgcgccaagttcagccccgacggcagactgatcgtgagcgccagcgacgacaagaccgtgaagctgtgggacaagagcagcagagagtgcgtgcacagctactgcgagcacggcggcttcgtgacctacgtggacttccaccccagcggcacctgcatcgccgccgccggcatggacaacaccgtgaaggtgtgggacgtgagaacccacagactgctgcagcactaccagctgcacagcgccgccgtgaacggcctgagcttccaccccagcggcaactacctgatcaccgccagcagcgacagcaccctgaagatcctggacctgatggagggcagactgctgtacaccctgcacggccaccagggccccgccaccaccgtggccttcagcagaaccggcgagtacttcgccagcggcggcagcgacgagcaggtgatggtgtggaagagcaacttcgacatcgtggaccacggcgaggtgaccaaggtgcccagaccccccgccaccctggccagcagcatgggcaacctgcccgaggtggacttccccgtgccccccggcagaggcagaagcgtggagagcgtgcagagccagccccaggagcccgtgagcgtgccccagaccctgaccagcaccctggagcacatcgtgggccagctggacgtgctgacccagaccgtgagcatcctggagcagagactgaccctgaccgaggacaagctgaagcagtgcctggagaaccagcagctgatcatgcagagagccaccccctag

SEQ ID NO: 12766 - DNA, 312 bp, synthetic construct; identical to SEQ ID NO: 12740
  source 1..312: mol_type = other DNA; note = Synthetic coding sequence

SEQ ID NO: 12767 - DNA, 270 bp, synthetic construct; identical to SEQ ID NO: 11466
  source 1..270: mol_type = other DNA; note = Synthetic coding sequence

SEQ ID NO: 12768 - DNA, 1140 bp, synthetic construct
  source 1..1140: mol_type = other DNA; note = Synthetic coding sequence
atgtggcacctggacttcggcctgcacaccggcaagaccttccagcccctgcccttcatcatcgtggtgtaccccggcgccggcagaagatggggcctggtgctgagcctggccagccacagaagaagaaccgaggccggcggcggcaccggccccaccagcgacaccggctggggctgcatgctgagatgcggccagatgatcttcgcccaggccctggtgtgcagacacctgggcagagactggagatggacccagagaaagagacagcccgacagctacttcagcgtgctgaacgccttcatcgacagaaaggacagctactacagcatccaccagatcgcccagatgggcgtgggcgagggcaagagcatcggccagtggtacggccccaacaccgtggcccaggtgctgaagaagctggccgtgttcgacacctggagcagcctggccgtgcacatcgccatggacaacaccgtggtgatggaggagatcagaagactgtgcagaaccagcgtgccctgcgccggcgccaccgccttccccgccgacagcgacagacactgcaacggcttccccgccggcgccgaggtgaccaacagacccagcccctggagacccctggtgctgctgatccccctgagactgggcctgaccgacatcaacgaggcctacgtggagaccctgaagcactgcttcatgatgccccagagcctgggcgtgatcggcggcaagcccaacagcgcccactacttcatcggctacgtgggcgaggagctgatctacctggacccccacaccacccagcccgccgtggagcccaccgacggctgcttcatccccgacgagagcttccactgccagcaccccccctgcagaatgagcatcgccgagctggaccccagcatcgccgtgggcttcttctgcaagaccgaggacgacttcaacgactggtgccagcaggtgaagaagctgagcctgctgggcggcgccctgcccatgttcgagctggtggagctgcagcccagccacctggcctgccccgacgtgctgaacctgagcctggacagcagcgacgtggagagactggagagattcttcgacagcgaggacgaggacttcgagatcctgagcctgtag

SEQ ID NO: 12769 - DNA, 1683 bp, synthetic construct; identical to SEQ ID NO: 11916
  source 1..1683: mol_type = other DNA; note = Synthetic coding sequence

SEQ ID NO: 12770 - DNA, 330 bp, synthetic construct
  source 1..330: mol_type = other DNA; note = Synthetic coding sequence
atgaaccccgccagcgcccccccccccctgcccccccccggccagcaggtgatccacgtgacccaggacctggacaccgacctggaggccctgttcaacagcgtgatgaaccccaagcccagcagctggagaaagaagatcctgcccgagagcttcttcaaggagcccgacagcggcagccacagcagacagagcagcaccgacagcagcggcggccaccccggccccagactggccggcggcgcccagcacgtgagaagccacagcagccccgccagcctgcagctgggcaccggcgccggcgccgccggcagccccgcccagcagtag

SEQ ID NO: 12771 - DNA, 609 bp, synthetic construct
  source 1..609: mol_type = other DNA; note = Synthetic coding sequence
atgggcagcagaaagaaggagatcgccctgcaggtgaacatcagcacccaggagctgtgggaggagatgctgagcagcaagggcctgaccgtggtggacgtgtaccagggctggtgcggcccctgcaagcccgtggtgagcctgttccagaagatgagaatcgaggtgggcctggacctgctgcacttcgccctggccgaggccgacagactggacgtgctggagaagtacagaggcaagtgcgagcccaccttcctgttctacgccggcggcgagctggtggccgtggtgagaggcgccaacgcccccctgctgcagaagaccatcctggaccagctggaggccgagaagaaggtgctggccgagggcagagagagaaaggtgatcaaggacgaggccctgagcgacgaggacgagtgcgtgagccacggcaagaacaacggcgaggacgaggacatggtgagcagcgagagaacctgcaccctggccatcatcaagcccgacgccgtggcccacggcaagaccgacgagatcatcatgaagatccaggaggccggcttcgagatcctgaccaacgaggagagaaccatgaccgaggccgaggtgtag

SEQ ID NO: 12772 - DNA, 195 bp, synthetic construct
  source 1..195: mol_type = other DNA; note = Synthetic coding sequence
atggccccccagaaggacagaaagcccaagagaagcacctggagattcaacctggacctgacccaccccgtggaggacggcatcttcgacagcggcaacttcggcaccttccccagcgagtacctgggcttcagcagcctggtgctgcacttcttctgcttcaagatcggcgccatcagcaccggcgagggctag

SEQ ID NO: 12773 - DNA, 372 bp, synthetic construct
  source 1..372: mol_type = other DNA; note = Synthetic coding sequence
atggagaacctgcagaccaacttcagcctggtgcagggcagcaccaagaagctgaacggcatgggcgacgacggcagcccccccgccaagaagatgatcaccgacatccacgccaacggcaagaccatcaacaaggtgcccaccgtgaagaaggagcacctggacgactacggcgaggcccccgtggagaccgacggcgagcacgtgaagagaacctgcaccagcgtgcccgagaccctgcacctgaaccccagcctgaagcacaccctggcccagttccacctgagcagccagagcagcctgggcggccccgccgccttcagcgccagacacagccaggagagcatgagccccaccgtgttcctgccctag

SEQ ID NO: 12774 - DNA, 201 bp, synthetic construct
  source 1..201: mol_type = other DNA; note = Synthetic coding sequence
atgaaccccagcatgaagcagaagcaggaggagatcaaggagaacatcaagaacagcagcgtgcccagaagaaccctgaagatgatccagcccagcgccagcggcagcctggtgggcagagagaacgagctgagcgccggcctgagcaagagaaagcacagaaacgaccacctgaccagcaccaccagcagccccggctag

SEQ ID NO: 12775 - DNA, 1614 bp, synthetic construct
  source 1..1614: mol_type = other DNA; note = Synthetic coding sequence
atggtgctgatcctgggcagaagactgaacagagaggacctgggcgtgagagacagccccgccaccaagagaaaggtgttcgagatggaccccaagagcctgaccggccacgagttcttcgacttcagcagcggcagcagccacgccgagaacatcctgcagatcttcaacgagttcagagacagcagactgttcaccgacgtgatcatctgcgtggagggcaaggagttcccctgccacagagccgtgctgagcgcctgcagcagctacttcagagccatgttctgcaacgaccacagagagagcagagagatgctggtggagatcaacggcatcctggccgaggccatggagtgcttcctgcagtacgtgtacaccggcaaggtgaagatcaccaccgagaacgtgcagtacctgttcgagaccagcagcctgttccagatcagcgtgctgagagacgcctgcgccaagttcctggaggagcagctggacccctgcaactgcctgggcatccagagattcgccgacacccacagcctgaagaccctgttcaccaagtgcaagaacttcgccctgcagaccttcgaggacgtgagccagcacgaggagttcctggagctggacaaggacgagctgatcgactacatctgcagcgacgagctggtgatcggcaaggaggagatggtgttcgaggccgtgatgagatgggtgtacagagccgtggacctgagaagacccctgctgcacgagctgctgacccacgtgagactgcccctgctgcaccccaactacttcgtgcagaccgtggaggtggaccagctgatccagaacagccccgagtgctaccagctgctgcacgaggccagaagataccacatcctgggcaacgagatgatgagccccagaaccagacccagaagaagcaccggctacagcgaggtgatcgtggtggtgggcggctgcgagagagtgggcggcttcaacctgccctacaccgagtgctacgaccccgtgaccggcgagtggaagagcctggccaagctgcccgagttcaccaagagcgagtacgccgtgtgcgccctgagaaacgacatcctggtgagcggcggcagaatcaacagcagagacgtgtggatctacaacagccagctgaacatctggatcagagtggccagcctgaacaagggcagatggagacacaagatggccgtgctgctgggcaaggtgtacgtggtgggcggctacgacggccagaacagactgagcagcgtggagtgctacgacagcttcagcaacagatggaccgaggtggcccccctgaaggaggccgtgagcagccccgccgtgaccagctgcgtgggcaagctgttcgtgatcggcggcggccccgacgacaacacctgcagcgacaaggtgcagagctacgaccccgagaccaacagctggctgctgagagccgccatccccatcgccaagagatgcatcaccgccgtgagcctgaacaacctgatctacgtggccggcggcctgaccaaggccatctactgctacgaccccgtggaggactactggatgcacgtgcagaacaccttcagcagacaggtgatcacctag

SEQ ID NO: 12776 - DNA, 1611 bp, synthetic construct
  source 1..1611: mol_type = other DNA; note = Synthetic coding sequence
atgagactggaggagctgaagagactgcagaaccccctggagcaggtgaacgacggcaagtacagcttcgagaacatccagagagcctggagagagtacctgcagagacaggagcccctgggcaagagaagccccagcccccccagcgtgagcagcgagaagctgagcagcagcgtgagcatgaacaccttcagcgacagcagcacccccgactacagagaggacggcatggacctgggcagcgacgccggcagcagcagcagcagcagcagagccagcagccagagcaacagcaccaaggtgaccccctgcagcgagtgcaagagcagcagcagccccggcggcagcctggacctggtgagcgccctggaggactacgaggagcccttccccgtgtaccagaagaaggtgatcgacgagtgggcccccgaggaggacggcgaggaggaggaggaggaggacgagagagaccagagaggctacagagacgacagaagccccgccagagagcccggcgacgtgagcgccagaaccagaagcggcggcggcggcggcagaagcgccaccaccgccatgcccccccccgtgcccaacggcaacctgcaccagcacgacccccaggacctgagacacaacggcaacgtggtggtggccggcagacccagctgcagcagaggccccagaagagccatccagaagccccagcccgccggcggcagaagaagcggcagaggccccgccgccggcggcctgtgcctgcagccccccgacggcggcacctgcgtgcccgaggagccccccgtgccccccatggactgggaggccctggagaagcacctggccggcctgcagttcagagagcaggaggtgagaaaccagggccaggccagaaccaacagcaccagcgcccagaagaacgagagagagagcatcagacagaagctggccctgggcagcttcttcgacgacggccccggcatctacaccagctgcagcaagagcggcaagcccagcctgagcagcagactgcagagcggcatgaacctgcagatctgcttcgtgaacgacagcggcagcgacaaggacagcgacgccgacgacagcaagaccgagaccagcctggacacccccctgagccccatgagcaagcagagcagcagctacagcgacagagacaccaccgaggaggagagcgagagcctggacgacatggacttcctgaccagacagaagaagctgcaggccgaggccaagatggccctggccatggccaagcccatggccaagatgcaggtggaggtggagaagcagaacagaaagaagagccccgtggccgacctgctgccccacatgccccacatcagcgagtgcctgatgaagagaagcctgaagcccaccgacctgagagacatgaccatcggccagctgcaggtgatcgtgaacgacctgcacagccagatcgagagcctgaacgaggagctggtgcagctgctgctgatcagagacgagctgcacaccgagcaggacgccatgctggtggacatcgaggacctgaccagacacgccgagagccagcagaagcacatggccgagaagatgcccgccaagtag

SEQ ID NO: 12777 - DNA, 630 bp, synthetic construct
  source 1..630: mol_type = other DNA; note = Synthetic coding sequence
atgagcgagaacgccgcccccggcctgatcagcgagctgaagctggccgtgccctggggccacatcgccgccaaggcctggggcagcctgcagggcccccccgtgctgtgcctgcacggctggctggacaacgccagcagcttcgacagactgatccccctgctgccccaggacttctactacgtggccatggacttcggcggccacggcctgagcagccactacagccccggcgtgccctactacctgcagaccttcgtgagcgagatcagaagagtggtggccgccctgaagtggaacagattcagcatcctgggccacagcttcggcggcgtggtgggcggcatgttcttctgcaccttccccgagatggtggacaagctgatcctgctggacacccccctgttcctgctggagagcgacgagatggagaacctgctgacctacaagagaagagccatcgagcacgtgctgcaggtggaggccagccaggagcccagccacgtgttcagcctgaagcagctgctgcagagactgctgaagagcaacagccacctgagcgaggagtgcggcgagctgctgctgcagagaggcaccaccaaggtggccaccggcagagagcagcactag

SEQ ID NO: 12778 - DNA, 201 bp, synthetic construct
  source 1..201: mol_type = other DNA; note = Synthetic coding sequence
atgcccgaggaccaggtgggcaagctggaggccaccgagaacaccatcagcgccatggccgccgccgccgccgagcagcagcagttctacctgctgctgggcaacctgctgagccccgacaacgtggtgagaaagcaggccgaggagacctacgagaacatccccggccagagcaagatcaccttcctgctgcaggcctag

SEQ ID NO: 12779 - DNA, 2061 bp, synthetic construct
  source 1..2061: mol_type = other DNA; note = Synthetic coding sequence
atggccatcagccagcaccagttctacctggacagaaagcagagcaaggccaagatccccagcgccagaagcctggacgagatcgccatggacctgaccgagaccggcacccagagagccagcaagctggtgaccctggagaccaagagccagttcatcatggccagcaacggcagcctgatcagcagcggcagccaggacagcgaggtgagcgaggagcagaagagagagaagatcctggagctgaagaagaaggagaagctgctgcaggagaagctgctgaagaaggtggaggagctgaagaagatctgcctgagagaggccgagctgaccggcaagatgcccaaggagtaccccctgaacatcggcgagaagcccccccaggtgagaagaagagtgggcaccgccttcaagctggacgacaacctgctgcccagcgaggaggaccccgccctgcaggagctggagagcaacttcctgatccagcagaagctggtggaggccgccaagaagctggccaacgagcccgacctgtgcaagaccgtgaagaagaagagaaagcaggactacaccgacgccatgaagaagctgcaggagatcgagaacgccatcaacgagtacagaatcagatgcggcaagaagcccagccagaaggccaccgtgctgcccgaggacatcatccccagcgagagcagcagcctgagcgacaccaccacctacgacgaccccagcgacgccttcaccttccccggccagagaagcagcagcgtgccccacagccccagaatcctgccccccaagagcctgggcatcgagagaatccacttcagaaagagcagcatcaacgagcagttcgtggacaccagacagagcagagagatgctgagcacccacagcagcccctacaagaccctggagagaagaccccagggcggcagaagcatgcccaccacccccgtgctgaccagaaacgcctacagcagcagccacctggagcccgagagcagcagccagcactgcagacagagaagcggcagcctggagagccagagccacctgctgagcgagatggacagcgacaagcccttcttcagcctgagcaagagccagagaagcagcagcaccgagatcctggacgacggcagcagctacaccagccagagcagcaccgagtactactgcgtgacccccgtgaccggcccctactacaccacccagaccctggacaccagaaccagaggcagaagaagaagcaagaagcagaacgtgagcaccagcaacagcggcagcatgcccaacctggcccagaaggacagcctgagaaacggcgtgtacagcaagagccaggagccccccagcagcagctactacatcgccggctacaccccctacgccgagtgcgacttctactacagcggcggctacgtgtacgagaacgacaccgagggccagtacagcgtgaaccccagctacagaagcagcgcccactacggctacgagagacagagagactacagcagaagcttccacgaggacgaggtggacagagtgccccacaacccctacgccaccctgagactgcccagaaaggccgccgccaagagcgagcacatcaccaagaacatccacaaggccctggtggccgagcacctgagaggctggtaccagagagccagcggccagaaggaccagggccacagcccccagaccagcttcgacagcgacagaggcagccagagatgcctgggcttcgccggcctgcaggtgccctgcagccccagcagcagagccagcagctacagcagcgtgagcagcaccaacgccagcggcaactggagaacccagctgaccatcggcctgagcgactacgagacccccgcccacagcagctacaccagctgctacggcaacgtgtacaaccccctgcccagccccagcagacagtacaccgagatcagccagctggacggcaccgacggcaaccagctggaggacaacctggagagcagcgagcagagactgttctggcacgaggacagcaagcccggcaccctggtgtag

SEQ ID NO: 12780 - DNA, 219 bp, synthetic construct
  source 1..219: mol_type = other DNA; note = Synthetic coding sequence
atgatggaggagatcagcatcatggtggcctacgacgcccacgtgttcagccagctgcacgacgaggacttcctgaccagcctggtggccatcagcaagcccagaagcatggtgcccaccaagaagctgaagaagtacgagaaggagtaccagaccatgagagagagccagctgcagcaggaggaccccatggacagatacaagttcgtgtacctgtag

SEQ ID NO: 12781 - DNA, 1965 bp, synthetic construct
  source 1..1965: mol_type = other DNA; note = Synthetic coding sequence
atggacagcctgcccgacgagttcttcgtgagacaccccgccgtggaggaccagagaaaggaggagaccgagaacaagctggagaagagcagcggccagctgaacaagcaggagaacgacatccccaccgacctggtgcccgtgaacctgctgctggaggtgaagaagctgctgaacgccatcaacaccctgcccaagggcgtggtgccccacatcaagaagttcctgcaggaggacttcagcttccagaccatgcagagagaggtggccgccaacagccagaacggcgaggagatcgtgcccgccctgaccctgagattcctgatcacccagctggaggccgccctgagaaacatccaggccggcaactacaccgcccaccagatcaacatcggctactacctgaccctgctgttcctgtacggcgtggccctgaccgagagaggcaagaaggaggactacaccgaggccgagaacaagttcctggtgatgaagatgatgatccaggagaacgagatctgcgagaacttcatgagcctggtgtacttcggcagaggcctgctgagatgcgcccagaagagatacaacggcggcctgctggagttccacaagagcctgcaggagatcggcgacaagaacgaccactggttcgacatcgaccccaccgaggacgaggacctgcccaccaccttcaaggacctgctgaacaacttcatcaagaccaccgagagcaacatcatgaagcagaccatctgcagctacctggactgcgagagaagctgcgaggccgacatcctgaagaacaccagctacaagggcttcttccagctgatgtgcagcaagagctgctgcgtgtacttccacaagatctgctggaagaagttcaagaacctgaagtaccccggcgagaacgaccagagcttcagcggcaagaagtgcctgaaggagggctgcaccggcgacatggtgagaatgctgcagtgcgacgtgcccggcatcgtgaagatcctgttcgaggtggtgagaaaggacgagtacatcaccatcgagaacctgggcgccagctacagaaagctgatcagcctgaagatcaccgacaccgacatcagacccaagatcagcctgaagttcaacaccaaggacgagatgcccatcttcaagctggactacaactacttctaccacctgctgcacatcatcatcatcagcggcaccgacatcgtgagacagatcttcgacgaggccatgcccccccccctgctgaagaaggagctgctgatccacaagaacgtgctggagagctactacaaccacctgtggaccaaccaccccctgggcggcagctggcacctgctgtacccccccaacaaggagctgccccagagcaagcagttcgacctgtgcctgctgctggccctgatcaagcacctgaacgtgttccccgcccccaagaagggctggaacatggagccccccagcagcgacatcagcaagagcgccgacatcctgagactgtgcaagtacagagacatcctgctgagcgagatcctgatgaacggcctgaccgagagccagttcaacagcatctggaagaaggtgagcgacatcctgctgagactgggcatgatgcaggaggacatcgacaaggtgaaggagaaccccatcgagaacatcagcctggactaccaccagctgagcgtgtacctgggcatccccgtgcccgagatcatccagagaatgctgagctgctaccagcagggcatcgccctgcagagcatcaccggcagccagagaatcgagatcgaggagctgcagaacgaggaggaggagctgagcccccccctgatggagtacaacatcaacgtgaagagccaccccgagatccagttcgccgagatcaacaaggacggcaccagcatccccagcgagagcagcaccgagagcctgaaggacctgcaggagtag

SEQ ID NO: 12782 - DNA, 570 bp, synthetic construct
  source 1..570: mol_type = other DNA; note = Synthetic coding sequence
atgaaccccgccagcgcccccccccccctgcccccccccggccagcaggtgatccacgtgacccaggacctggacaccgacctggaggccctgttcaacagcgtgatgaaccccaagcccagcagctggagaaagaagatcctgcccgagagcttcttcaaggagcccgacagcggcagccacagcagacagagcagcaccgacagcagcggcggccaccccggccccagactggccggcggcgcccagcacgtgagaagccacagcagccccgccagcctgcagctgggcaccggcgccggcgccgccggcagccccgcccagcagcacgcccacctgagacagcagagctacgacgtgaccgacgagctgcccctgccccccggctgggagatgaccttcaccgccaccggccagagatacttcctgaaccacatcgagaagatcaccacctggcaggaccccagaaaggccatgaaccagcccctgaaccacatgaacctgcaccccgccgtgagcagcacccccgtgccccagagaagcatggccgtgagccagcccaacctgtag

SEQ ID NO: 12783 - DNA, 849 bp, synthetic construct
  source 1..849: mol_type = other DNA; note = Synthetic coding sequence
atgggccccctgcccagaaccgtggagctgttctacgacgtgctgagcccctacagctggctgggcttcgagatcctgtgcagataccagaacatctggaacatcaacctgcagctgagacccagcctgatcaccggcatcatgaaggacagcggcaacaagccccccggcctgctgcccagaaagggcctgtacatggccaacgacctgaagctgctgagacaccacctgcagatccccatccacttccccaaggacttcctgagcgtgatgctggagaagggcagcctgagcgccatgagattcctgaccgccgtgaacctggagcaccccgagatgctggagaaggccagcagagagctgtggatgagagtgtggagcagagtgagcgtgggcctgtgggagagcagcggcagaaccctggacgacttcctgaccttccccagacacgtgttcagagtgatgatcctgcccccccccggcggcagcaccgtgctgcccgtgacccccctgagcccccacagactgcccgccgtgttcagcagcagccagaacgaggacatcaccgagccccagagcatcctggccgccgccgagaaggccggcatgagcgccgagcaggcccagggcctgctggagaagatcgccacccccaaggtgaagaaccagctgaaggagaccaccgaggccgcctgcagatacggcgccttcggcctgcccatcaccgtggcccacgtggacggccagacccacatgctgttcggcagcgacagaatggagctgctggcccacctgctgggcgagaagtggatgggccccatcccccccgccgtgaacgccagactgtag

SEQ ID NO: 12784 - DNA, 1221 bp, synthetic construct
  source 1..1221: mol_type = other DNA; note = Synthetic coding sequence
atggaccagctggagaacgccaagatggagcacaccaacgccagcttcgacaccttcttctgcgagaccagagccggcaagcacgtgcccagagccctgttcgtggacctggagcccaccgtgatcgacggcatcagaaccggccagcacagaagcctgttccaccccgagcagctgctgagcggcaaggaggacgccgccaacaactacgccagaggcagatacagcgtgggcagcgaggtgatcgacctggtgctggagagaaccagaaagctggccgagcagtgcggcggcctgcagggcttcctgatcttcagaagcttcggcggcggcaccggcagcggcttcaccagcctgctgatggagagactgaccggcgagtacagcagaaagaccaagctggagttcagcgtgtaccccgcccccagaatcagcaccgccgtggtggagccctacaacagcgtgctgaccacccacagcaccaccgagcacaccgactgcaccttcatggtggacaacgaggccgtgtacgacatctgccacagaaagctgggcgtggagtgccccagccacgccagcatcaacagactggtggtgcaggtggtgagcagcatcaccgccagcctgagattcgagggccccctgaacgtggacctgatcgagttccagaccaacctggtgccctaccccagaatccacttccccatgaccgccttcgcccccatcgtgagcgccgacaaggcctaccacgagcagttcagcgtgagcgacatcaccaccgcctgcttcgagagcagcaaccagctggtgaagtgcgaccccagactgggcaagtacatggcctgctgcctgctgtacagaggcgacgtggtgcccaaggaggtgaacgccgccatcgccgccaccaagagcagacacagcgtgcagttcgtggactggtgccccaccggcttcaaggtgggcatcaacaacagaccccccaccgtgatgcccggcggcgacctggccaaggtgcacagaagcatctgcatgctgagcaacaccaccgccatcgtggaggcctgggccagactggaccacaagttcgacctgatgtacgccaagagagccttcctgcactggtacctgagagagggcatggaggaggccgagttcctggaggccagagaggacctggccgccctggagagagactacgaggaggtggcccagagcttctag

SEQ ID NO: 12785 - DNA, 1860 bp, synthetic construct; identical to SEQ ID NO: 10320
  source 1..1860: mol_type = other DNA; note = Synthetic coding sequence

SEQ ID NO: 12786 - DNA, 294 bp, synthetic construct; identical to SEQ ID NO: 12523
  source 1..294: mol_type = other DNA; note = Synthetic coding sequence

SEQ ID NO: 12787 - DNA, 387 bp, synthetic construct
  source 1..387: mol_type = other DNA; note = Synthetic coding sequence
atgaccgacctggtggccgtgtgggacgtggccctgagcgacggcgtgcacaagatcgagttcgagcacggcaccaccagcggcaagagagtggtgtacgtggacggcaaggaggagatcagaaaggagtggatgttcaagctggtgggcaaggagaccttctacgtgggcgccgccaagaccaaggccaccatcaacatcgacgccatcagcggcttcgcctacgagtacaccctggagatcaacggcaagagcctgaagaagtacatggaggacagaagcaagaccaccaacacctgggtgctgcacatggacggcgagaacttcagaatcgtgctggagaaggacgccatggacgtgtggtgcaacggcaagaagctggagtag

SEQ ID NO: 12788 - DNA, 879 bp, synthetic construct
  source 1..879: mol_type = other DNA; note = Synthetic coding sequence
atgaccgtgagcaagttcatggccatccagaaggccctgcagcccgactggttccagtgcctgagcgacggcgaggtgagctgcaaggaggccaccagcatcaagagagtgagaaagagcgtggacagaagcctgctgttcctggacaactgcctgagactgcaggaggagagcgaggtgctgcagaagagcgtgatcatcggcgtgatcgagggcggcgacgtgatggaggagagactgagaagcgccagagagaccgccaagagacccgtgggcggcttcctgctggacggcttccagggcaaccccaccaccctggaggccagactgagactgctgagcagcgtgaccgccgagctgcccgaggacaagcccagactgatcagcggcgtgagcagacccgacgaggtgctggagtgcatcgagagaggcgtggacctgttcgagagcttcttcccctaccaggtgaccgagagaggctgcgccctgaccttcagcttcgactaccagcccaaccccgaggagaccctgctgcagcagaacggcacccaggaggagatcaagtgcatggaccagatcaagaagatcgagaccaccggctgcaaccaggagatcaccagcttcgagatcaacctgaaggagaagaagtaccaggaggacttcaaccccctggtgagaggctgcagctgctactgctgcaagaaccacaccagagcctacatccaccacctgctggtgaccaacgagctgctggccggcgtgctgctgatgatgcacaacttcgagcactacttcggcttcttccactacatcagagaggccctgaagagcgacaagctggcccagctgaaggagctgatccacagacaggccagctag

SEQ ID NO: 12789 - DNA, 600 bp, synthetic construct; identical to SEQ ID NO: 9510
  source 1..600: mol_type = other DNA; note = Synthetic coding sequence

SEQ ID NO: 12790 - DNA, 354 bp, synthetic construct
  source 1..354: mol_type = other DNA; note = Synthetic coding sequence
atgcccgaggaccaggtgggcaagctggaggccaccgagaacaccatcagcgccatggccgccgccgccgccgagcagcagcagttctacctgctgctgggcaacctgctgagccccgacaacgtggtgagaaagcaggccgaggagacctacgagaacatccccggccagagcaagatcaccttcctgctgcaggccatcagaaacaccaccgccgccgaggaggccagacagatggccgccgtgctgctgagaagactgctgagcagcgccttcgacgaggtgtaccccgccctgcccagcgacgtgcagaccgccatcaagagcgagctgctgatgatcatccagatgtag

SEQ ID NO: 12791 - DNA, 888 bp, synthetic construct
  source 1..888: mol_type = other DNA; note = Synthetic coding sequence
tgaaccaagctggccaccggcagcaaggacaccaccgtgatcatctggcaggtggaccccgacacccacctgctgaagctgctgaagaccctggagggccacgcctacggcgtgagctacatcgcctggagccccgacgacaactacctggtggcctgcggccccgacgactgcagcgagctgtggctgtggaacgtgcagaccggcgagctgagaaccaagatgagccagagccacgaggacagcctgaccagcgtggcctggaaccccgacggcaagagattcgtgaccggcggccagagaggccagttctaccagtgcgacctggacggcaacctgctggacagctgggagggcgtgagagtgcagtgcctgtggtgcctgagcgacggcaagaccgtgctggccagcgacacccaccagagaatcagaggctacaacttcgaggacctgaccgacagaaacatcgtgcaggaggaccaccccatcatgagcttcaccatcagcaagaacggcagactggccctgctgaacgtggccacccagggcgtgcacctgtgggacctgcaggacagagtgctggtgagaaagtaccagggcgtgacccagggcttctacaccatccacagctgcttcggcggccacaacgaggacttcatcgccagcggcagcgaggaccacaaggtgtacatctggcacaagagaagcgagctgcccatcgccgagctgaccggccacaccagaaccgtgaactgcgtgagctggaacccccagatccccagcatgatggccagcgccagcgacgacggcaccgtgagaatctggggccccgcccccttcatcgaccaccagaacatcgaggaggagtgcagcagcatggacagctag

SEQ ID NO: 12792 - DNA, 1053 bp, synthetic construct
  source 1..1053: mol_type = other DNA; note = Synthetic coding sequence
atggccagatggatccccaccaagagacagaagtacggcgtggccatctacaactacaacgccagccaggacgtggagctgagcctgcagatcggcgacaccgtgcacatcctggagatgtacgagggctggtacagaggctacaccctgcagaacaagagcaagaagggcatcttccccgagacctacatccacctgaaggaggccaccgtggaggacctgggccagcacgagaccgtgatccccggcgagctgcccctggtgcaggagctgaccagcaccctgagagagtgggccgtgatctggagaaagctgtacgtgaacaacaagctgaccctgttcagacagctgcagcagatgacctacagcctgatcgagtggagaagccagatcctgagcggcaccctgcccaaggacgagctggccgagctgaagaagaaggtgaccgccaagatcgaccacggcaacagaatgctgggcctggacctggtggtgagagacgacaacggcaacatcctggaccccgacgagaccagcaccatcgccctgttcaaggcccacgaggtggccagcaagagaatcgaggagaagatccaggaggagaagagcatcctgcagaacctggacctgagaggccagagcatcttcagcaccatccacacctacggcctgtacgtgaacttcaagaacttcgtgtgcaacatcggcgaggacgccgagctgttcatggccctgtacgaccccgaccagagcaccttcatcagcgagaactacctgatcagatggggcagcaacggcatgcccaaggagatcgagaagctgaacaacctgcaggccgtgttcaccgacctgagcagcatggacctgatcagacccagagtgagcctggtgtgccagatcgtgagagtgggccacatggagctgaaggagggcaagaagcacacctgcggcctgagaagacccttcggcgtggccgtgatggacatcaccgacatcatccacggcaaggtggacgacgaggagaagcagcacttcatccccttccagcagtag

SEQ ID NO: 12793 - DNA, 360 bp, synthetic construct
  source 1..360: mol_type = other DNA; note = Synthetic coding sequence
atgcccgaggaccaggtgggcaagctggaggccaccgagaacaccatcagcgccatggccgccgccgccgccgagcagcagcagttctacctgctgctgggcaacctgctgagccccgacaacgtggtgagaaagcaggccgaggagacctacgagaacatccccggccagagcaagatcaccttcctgctgcaggccatcagaaacaccaccgccgccgaggaggccagacagatggccgccgtgctgctgagaagactgctgagcagcgccttcgacgaggtgtaccccgccctgcccagcgacgtgcagaccgccatcaagagcgagctgctgatgatcatccagatggagacctag

SEQ ID NO: 12794 - DNA, 279 bp, synthetic construct
  source 1..279: mol_type = other DNA; note = Synthetic coding sequence
atgagcggcctggtgctgggccagagagacgagcccgccggccacagactgagccaggaggagatcctgggcagcaccagactggtgagccagggcctggaggccctgagaagcgagcaccaggccgtgctgcagagcctgagccagaccatcgagtgcctgcagcagggcggccacgaggagggcctggtgcacgagaaggccagacagctgagaagaagcatggagaacatcgagctgggcctgagcgaggcccaggtgatgctggccctggcctag

SEQ ID NO: 12795 - DNA, 405 bp, synthetic construct
  source 1..405: mol_type = other DNA; note = Synthetic coding sequence
atggtgctgatcctgggcagaagactgaacagagaggacctgggcgtgagagacagccccgccaccaagagaaaggtgttcgagatggaccccaagagcctgaccggccacgagttcttcgacttcagcagcggcagcagccacgccgagaacatcctgcagatcttcaacgagttcagagacagcagactgttcaccgacgtgatcatctgcgtggagggcaaggagttcccctgccacagagccgtgctgagcgcctgcagcagctacttcagagccatgttctgcaacgaccacagagagagcagagagatgctggtggagatcaacggcatcctggccgaggccatggagtgcttcctgcagtacgtgtacaccggcaaggtgaagatcaccaccgagtag

SEQ ID NO: 12796 - DNA, 312 bp, synthetic construct; identical to SEQ ID NO: 12740
  source 1..312: mol_type = other DNA; note = Synthetic coding sequence

SEQ ID NO: 12797 - DNA, 1923 bp, synthetic construct
  source 1..1923: mol_type = other DNA; note = Synthetic coding sequence
atgggcagaagaagcggcctgctgggcctgagacccggccccgagcccgtggccctggagagagtgatcaacaaggtgcacctgaaggccaaccacgtggtgaagagagacgtggacgagcacctgagaatcaagaccgtgtacgacaagagcgtggaggagctgctgcccgagaagaagaacctggtgaagaacaagctgttcccccaggccatcagctacctggagaagaccttccaggtgagaagacccgccggcaccatcctgctgagcagacagtgcgccaccaaccagtacctgagaaaggagaacgacccccacagatactgcaccggcgagtgcgccgcccacaccaagtgcggccccgtgatcgtgcccgaggagcacctgcagcagtgcagagtgtacagaggcggcaagtggccccacggcgccgtgggcgtgcccgaccaggagggcatcagcgacgccgacttcgtgctgtacgtgggcgccctggccaccgagagatgcagccacgagaacatcatcagctacgccgcctactgccagcaggaggccaacatggacagacccatcgccggctacgccaacctgtgccccaacatgatcagcacccagccccaggagttcgtgggcatgctgagcaccgtgaagcacgaggtgatccacgccctgggcttcagcgccggcctgttcgccttctaccacgacaaggacggcaaccccctgaccagcagattcgccgacggcctgccccccttcaactacagcctgggcctgtaccagtggagcgacaaggtggtgagaaaggtggagagactgtgggacgtgagagacaacaagatcgtgagacacaccgtgtacctgctggtgacccccagagtggtggaggaggccagaaagcacttcgactgccccgtgctggagggcatggagctggagaaccagggcggcgtgggcaccgagctgaaccactgggagaagagactgctggagaacgaggccatgaccggcagccacacccagaacagagtgctgagcagaatcaccctggccctgatggaggacaccggctggtacaaggccaactacagcatggccgagaagctggactggggcagaggcatgggctgcgacttcgtgagaaagagctgcaagttctggatcgaccagcagagacagaagagacagatgctgagcccctactgcgacaccctgagaagcaaccccctgcagctgacctgcagacaggaccagagagccgtggccgtgtgcaacctgcagaagttccccaagcccctgccccaggagtaccagtacttcgacgagctgagcggcatccccgccgaggacctgccctactacggcggcagcgtggagatcgccgactactgccccttcagccaggagttcagctggcacctgagcggcgagtaccagagaagcagcgactgcagaatcctggagaaccagcccgagatcttcaagaactacggcgccgagaagtacggcccccacagcgtgtgcctgatccagaagagcgccttcgtgatggagaagtgcgagagaaagctgagctaccccgactggggcagcggctgctaccaggtgagctgcagcccccagggcctgaaggtgtgggtgcaggacaccagctacctgtgcagcagagccggccaggtgctgcccgtgagcatccagatgaacggctggatccacgacggcaacctgctgtgccccagctgctgggacttctgcgagctgtgcccccccgagaccgacccccccgccaccaacctgaccagagccctgcccctggacctgtgcagctgcagcagcagcctggtggtgaccctgtggctgctgctgggcaacctgttccccctgctggccggcttcctgctgtgcatctggcactag

SEQ ID NO: 12798 - DNA, 783 bp, synthetic construct
  source 1..783: mol_type = other DNA; note = Synthetic coding sequence
atgaacctggacagcgacggcatggacgacatcatcagccaggagagcagcctggacatggagggcaactacaagaaggcccagaagaacgagagagagagcatcagacagaagctggccctgggcagcttcttcgacgacggccccggcatctacaccagctgcagcaagagcggcaagcccagcctgagcagcagactgcagagcggcatgaacctgcagatctgcttcgtgaacgacagcggcagcgacaaggacagcgacgccgacgacagcaagaccgagaccagcctggacacccccctgagccccatgagcaagcagagcagcagctacagcgacagagacaccaccgaggaggagagcgagagcctggacgacatggacttcctgaccagacagaagaagctgcaggccgaggccaagatggccctggccatggccaagcccatggccaagatgcaggtggaggtggagaagcagaacagaaagaagagccccgtggccgacctgctgccccacatgccccacatcagcgagtgcctgatgaagagaagcctgaagcccaccgacctgagagacatgaccatcggccagctgcaggtgatcgtgaacgacctgcacagccagatcgagagcctgaacgaggagctggtgcagctgctgctgatcagagacgagctgcacaccgagcaggacgccatgctggtggacatcgaggacctgaccagacacgccgagagccagcagaagcacatggccgagaagatgcccgccaagtag

SEQ ID NO: 12799 - DNA, 633 bp, synthetic construct; identical to SEQ ID NO: 10549
  source 1..633: mol_type = other DNA; note = Synthetic coding sequence

SEQ ID NO: 12800 - DNA, 381 bp, synthetic construct
  source 1..381: mol_type = other DNA; note = Synthetic coding sequence
atgaaccagagaagccacctgggcaccacctacctggacaccgccaagggcgccgtggagaccttcatgaagctgagagccagagaccccgccagcagaggcgacagatacatgctggtgaccttcgaggagcccccctacgccatcaaggccggctggaaggagaaccacgccaccttcatgaacgagctgaagaacctgcaggccgagggcctgaccaccctgggccagagcctgagaaccgccttcgacctgctgaacctgaacagactggtgaccggcatcgacaactacggccagggcagaaaccccttcttcctggagcccgccatcatcatcaccatcaccgacggcagcaagctgaccaccaccagcggctag

SEQ ID NO: 12801 - DNA, 1188 bp, synthetic construct
  source 1..1188: mol_type = other DNA; note = Synthetic coding sequence
atggccaacgaccccctggagggcttccacgaggtgaacctggccagccccaccagccccgacctgctgggcgtgtacgagagcggcacccaggagcagaccaccagccccagcgtgatctacagaccccaccccagcgccctgagcagcgtgcccatccaggccaacgccctggacgtgagcgagctgcccacccagcccgtgtacagcagccccagaagactgaactgcgccgagatcagcagcatcagcttccacgtgaccgaccccgccccctgcagcaccagcggcgtgaccgccggcctgaccaagctgaccaccagaaaggacaactacaacgccgagagagagttcctgcagggcgccaccatcaccgaggcctgcgacggcagcgacgacatcttcggcctgagcaccgacagcctgagcagactgagaagccccagcgtgctggaggtgagagagaagggctacgagagactgaaggaggagctggccaaggcccagagagagctgaagctgaaggacgaggagtgcgagagactgagcaaggtgagagaccagctgggccaggagctggaggagctgaccgccagcctgttcgaggaggcccacaagatggtgagagaggccaacatcaagcaggccaccgccgagaagcagctgaaggaggcccagggcaagatcgacgtgctgcaggccgaggtggccgccctgaagaccctggtgctgagcagcagccccaccagccccacccaggagcccctgcccggcggcaagacccccttcaagaagggccacaccagaaacaagagcaccagcagcgccatgagcggcagccaccaggacctgagcgtgatccagcccatcgtgaaggactgcaaggaggccgacctgagcctgtacaacgagttcagactgtggaaggacgagcccaccatggacagaacctgccccttcctggacaagatctaccaggaggacatcttcccctgcctgaccttcagcaagagcgagctggccagcgccgtgctggaggccgtggagaacaacaccctgagcatcgagcccgtgggcctgcagcccatcagattcgtgaaggccagcgccgtggagtgcggcggccccaagagcctgctgtacgtgaccttcctgcacaccttcgacaccttcagcagagacagctag

SEQ ID NO: 12802 - DNA, 786 bp, synthetic construct; identical to SEQ ID NO: 10243
  source 1..786: mol_type = other DNA; note = Synthetic coding sequence

SEQ ID NO: 12803 - DNA, 1284 bp, synthetic construct
  source 1..1284: mol_type = other DNA; note = Synthetic coding sequence
atggtgtgctggcaggacctggaggagagcctgagaatgaagctgagcctgaccaaggtggtgaacggctgcagactgggcaagatcaagaacctgggcaagaccggcgaccacaccatggacatccccggctgcctgctgtacaccaagaccggcagcgccccccacctgacccaccacaccctgcacaacatccacggcgtgcccgccatggcccagctgaccctgagcagcctggccgagcaccacgaggtgctgaccgagtacaaggagggcgtgggcaagttcatcggcatgcccgagagcctgctgtactgcagcctgcacgaccccgtgagcccctgccccgccggctacgtgaccaacaagagcgtgagcgtgtggagcgtggccggcagagtggagatgaccgtgagcaagttcatggccatccagaaggccctgcagcccgactggttccagtgcctgagcgacggcgaggtgagctgcaaggaggccaccagcatcaagagagtgagaaagagcgtggacagaagcctgctgttcctggacaactgcctgagactgcaggaggagagcgaggtgctgcagaagagcgtgatcatcggcgtgatcgagggcggcgacgtgatggaggagagactgagaagcgccagagagaccgccaagagacccgtgggcggcttcctgctggacggcttccagggcaaccccaccaccctggaggccagactgagactgctgagcagcgtgaccgccgagctgcccgaggacaagcccagactgatcagcggcgtgagcagacccgacgaggtgctggagtgcatcgagagaggcgtggacctgttcgagagcttcttcccctaccaggtgaccgagagaggctgcgccctgaccttcagcttcgactaccagcccaaccccgaggagaccctgctgcagcagaacggcacccaggaggagatcaagtgcatggaccagatcaagaagatcgagaccaccggctgcaaccaggagatcaccagcttcgagatcaacctgaaggagaagaagtaccaggaggacttcaaccccctggtgagaggctgcagctgctactgctgcaagaaccacaccagagcctacatccaccacctgctggtgaccaacgagctgctggccggcgtgctgctgatgatgcacaacttcgagcactacttcggcttcttccactacatcagagaggccctgaagagcgacaagctggcccagctgaaggagctgatccacagacaggccagctag

SEQ ID NO: 12804 - DNA, 393 bp, synthetic construct
  source 1..393: mol_type = other DNA; note = Synthetic coding sequence
atgaaccagagaagccacctgggcaccacctacctggacaccgccaagggcgccgtggagaccttcatgaagctgagagccagagaccccgccagcagaggcgacagatacatgctggtgaccttcgaggagcccccctacgccatcaaggccggctggaaggagaaccacgccaccttcatgaacgagctgaagaacctgcaggccgagggcctgaccaccctgggccagagcctgagaaccgccttcgacctgctgaacctgaacagactggtgaccggcatcgacaactacggccagggcagaaaccccttcttcctggagcccgccatcatcatcaccatcaccgacggcagcaagctgaccaccaccagcggcgtgcaggacgagtag

SEQ ID NO: 12805 - DNA, 417 bp, synthetic construct
  source 1..417: mol_type = other DNA; note = Synthetic coding sequence
atgaaccccgccagcgcccccccccccctgcccccccccggccagcaggtgatccacgtgacccaggacctggacaccgacctggaggccctgttcaacagcgtgatgaaccccaagcccagcagctggagaaagaagatcctgcccgagagcttcttcaaggagcccgacagcggcagccacagcagacagagcagcaccgacagcagcggcggccaccccggccccagactggccggcggcgcccagcacgtgagaagccacagcagccccgccagcctgcagctgggcaccggcgccggcgccgccggcagccccgcccagcagcacgcccacctgagacagcagagctacgacgtgaccgacgagctgcccctgccccccggctgggagatgaccttcaccgccaccggctag

SEQ ID NO: 12806 - DNA, 1692 bp, synthetic construct
  source 1..1692: mol_type = other DNA; note = Synthetic coding sequence
atgagactggaggagctgaagagactgcagaaccccctggagcaggtgaacgacggcaagtacagcttcgagaaccaccagctggccatggacgccgagaacaacatcgagaagtaccccctgaacctgcagcccctggagagcaaggtgaagatcatccagagagcctggagagagtacctgcagagacaggagcccctgggcaagagaagccccagcccccccagcgtgagcagcgagaagctgagcagcagcgtgagcatgaacaccttcagcgacagcagcacccccgactacagagaggacggcatggacctgggcagcgacgccggcagcagcagcagcagcagcagagccagcagccagagcaacagcaccaaggtgaccccctgcagcgagtgcaagagcagcagcagccccggcggcagcctggacctggtgagcgccctggaggactacgaggagcccttccccgtgtaccagaagaaggtgatcgacgagtgggcccccgaggaggacggcgaggaggaggaggaggaggacgagagagaccagagaggctacagagacgacagaagccccgccagagagcccggcgacgtgagcgccagaaccagaagcggcggcggcggcggcagaagcgccaccaccgccatgcccccccccgtgcccaacggcaacctgcaccagcacgacccccaggacctgagacacaacggcaacgtggtggtggccggcagacccagctgcagcagaggccccagaagagccatccagaagccccagcccgccggcggcagaagaagcggcagaggccccgccgccggcggcctgtgcctgcagccccccgacggcggcacctgcgtgcccgaggagccccccgtgccccccatggactgggaggccctggagaagcacctggccggcctgcagttcagagagcaggaggtgagaaaccagggccaggccagaaccaacagcaccagcgcccagaagaacgagagagagagcatcagacagaagctggccctgggcagcttcttcgacgacggccccggcatctacaccagctgcagcaagagcggcaagcccagcctgagcagcagactgcagagcggcatgaacctgcagatctgcttcgtgaacgacagcggcagcgacaaggacagcgacgccgacgacagcaagaccgagaccagcctggacacccccctgagccccatgagcaagcagagcagcagctacagcgacagagacaccaccgaggaggagagcgagagcctggacgacatggacttcctgaccagacagaagaagctgcaggccgaggccaagatggccctggccatggccaagcccatggccaagatgcaggtggaggtggagaagcagaacagaaagaagagccccgtggccgacctgctgccccacatgccccacatcagcgagtgcctgatgaagagaagcctgaagcccaccgacctgagagacatgaccatcggccagctgcaggtgatcgtgaacgacctgcacagccagatcgagagcctgaacgaggagctggtgcagctgctgctgatcagagacgagctgcacaccgagcaggacgccatgctggtggacatcgaggacctgaccagacacgccgagagccagcagaagcacatggccgagaagatgcccgccaagtag

SEQ ID NO: 12807 - DNA, 228 bp, synthetic construct
  source 1..228: mol_type = other DNA; note = Synthetic coding sequence
atgcccgaggaccaggtgggcaagctggaggccaccgagaacaccatcagcgccatggccgccgccgccgccgagcagcagcagttctacctgctgctgggcaacctgctgagccccgacaacgtggtgagaaagcaggccgaggagacctacgagaacatccccggccagagcaagatcaccttcctgctgcaggccatcagaaacaccaccgccgccgaggagtag

SEQ ID NO: 12808 - DNA, 2712 bp, synthetic construct; identical to SEQ ID NO: 10162
  source 1..2712: mol_type = other DNA; note = Synthetic coding sequence

SEQ ID NO: 12809 - DNA, 522 bp, synthetic construct
  source 1..522: mol_type = other DNA; note = Synthetic coding sequence
atgcccagaaagggcacccagcccagcaccgccagaagaagagaggagggcccccccccccccagccccgacggcgccagcagcgacgccgagcccgagccccccagcggcagaaccgagagccccgccaccgccgccgagaccgccagcgaggagctggacaacagaagcctggaggagatcctgaacagcatcccccccccccccccccccgccatgaccaacgaggccggcgcccccagactgatgatcacccacatcgtgaaccagaacttcaagagctacgccggcgagaagatcctgggccccttccacaagagattcagctgcatcatcggccccaacggcagcggcaagagcaacgtgatcgacagcatgctgttcgtgttcggctacagagcccagaagatcagaagcaagaagctgagcgtgctgatccacaacagcgacgagcacaaggacatccagagctgcaccgtggaggtgcacttccagaagatcatcgacaaggagggcgactag

SEQ ID NO: 12810 - DNA, 2262 bp, synthetic construct
  source 1..2262: mol_type = other DNA; note = Synthetic coding sequence
atgtacagccccatcatctaccaggccctgtgcgagcacgtgcagacccagatgagcctgatgaacgacctgaccagcaagaacatccccaacggcatccccgccgtgccctgccacgcccccagccacagcgagagccaggccaccccccacagcagctacggcctgtgcaccagcacccccgtgtggagcctgcagagacccccctgcccccccaaggtgcacagcgaggtgcagaccgacggcaacagccagttcgccagccagggcaagaccgtgagcgccacctgcaccgacgtgctgagaaacagcttcaacaccagccccggcgtgccctgcagcctgcccaagaccgacatcagcgccatccccaccctgcagcagctgggcctggtgaacggcatcctgccccagcagggcatccacaaggagaccgacctgctgaagtgcatccagacctacctgagcctgttcagaagccacggcaaggagacccacctggacagccagacccacagaagccccacccagagccagcccgccttcctggccaccaacgaggagaagtgcgccagagagcagatcagagaggccaccagcgagagaaaggacctgaacatccacgtgagagacaccaagaccgtgaaggacgtgcagaaggccaagaacgtgaacaagaccgccgagaaggtgagaatcatcaagtacctgctgggcgagctgaaggccctggtggccgagcaggaggacagcgagatccagagactgatcaccgagatggaggcctgcatcagcgtgctgcccaccgtgagcggcaacaccgacatccaggtggagatcgccctggccatgcagcccctgagaagcgagaacgcccagctgagaagacagctgagaatcctgaaccagcagctgagagagcagcagaagacccagaagcccagcggcgccgtggactgcaacctggagctgttcagcctgcagagcctgaacatgagcctgcagaaccagctggaggagagcctgaagagccaggagctgctgcagagcaagaacgaggagctgctgaaggtgatcgagaaccagaaggacgagaacaagaagttcagcagcatcttcaaggacaaggaccagaccatcctggagaacaagcagcagtacgacatcgagatcaccagaatcaagatcgagctggaggaggccctggtgaacgtgaagagcagccagttcaagctggagaccgccgagaaggagaaccagatcctgggcatcaccctgagacagagagacgccgaggtgaccagactgagagagctgaccagaaccctgcagaccagcatggccaagctgctgagcgacctgagcgtggacagcgccagatgcaagcccggcaacaacctgaccaagagcctgctgaacatccacgacaagcagctgcagcacgaccccgcccccgcccacaccagcatcatgagctacctgaacaagctggagaccaactacagcttcacccacagcgagcccctgagcaccatcaagaacgaggagaccatcgagcccgacaagacctacgagaacgtgctgagcagcagaggcccccagaacagcaacaccagaggcatggaggaggccagcgcccccggcatcatcagcgccctgagcaagcaggacagcgacgagggcagcgagaccatggccctgatcgaggacgagcacaacctggacaacaccatctacatccccttcgccagaagcacccccgagaagaagagccccctgagcaagagactgagcccccagccccagatcagagccgccaccacccagctggtgagcaacagcggcctggccgtgagcggcaaggagaacaagctgtgcacccccgtgatctgcagcagcagcaccaaggaggccgaggacgcccccgagaagctgagcagagccagcgacatgaaggacacccagctgctgaagaagatcaaggaggccatcggcaagatccccgccgccaccaaggagcccgaggagcagaccgcctgccacggccccagcggctgcctgagcaacagcctgcaggtgaagggcaacaccgtgtgcgacggcagcgtgttcaccagcgacctgatgagcgactggagcatcagcagcttcagcaccttcaccagcagagacgagcaggacttcagaaacggcctggccgccctggacgccaacatcgccagactgcagaagagcctgagaaccggcctgctggagaagtag

SEQ ID NO: 12811 - DNA, 219 bp, synthetic construct; identical to SEQ ID NO: 12780
  source 1..219: mol_type = other DNA; note = Synthetic coding sequence

SEQ ID NO: 12812 - DNA, 588 bp, synthetic construct
  source 1..588: mol_type = other DNA; note = Synthetic coding sequence
atgtggcacatgaccagaaactggcccctggtgggcaagaccagcctgatcaccagattcatgtacgacagcttcgacaacacctaccaggccaccatcggcatcgacttcctgagcaagaccatgtacctggaggacagaaccgtgagactgcagctgtgggacaccgccggccaggagagattcagaagcctgatccccagctacatcagagacagcaccgtggccgtggtggtgtacgacatcaccaacctgaacagcttccagcagaccagcaagtggatcgacgacgtgagaaccgagagaggcagcgacgtgatcatcatgctggtgggcaacaagaccgacctggccgacaagagacagatcaccatcgaggagggcgagcagagagccaaggagctgagcgtgatgttcatcgagaccagcgccaagaccggctacaacgtgaagcagctgttcagaagagtggccagcgccctgcccggcatggagaacgtgcaggagaagagcaaggagggcatgatcgacatcaagctggacaagccccaggagccccccgccagcgagggcggctgcagctgctag

SEQ ID NO: 12813 - DNA, 1047 bp, synthetic construct; identical to SEQ ID NO: 10970
  source 1..1047: mol_type = other DNA; note = Synthetic coding sequence

SEQ ID NO: 12814 - DNA, 2862 bp, synthetic construct
  source 1..2862: mol_type = other DNA; note = Synthetic coding sequence
atgaagagaggcatcagaagagaccccttcagaaagagaaagctgggcggcagagccaagaaggtgagagagcccaccgccgtgaacagcttctacagagaggccagcctgcccagcgtgtgggccagcctgagaagaagagagatggtgagaagcggcgccagacccggccaggtgctgagcagcggcagacacaccggccccgccaagctgaccaacggcaagaaggccacctacctgagaaagatccccagattcaacgccgacagcggctacagcatccacagcgacagcgagagccaggccgagaccgtgcacggcctggacggctgcgccagcctgctgagagacatcctgagaaacgaggacagcggcagcgagaccgcctacctggagaacagaagcaacagcagacccctggagagcaagagatacggcagcaagaagaagagacacgagaagcacaccatccccctggtggtgcagaaggagaccagcagcagcgacaacaagaagcagatccccaacgaggccagcgccagaagcgagagagacaccagcgacctggagcagaactggagcctgcaggaccactacagaatgtacagccccatcatctaccaggccctgtgcgagcacgtgcagacccagatgagcctgatgaacgacctgaccagcaagaacatccccaacggcatccccgccgtgccctgccacgcccccagccacagcgagagccaggccaccccccacagcagctacggcctgtgcaccagcacccccgtgtggagcctgcagagacccccctgcccccccaaggtgcacagcgaggtgcagaccgacggcaacagccagttcgccagccagggcaagaccgtgagcgccacctgcaccgacgtgctgagaaacagcttcaacaccagccccggcgtgccctgcagcctgcccaagaccgacatcagcgccatccccaccctgcagcagctgggcctggtgaacggcatcctgccccagcagggcatccacaaggagaccgacctgctgaagtgcatccagacctacctgagcctgttcagaagccacggcaaggagacccacctggacagccagacccacagaagccccacccagagccagcccgccttcctggccaccaacgaggagaagtgcgccagagagcagatcagagaggccaccagcgagagaaaggacctgaacatccacgtgagagacaccaagaccgtgaaggacgtgcagaaggccaagaacgtgaacaagaccgccgagaaggtgagaatcatcaagtacctgctgggcgagctgaaggccctggtggccgagcaggaggacagcgagatccagagactgatcaccgagatggaggcctgcatcagcgtgctgcccaccgtgagcggcaacaccgacatccaggtggagatcgccctggccatgcagcccctgagaagcgagaacgcccagctgagaagacagctgagaatcctgaaccagcagctgagagagcagcagaagacccagaagcccagcggcgccgtggactgcaacctggagctgttcagcctgcagagcctgaacatgagcctgcagaaccagctggaggagagcctgaagagccaggagctgctgcagagcaagaacgaggagctgctgaaggtgatcgagaaccagaaggacgagaacaagaagttcagcagcatcttcaaggacaaggaccagaccatcctggagaacaagcagcagtacgacatcgagatcaccagaatcaagatcgagctggaggaggccctggtgaacgtgaagagcagccagttcaagctggagaccgccgagaaggagaaccagatcctgggcatcaccctgagacagagagacgccgaggtgaccagactgagagagctgaccagaaccctgcagaccagcatggccaagctgctgagcgacctgagcgtggacagcgccagatgcaagcccggcaacaacctgaccaagagcctgctgaacatccacgacaagcagctgcagcacgaccccgcccccgcccacaccagcatcatgagctacctgaacaagctggagaccaactacagcttcacccacagcgagcccctgagcaccatcaagaacgaggagaccatcgagcccgacaagacctacgagaacgtgctgagcagcagaggcccccagaacagcaacaccagaggcatggaggaggccagcgcccccggcatcatcagcgccctgagcaagcaggacagcgacgagggcagcgagaccatggccctgatcgaggacgagcacaacctggacaacaccatctacatccccttcgccagaagcacccccgagaagaagagccccctgagcaagagactgagcccccagccccagatcagagccgccaccacccagctggtgagcaacagcggcctggccgtgagcggcaaggagaacaagctgtgcacccccgtgatctgcagcagcagcaccaaggaggccgaggacgcccccgagaagctgagcagagccagcgacatgaaggacacccagctgctgaagaagatcaaggaggccatcggcaagatccccgccgccaccaaggagcccgaggagcagaccgcctgccacggccccagcggctgcctgagcaacagcctgcaggtgaagggcaacaccgtgtgcgacggcagcgtgttcaccagcgacctgatgagcgactggagcatcagcagcttcagcaccttcaccagcagagacgagcaggacttcagaaacggcctggccgccctggacgccaacatcgccagactgcagaagagcctgagaaccggcctgctggagaagtag

SEQ ID NO: 12815 - DNA, 1683 bp, synthetic construct; identical to SEQ ID NO: 11916
  source 1..1683: mol_type = other DNA; note = Synthetic coding sequence

SEQ ID NO: 12816 - DNA, 153 bp, synthetic construct
  source 1..153: mol_type = other DNA; note = Synthetic coding sequence
atgcccgaggaccaggtgggcaagctggaggccaccgagaacaccatcagcgccatggccgccgccgccgccgagcagcagcagttctacctgctgctgggcaacctgctgagccccgacaacgtggtgagaaagcaggccgaggtgacctag

SEQ ID NO: 12817 - DNA, 288 bp, synthetic construct
  source 1..288: mol_type = other DNA; note = Synthetic coding sequence
atggccatcggcaagagactggccaccctgcccaccaaggagcagaagacccagagactgatcagcgagctgagcctgctgaaccacaagctgcccgccagagtgtggctgcccaccgccggcttcgaccaccacgtggtgagagtgccccacacccaggccgtggtgctgaacagcaaggacaaggccccctacctgatctacgtggaggtgctggagtgcgagaacttcgacaccaccagcgtgcccgccagaatccccgagaacagaatcagaagcaccagatag

SEQ ID NO: 12818 - DNA, 1260 bp, synthetic construct
  source 1..1260: mol_type = other DNA; note = Synthetic coding sequence
atggccggcagcggctgcgcctggggcgccgagccccccagattcctggaggccttcggcagactgtggcaggtgcagagcagactgggcagcggcagcagcgccagcgtgtacagagtgagatgctgcggcaaccccggcagcccccccggcgccctgaagcagttcctgccccccggcaccaccggcgccgccgccagcgccgccgagtacggcttcagaaaggagagagccgccctggagcagctgcagggccacagaaacatcgtgaccctgtacggcgtgttcaccatccacttcagccccaacgtgcccagcagatgcctgctgctggagctgctggacgtgagcgtgagcgagctgctgctgtacagcagccaccagggctgcagcatgtggatgatccagcactgcgccagagacgtgctggaggccctggccttcctgcaccacgagggctacgtgcacgccgacctgaagcccagaaacatcctgtggagcgccgagaacgagtgcttcaagctgatcgacttcggcctgagcttcaaggagggcaaccaggacgtgaagtacatccagaccgacggctacagagcccccgaggccgagctgcagaactgcctggcccaggccggcctgcagagcgacaccgagtgcaccagcgccgtggacctgtggagcctgggcatcatcctgctggagatgttcagcggcatgaagctgaagcacaccgtgagaagccaggagtggaaggccaacagcagcgccatcatcgaccacatcttcgccagcaaggccgtggtgaacgccgccatccccgcctaccacctgagagacctgatcaagagcatgctgcacgacgaccccagcagaagaatccccgccgagatggccctgtgcagccccttcttcagcatccccttcgccccccacatcgaggacctggtgatgctgcccacccccgtgctgagactgctgaacgtgctggacgacgactacctggagaacgaggaggagtacgaggacgtggtggaggacgtgaaggaggagtgccagaagtacggccccgtggtgagcctgctggtgcccaaggagaaccccggcagaggccaggtgttcgtggagtacgccaacgccggcgacagcaaggccgcccagaagctgctgaccggcagaatgttcgacggcaagttcgtggtggccaccttctaccccctgagcgcctacaagagaggctacctgtaccagaccctgctgtag

SEQ ID NO: 12819 - DNA, 1272 bp, synthetic construct
  source 1..1272: mol_type = other DNA; note = Synthetic coding sequence
atgcccagaaagggcacccagcccagcaccgccagaagaagagaggagggcccccccccccccagccccgacggcgccagcagcgacgccgagcccgagccccccagcggcagaaccgagagccccgccaccgccgccgagaccgccagcgaggagctggacaacagaagcctggaggagatcctgaacagcatcccccccccccccccccccgccatgaccaacgaggccggcgcccccagactgatgatcacccacatcgtgaaccagaacttcaagagctacgccggcgagaagatcctgggccccttccacaagagattcagctgcatcatcggccccaacggcagcggcaagagcaacgtgatcgacagcatgctgttcgtgttcggctacagagcccagaagatcagaagcaagaagctgagcgtgctgatccacaacagcgacgagcacaaggacatccagagctgcaccgtggaggtgcacttccagaagatcatcgacaaggagggcgacgactacgaggtgatccccaacagcaacttctacgtgagcagaaccgcctgcagagacaacaccagcgtgtaccacatcagcggcaagaagaagaccttcaaggacgtgggcaacctgctgagaagccacggcatcgacctggaccacaacagattcctgatcctgcagggcgaggtggagcagatcgccatgatgaagcccaagggccagaccgagcacgacgagggcatgctggagtacctggaggacatcatcggctgcggcagactgaacgagcccatcaaggtgctgtgcagaagagtggagatcctgaacgagcacagaggcgagaagctgaacagagtgaagatggtggagaaggagaaggacgccctggagggcgagaagaacatcgccatcgagttcctgaccctggagaacgagatcttcagaaagaagaaccacgtgtgccagtactacatctacgagctgcagaagagaatcgccgagatggagacccagaaggagaagatccacgaggacaccaaggagatcaacgagaagagcaacatcctgagcaacgagatgaaggccaagaacaaggacgtgaaggacaccgagaagaagctgaacaagatcaccaagttcatcgaggagaacaaggagaagttcacccagctggacctggaggacgtgcaggtgagagagaagctgaagcacgccaccagcaaggccaagaagctggagaagcagctgcagaaggacaaggagtag

SEQ ID NO: 12820 - DNA, 1113 bp, synthetic construct
  source 1..1113: mol_type = other DNA; note = Synthetic coding sequence
atggaggagggcgtgccctgccccgcccccgccgccaagctgaccccccccgtgaagaagagccaggacatgcacgacgagagaagcaagctggtgaacgagtacgcctgcagagtgctggagctgctgggcatgggccacagactgttcgtgcccagactgctggccaccagcaaggaggacctgctgcaggccgacttcgagggcgccctgaagttcttcagagtgcagctgcccaagagatacagagccgaggagaacgccagaagactgatggagcaggcctgcaacatcaaggtgcccaccaagaagctgaagaagtacgagaaggagtaccagaccatgagagagagccagctgcagcaggaggaccccatggacagatacaagagagagaacagaagactgcaggaggccagcatgagactggagcaggagaacgacgacctggcccacgagctggtgaccagcaagatcgccctgagaaacgacctggaccaggccgaggacaaggccgacgtgctgaacaaggagctgctgctgaccaagcagagactggtggagaccgaggaggagaagagaaagcaggaggaggagaccgcccagctgaaggaggtgttcagaaagcagctggagaaggccgagtacgagatcaagaagaccaccgccatcatcgccgagtacaagcagatctgcagccagctgagcaccagactggagaagcagcaggccgccagcaaggaggagctggaggtggtgaagggcaagatgatggcctgcaagcactgcagcgacatcttcagcaaggagggcgccctgaagctggccgccaccggcagagaggaccagggcatcgagaccgacgacgagaaggacagcctgaagaagcagctgagagagatggagctggagctggcccagaccaagctgcagctggtggaggccaagtgcaagatccaggagctggagcaccagagaggcgccctgatgaacgagatccaggccgccaagaacagctggttcagcaagaccctgaacagcatcaagaccgccaccggcacccagcccctgcagcccgcccccgtgacccagccccccaaggagagcacctag

SEQ ID NO: 12821 - DNA, 2262 bp, synthetic construct; identical to SEQ ID NO: 12810
  source 1..2262: mol_type = other DNA; note = Synthetic coding sequence

SEQ ID NO: 12822 - DNA, 2067 bp, synthetic construct; identical to SEQ ID NO: 10442
  source 1..2067: mol_type = other DNA; note = Synthetic coding sequence

SEQ ID NO: 12823 - DNA, 543 bp, synthetic construct
  source 1..543: mol_type = other DNA; note = Synthetic coding sequence
atgcccagaaagggcacccagcccagcaccgccagaagaagagaggagggcccccccccccccagccccgacggcgccagcagcgacgccgagcccgagccccccagcggcagaaccgagagccccgccaccgccgccgagaccgccagcgaggagctggacaacagaagcctggaggagatcctgaacagcatcccccccccccccccccccgccatgaccaacgaggccggcgcccccagactgatgatcacccacatcgtgaaccagaacttcaagagctacgccggcgagaagatcctgggccccttccacaagagattcagctgcatcatcggccccaacggcagcggcaagagcaacgtgatcgacagcatgctgttcgtgttcggctacagagcccagaagatcagaagcaagaagctgagcgtgctgatccacaacagcgacgagcacaaggacatccagagctgcaccgtggaggtgcacttccagaagatcatcgacaaggagggcgacgactacgaggtgatccccaactag

SEQ ID NO: 12824 - DNA, 4689 bp, synthetic construct
  source 1..4689: mol_type = other DNA; note = Synthetic coding sequence
atgcccggcgaggccgccagagccgagctgctgctgcccgaggccgacagacccggccccagaaccgacctgagctgcgacgccgccgccgccaccaccatcctgggcggcgacagaagagagccctgcgccctgacccccggccccagccacctggccctgaccttcctgcccagcaagcccggcgccagaccccagcccgagggcgccagctgggacgccggccccggcggcgcccccagcgcctgggccgaccccggcgagggcggccccagccccatgctgctgcccgagggcctgagcagccaggccctgagcaccgaggcccccctgcccgccaccctggagcccagaatcgtgatgggcgaggagacctgccaggccctgctgagccccagagccgccagaaccgccctgagagaccaggagggcggccacgccagccccgaccccccccccgagctgtgcagccagggcgacctgagcgtgcccagccccccccccgaccccgacagcttcttcaccccccccagcacccccaccaagaccacctacgccctgctgcccgcctgcggcccccacggcgacgccagagacagcgaggccgagctgagagacgagctgctggacagcccccccgccagccccagcggcagctacatcaccgccgacggcgacagctgggccagcagccccagctgcagcctgagcctgctggcccccgccgagggcctggacttccccagcggctggggcctgagcccccagggcagcatggtggacgagagagagctgcaccccgccggcacccccgagccccccagcagcgagagcagcctgagcgccgacagcagcagcagctggggccaggagggccacttcttcgacctggacttcctggccaacgaccccatgatccccgccgccctgctgcccttccagggcagcctgatcttccaggtggaggccgtggaggtgacccccctgagccccgaggaggaggaggaggaggccgtggccgaccccgaccccggcggcgacctggccggcgagggcgaggaggacagcaccagcgccagcttcctgcagagcctgagcgacctgagcatcaccgagggcatggacgaggccttcgccttcagagacgacaccagcgccgccagcagcgacagcgacagcgccagctacgccgaggccgacgacgagagactgtacagcggcgagccccacgcccaggccaccctgctgcaggacagcgtgcagaagaccgaggaggagagcggcggcggcgccaagggcctgcaggcccaggacggcaccgtgagctgggccgtggaggccgccccccagaccagcgacagaggcgcctacctgagccagagacaggagctgatcagcgaggtgaccgaggagggcctggccctgggccaggagagcaccgccaccgtgaccccccacaccctgcaggtggcccccggcctgcaggtggaggtggccaccagagtgaccccccaggccggcgaggaggagaccgacagcaccgccggccaggagagcgccgccatggccatgccccagcccagccaggagggcatcagcgagatcctgggccaggagagcgtgaccgccgagaagctgcccaccccccaggaggagaccagcctgaccctgtgccccgacagcccccagaacctgaaggaggagggcggcctggacctgcccagcggcagaaagcccgtggccgccgccaccatcgtgcccagacaggccaaggaggacctgaccctgccccaggacagcgccatgaccccccccctgcccctgcaggacaccgacctgagcagcgcccccaagcccgtggccgccgccaccatcgtgagccagcaggccgaggagggcctgaccctgccccaggacagcgtgatgaccccccccctgcccctgcaggacaccgagctgagcagcgcccccaagcccgtggccgccgccaccctggtgagccagcaggccgaggagggcctgaccctgccccaggacagcgccatgaccccccccctgcccctgcaggacaccgacctgagcagcgcccccaagcccgtggccgccgccaccctggtgagccagcaggccgaggagggcctgaccctgccccaggacagcgccatgaccccccccctgcccctgcaggacaccgacctgagcagcgcccccaagcccgtggccgccgccaccctggtgagccagcaggccgaggagggcctgaccctgccccaggacagcgccatgaccccccccctgcccctgcaggacaccgacctgagcagcgcccccaagcccgtggccgccgccaccatcgtgagccagcaggccgaggagggcctgaccctgccccaggacagcgccatgaccccccccctgcccctgcaggacaccgacctgagcagcgcccccaagcccgtggccgccgccaccatcgtgagccagcaggccgaggagggcctgaccctgccccaggacagcgccatgaccccccccctgcccctgcaggacaccgacctgagcagcgcccccaagcccgtggccgccgccacccccgtgagccagcaggccgaggagggcctgaccctgccccaggacagcgccatgaccccccccctgcccctgcaggacaccgacctgagcagcgcccccaagcccgtggccgccgccacccccgtgagccagcaggccgaggagggcctgaccctgccccaggacagcgccatgaccgcccccctgcccctgcaggacaccggccccaccagcggccccgagcccctggccgtggccaccccccagaccctgcaggccgaggccggctgcgcccccggcaccgagcccgtggccaccatggcccagcaggaggtgggcgaggccctgggccccagacccgcccccgaggagaagaacgccgccctgcccaccgtgcccgagcccgccgccctggaccaggtgcagcaggacgacccccagcccgccgccgaggccggcaccccctgggccgcccaggaggacgccgacagcaccctgggcatggaggccctgagcctgcccgagcccgccagcggcgccggcgaggagatcgccgaggccctgagcagacccggcagagaggcctgcctggaggccagagcccacaccggcgacggcgccaagcccgacagcccccagaaggagaccctggaggtggagaaccagcaggagggcggcctgaagcccctggcccaggagcacggccccagaagcgccctgggcggcgccagagaggtgcccgacgccccccccgccgcctgccccgaggtgagccaggccagactgctgagccccgccagagaggagagaggcctgagcggcaagagcacccccgagcccaccctgcccagcgccgtggccaccgaggccagcctggacagctgccccgagagcagcgtgggcgccgtgagcagcctggacagaggctgccccgacgcccccgcccccaccagcgcccccaccagccagcagcccgagcccgtgctgggcctgggcagcgtggagcagccccacgaggtgcccagcgtgctgggcacccccctgctgcagccccccgagaacctggccaagggccagcccagcacccccgtggacagacccctgggccccgaccccagcgcccccggcaccctggccggcgccgccctgccccccctggagccccccgccccctgcctgtgccaggacccccaggaggacagcgtggaggacgaggagccccccggcagcctgggcctgccccccccccaggccggcgtgcagcccgccgccgccgccgtgagcggcaccacccagcccctgggcaccggccccagagtgagcctgagcccccacagccccctgctgagccccaaggtggccagcatggacgccaaggacctggccctgcagatcctgcccccctgccaggtgcccccccccagcggcccccagagccccgccggcccccagggcctgagcgcccccgagcagcaggaggacgaggacagcctggaggaggacagccccagagccctgggcagcggccagcacagcgacagccacggcgagagcagcgccgagctggacgagcaggacatcctggccccccagaccgtgcagtgccccgcccaggcccccgccggcggcagcgaggagaccatcgccaaggccaagcagagcagaagcgagaagaaggccagaaaggccatgagcaagctgggcctgagacagatccagggcgtgaccagaatcaccatccagaagagcaagaacatcctgttcgtgatcgccaagcccgacgtgttcaagagccccgccagcgacacctacgtggtgttcggcgaggccaagatcgaggacctgagccagcaggtgcacaaggccgccgccgagaagttcaaggtgcccagcgagcccagcgccctggtgcccgagagcgcccccagacccagagtgagactggagtgcaaggaggaggaggaggaggaggaggaggaggtggacgaggccggcctggagctgagagacatcgagctggtgatggcccaggccaacgtgagcagagccaaggccgtgagagccctgagagacaaccacagcgacatcgtgaacgccatcatggagctgaccatgtag

SEQ ID NO: 12825 - DNA, 3294 bp, synthetic construct; identical to SEQ ID NO: 10454
  source 1..3294: mol_type = other DNA; note = Synthetic coding sequence

SEQ ID NO: 12826 - DNA, 1011 bp, synthetic construct
  source 1..1011: mol_type = other DNA; note = Synthetic coding sequence
atgaaggccaccgccatgaccagcgcctggctggcccagggcggcgcccacgtgaccatcaacgccagagccgaggaggacgtggagcccgagtgcatcatggagaaggtggccaaggccagcggcgccaactacagcttccacaaggagagcggcagattccaggacgtgggcccccaggcccccgtgggcagcgtgtaccagaagaccaacgccgtgagcgagatcaagagagtgggcaaggacagcttctgggccaaggccgagaaggaggaggagaacagaagactggaggagaagagaagagccgaggaggcccagagacagctggagcaggagagaagagagagagagctgagagaggccgccagaagagagcagagataccaggagcagggcggcgaggccagcccccagagcagaacctgggagcagcagcaggaggtggtgagcagaaacagaaacgagcaggagagcgccgtgcaccccagagagatcttcaagcagaaggagagagccatgagcaccaccagcatcagcagcccccagcccggcaagctgagaagccccttcctgcagaagcagctgacccagcccgagacccacttcggcagagagcccgccgccgccatcagcagacccagagccgacctgcccgccgaggagcccgcccccagcacccccccctgcctggtgcaggccgaggaggaggccgtgtacgaggagccccccgagcaggagaccttctacgagcagccccccctggtgcagcagcagggcgccggcagcgagcacatcgaccaccacatccagggccagggcctgagcggccagggcctgtgcgccagagccctgtacgactaccaggccgccgacgacaccgagatcagcttcgaccccgagaacctgatcaccggcatcgaggtgatcgacgagggctggtggagaggctacggccccgacggccacttcggcatgttccccgccaactacgtggagctgatcgagtag

SEQ ID NO: 12827 - DNA, 78 bp, synthetic construct
  source 1..78: mol_type = other DNA; note = Synthetic coding sequence
atgtggatgcacgtggccaaggtgcaccccaagggcggcgagatggtgggcgccatcagaaacgccgccttcctgtag

SEQ ID NO: 12828 - DNA, 312 bp, synthetic construct; identical to SEQ ID NO: 12740
  source 1..312: mol_type = other DNA; note = Synthetic coding sequence

SEQ ID NO: 12829 - DNA, 4101 bp, synthetic construct
  source 1..4101: mol_type = other DNA; note = Synthetic coding sequence
atggccgacaccgacctgttcatggagtgcgaggaggaggagctggagccctggcagaagatcagcgacgtgatcgaggacagcgtggtggaggactacaacagcgtggacaagaccaccaccgccggcaaccccctggtgcagcagggcggccagcccctgatcctgacccagaaccccgcccccggcctgggcaccatggtgacccagcccgtgctgagacccgtgcaggtgatgcagaacgccaaccacgtgaccagcagccccgtggccagccagcccatcttcatcaccacccagggcttccccgtgagaaacgtgagacccgtgcagaacgccatgaaccaggtgggcatcgtgctgaacgtgcagcagggccagaccgtgagacccatcaccctggtgcccgcccccggcacccagttcgtgaagcccaccgtgggcgtgccccaggtgttcagccagatgacccccgtgagacccggcagcaccatgcccgtgagacccaccaccaacaccttcaccaccgtgatccccgccaccctgaccatcagaagcaccgtgccccagagccagagccagcagaccaagagcacccccagcaccagcaccacccccaccgccacccagcccaccagcctgggccagctggccgtgcagagccccggccagagcaaccagaccaccaaccccaagctggcccccagcttccccagcccccccgccgtgagcatcgccagcttcgtgaccgtgaagagacccggcgtgaccggcgagaacagcaacgaggtggccaagctggtgaacaccctgaacaccatccccagcctgggccagagccccggccccgtggtggtgagcaacaacagcagcgcccacggcagccagagaaccagcggccccgagagcagcatgaaggtgaccagcagcatccccgtgttcgacctgcaggacggcggcagaaagatctgccccagatgcaacgcccagttcagagtgaccgaggccctgagaggccacatgtgctactgctgccccgagatggtggagtaccagaagaagggcaagagcctggacagcgagcccagcgtgcccagcgccgccaagccccccagccccgagaagaccgcccccgtggccagcacccccagcagcacccccatccccgccctgagcccccccaccaaggtgcccgagcccaacgagaacgtgggcgacgccgtgcagaccaagctgatcatgctggtggacgacttctactacggcagagacggcggcaaggtggcccagctgaccaacttccccaaggtggccaccagcttcagatgcccccactgcaccaagagactgaagaacaacatcagattcatgaaccacatgaagcaccacgtggagctggaccagcagaacggcgaggtggacggccacaccatctgccagcactgctacagacagttcagcacccccttccagctgcagtgccacctggagaacgtgcacagcccctacgagagcaccaccaagtgcaagatctgcgagtgggccttcgagagcgagcccctgttcctgcagcacatgaaggacacccacaagcccggcgagatgccctacgtgtgccagccctacttccccagctacgtgacccaggtgtgccagtacagaagcagcctgtacagcgaggtggacgtgcacttcagaatgatccacgaggacaccagacacctgctgtgcccctactgcctgaaggtgttcaagaacggcaacgccttccagcagcactacatgagacaccagaagagaaacgtgtaccactgcaacaagtgcagactgcagttcctgttcgccaaggacaagatcgagcacaagctgcagcaccacaagaccttcagaaagcccaagcagctggagggcctgaagcccggcaccaaggtgaccatcagagccagcagaggccagcccagaaccgtgcccgtgagcagcaacgacaccccccccagcgccctgcaggaggccgcccccctgaccagcagcatggaccccctgcccgtgttcctgtacccccccgtgcagagaagcatccagaagagagccgtgagaaagatgagcgtgatgggcagacagacctgcctggagtgcagcttcgagatccccgacttccccaaccacttccccacctacgtgcactgcagcctgtgcagatacagcacctgctgcagcagagcctacgccaaccacatgatcaacaaccacgtgcccagaaagagccccaagtacctggccctgttcaagaacagcgtgagcggcatcaagctggcctgcaccagctgcaccttcgtgaccagcgtgggcgacgccatggccaagcacctggtgttcaaccccagccacagaagcagcagcatcctgcccagaggcctgacctggatcgcccacagcagacacggccagaccagagacagagtgcacgacagaaacgtgaagaacatgtaccccccccccagcttccccaccaacaaggccgccaccgtgaagagcgccggcgccacccccgccgagcccgaggagctgctgacccccctggcccccgccctgcccagccccgccagcaccgccacccccccccccacccccacccacccccaggccctggccctgccccccctggccaccgagggcgccgagtgcctgaacgtggacgaccaggacgagggcagccccgtgacccaggagcccgagctggccagcggcggcggcggcagcggcggcgtgggcaagaaggagcagctgagcgtgaagaagctgagagtggtgctgttcgccctgtgctgcaacaccgagcaggccgccgagcacttcagaaacccccagagaagaatcagaagatggctgagaagattccaggccagccagggcgagaacctggagggcaagtacctgagcttcgaggccgaggagaagctggccgagtgggtgctgacccagagagagcagcagctgcccgtgaacgaggagaccctgttccagaaggccaccaagatcggcagaagcctggagggcggcttcaagatcagctacgagtgggccgtgagattcatgctgagacaccacctgaccccccacgccagaagagccgtggcccacaccctgcccaaggacgtggccgagaacgccggcctgttcatcgacttcgtgcagagacagatccacaaccaggacctgcccctgagcatgatcgtggccatcgacgagatcagcctgttcctggacaccgaggtgctgagcagcgacgacagaaaggagaacgccctgcagaccgtgggcaccggcgagccctggtgcgacgtggtgctggccatcctggccgacggcaccgtgctgcccaccctggtgttctacagaggccagatggaccagcccgccaacatgcccgacagcatcctgctggaggccaaggagagcggctacagcgacgacgagatcatggagctgtggagcaccagagtgtggcagaagcacaccgcctgccagagaagcaagggcatgctggtgatggactgccacagaacccacctgagcgaggaggtgctggccatgctgagcgccagcagcaccctgcccgccgtggtgcccgccggctgcagcagcaagatccagcccctggacgtgtgcatcaagagaaccgtgaagaacttcctgcacaagaagtggaaggagcaggccagagagatggccgacaccgcctgcgacagcgacgtgctgctgcagctggtgctggtgtggctgggcgaggtgctgggcgtgatcggcgactgccccgagctggtgcagagaagcttcctggtggccagcgtgctgcccggccccgacggcaacatcaacagccccaccagaaacgccgacatgcaggaggagctgatcgccagcctggaggagcagctgaagctgagcggcgagcacagcgagagcagcacccccagacccagaagcagccccgaggagaccatcgagcccgagagcctgcaccagctgttcgagggcgagagcgagaccgagagcttctacggcttcgaggaggccgacctggacctgatggagatctag

SEQ ID NO: 12830 - DNA, 564 bp, synthetic construct
  source 1..564: mol_type = other DNA; note = Synthetic coding sequence
atggacatcagcaagggcctgcccggcatgcagggcggcctgcacatctggatcagcgagaacagaaagatggtgcccgtgcccgagggcgcctacggcaacttcttcgaggagcactgctacgtgatcctgcacgtgccccagagccccaaggccacccagggcgccagcagcgacctgcactactgggtgggcaagcaggccggcgccgaggcccagggcgccgccgaggccttccagcagagactgcaggacgagctgggcggccagaccgtgctgcacagagaggcccagggccacgagagcgactgcttctgcagctacttcagacccggcatcatctacagaaagggcggcctggccagcgacctgaagcacgtggagaccaacctgttcaacatccagagactgctgcacatcaagggcagaaagcacgtgagcgccaccgaggtggagctgagctggaacagcttcaacaagggcgacatcttcctgctggacctgggcaagatgatgatccagtggaacggccccaagaccagcatcagcgagaaggccagatag

SEQ ID NO: 12831 - DNA, 1329 bp, synthetic construct
  source 1..1329: mol_type = other DNA; note = Synthetic coding sequence
atgcccctggagaacctggaggaggagggcctgcccaagaaccccgacctgagaatcgcccagctgagattcctgctgagcctgcccgagcacagaggcgacgccgccgtgagagacgagctgatggccgccgtgagagacaacaacttctggaacagaatcagacaggagcagaccgaggactgcccccccagcagccccagcagaggctggcactgccaggactggcccagcagaaagccccccaccagcatcagactgtgcttcgccaagcccatcatcaagagacacagaatgcccagctacatggccccctactacgaggccctgtgcaagagcctggactggcagatcgacgtggacctgctgaacaagatgaagaaggccaacgaggacgagctgaagagactggacgaggagctggaggacgccgagaagaacctgggcgagagcgagatcagagacgccatgatggccaaggccgagtacctgtgcagaatcggcgacaaggagggcgccctgaccgccttcagaaagacctacgacaagaccgtggccctgggccacagactggacatcgtgttctacctgctgagaatcggcctgttctacatggacaacgacctgatcaccagaaacaccgagaaggccaagagcctgatcgaggagggcggcgactgggacagaagaaacagactgaaggtgtaccagggcctgtactgcgtggccatcagagacttcaagcaggccgccgagctgttcctggacaccgtgagcaccttcaccagctacgagctgatggactacaagaccttcgtgacctacaccgtgtacgtgagcatgatcgccctggagagacccgacctgagagagaaggtgatcaagggcgccgagatcctggaggtgctgcacagcctgcccgccgtgagacagtacctgttcagcctgtacgagtgcagatacagcgtgttcttccagagcctggccgtggtggagcaggagatgaagaaggactggctgttcgccccccactacagatactacgtgagagagatgagaatccacgcctacagccagctgctggagagctacagaagcctgaccctgggctacatggccgaggccttcggcgtgggcgtggagttcatcgaccaggagctgagcagattcatcgccgccggcagactgcactgcaagatcgacaaggtgaacgagatcgtggagaccaacagacccgacagcaagaactggcagtaccaggagaccatcaagaagggcgacctgctgctgaacagagtgcagaagctgagcagagtgatcaacatgtag

SEQ ID NO: 12832 - DNA, 333 bp, synthetic construct
  source 1..333: mol_type = other DNA; note = Synthetic coding sequence
atgctgtgctggggcaacgccagcttcggccagctgggcctgggcggcatcgacgaggagatcgtgctggagcccagaaagagcgacttcttcatcaacaagagagtgagagacgtgggctgcggcctgagacacaccgtgttcgtgctggacgacggcaccgtgtacacctgcggctgcaacgacctgggccagctgggccacgagaagagcagaaagaagcccgagttcagaagctgcttccccggcagaagcgccatggcccccagcagactgaccgccaccagcgccagccaggtgcaggccatcctgctgccccagccccccgagtag

SEQ ID NO: 12833 - DNA, 930 bp, synthetic construct
  source 1..930: mol_type = other DNA; note = Synthetic coding sequence
atggtgtgctggcagagcgtgagcgtgtggagcgtggccggcagagtggagatgaccgtgagcaagttcatggccatccagaaggccctgcagcccgactggttccagtgcctgagcgacggcgaggtgagctgcaaggaggccaccagcatcaagagagtgagaaagagcgtggacagaagcctgctgttcctggacaactgcctgagactgcaggaggagagcgaggtgctgcagaagagcgtgatcatcggcgtgatcgagggcggcgacgtgatggaggagagactgagaagcgccagagagaccgccaagagacccgtgggcggcttcctgctggacggcttccagggcaaccccaccaccctggaggccagactgagactgctgagcagcgtgaccgccgagctgcccgaggacaagcccagactgatcagcggcgtgagcagacccgacgaggtgctggagtgcatcgagagaggcgtggacctgttcgagagcttcttcccctaccaggtgaccgagagaggctgcgccctgaccttcagcttcgactaccagcccaaccccgaggagaccctgctgcagcagaacggcacccaggaggagatcaagtgcatggaccagatcaagaagatcgagaccaccggctgcaaccaggagatcaccagcttcgagatcaacctgaaggagaagaagtaccaggaggacttcaaccccctggtgagaggctgcagctgctactgctgcaagaaccacaccagagcctacatccaccacctgctggtgaccaacgagctgctggccggcgtgctgctgatgatgcacaacttcgagcactacttcggcttcttccactacatcagagaggccctgaagagcgacaagctggcccagctgaaggagctgatccacagacaggccagctag

SEQ ID NO: 12834 - DNA, 384 bp, synthetic construct
  source 1..384: mol_type = other DNA; note = Synthetic coding sequence
atggtgctgatcctgggcagaagactgaacagagaggacctgggcgtgagagacagccccgccaccaagagaaaggtgttcgagatggaccccaagagcctgaccggccacgagttcttcgacttcagcagcggcagcagccacgccgagaacatcctgcagatcttcaacgagttcagagacagcagactgttcaccgacgtgatcatctgcgtggagggcaaggagttcccctgccacagagccgtgctgagcgcctgcagcagctacttcagagccatgttctgcaacgaccacagagagagcagagagatgctggtggagatcaacggcatcctggccgaggccatggagtgcttcctgcagtacgtgtacaccggctag

SEQ ID NO: 12835 - DNA, 1581 bp, synthetic construct; identical to SEQ ID NO: 12018
  source 1..1581: mol_type = other DNA; note = Synthetic coding sequence

SEQ ID NO: 12836 - DNA, 195 bp, synthetic construct
  source 1..195: mol_type = other DNA; note = Synthetic coding sequence
atgcccgaggaccaggtgggcaagctggaggccaccgagaacaccatcagcgccatggccgccgccgccgccgagcagcagcagttctacctgctgctgggcaacctgctgagccccgacaacgtggtgagaaagcaggccgaggagacctacgagaacatccccggccagagcaagatcaccttcctgctgtag

SEQ ID NO: 12837 - DNA, 741 bp, synthetic construct; identical to SEQ ID NO: 9760
  source 1..741: mol_type = other DNA; note = Synthetic coding sequence

SEQ ID NO: 12838 - DNA, 1296 bp, synthetic construct
  source 1..1296: mol_type = other DNA; note = Synthetic coding sequence
atggccgccaacctgagcagaaacggccccgccctgcaggaggcctacgtgagagtggtgaccgagaagagccccaccgactgggccctgttcacctacgagggcaacagcaacgacatcagagtggccggcaccggcgagggcggcctggaggagatggtggaggagctgaacagcggcaaggtgatgtacgccttctgcagagtgaaggaccccaacagcggcctgcccaagttcgtgctgatcaactggaccggcgagggcgtgaacgacgtgagaaagggcgcctgcgccagccacgtgagcaccatggccagcttcctgaagggcgcccacgtgaccatcaacgccagagccgaggaggacgtggagcccgagtgcatcatggagaaggtggccaaggccagcggcgccaactacagcttccacaaggagagcggcagattccaggacgtgggcccccaggcccccgtgggcagcgtgtaccagaagaccaacgccgtgagcgagatcaagagagtgggcaaggacagcttctgggccaaggccgagaaggaggaggagaacagaagactggaggagaagagaagagccgaggaggcccagagacagctggagcaggagagaagagagagagagctgagagaggccgccagaagagagcagagataccaggagcagggcggcgaggccagcccccagagcagaacctgggagcagcagcaggaggtggtgagcagaaacagaaacgagcaggagagcgccgtgcaccccagagagatcttcaagcagaaggagagagccatgagcaccaccagcatcagcagcccccagcccggcaagctgagaagccccttcctgcagaagcagctgacccagcccgagacccacttcggcagagagcccgccgccgccatcagcagacccagagccgacctgcccgccgaggagcccgcccccagcacccccccctgcctggtgcaggccgaggaggaggccgtgtacgaggagccccccgagcaggagaccttctacgagcagccccccctggtgcagcagcagggcgccggcagcgagcacatcgaccaccacatccagggccagggcctgagcggccagggcctgtgcgccagagccctgtacgactaccaggccgccgacgacaccgagatcagcttcgaccccgagaacctgatcaccggcatcgaggtgatcgacgagggctggtggagaggctacggccccgacggccacttcggcatgttccccgccaactacgtggagctgatcgagtag

SEQ ID NO: 12839 - DNA, 1854 bp, synthetic construct
  source 1..1854: mol_type = other DNA; note = Synthetic coding sequence
atgatcgagaagatgcagggcagcagaatggacgagcagagatgcagcttccccccccccctgaagaccgaggaggactacatcccctaccccagcgtgcacgaggtgctgggcagagagggccccttccccctgatcctgctgccccagttcggcggctactggatcgagggcaccaaccacgagatcaccagcatccccgagaccgagcccctgcagagccccaccaccaaggtgaagctggagtgcaaccccaccgccagaatctacagaaagcacttcctgggcaaggagcacttcaactactacagcctggacgccgccctgggccacctggtgttcagcctgaagtacgacgtgatcggcgaccaggagcacctgagactgctgctgagaaccaagtgcagaacctaccacgacgtgatccccatcagctgcctgaccgagttccccaacgtggtgcagatggccaagctggtgtgcgaggacgtgaacgtggacagattctaccccgtgctgtaccccaaggccagcagactgatcgtgaccttcgacgagcacgtgatcagcaacaacttcaagttcggcgtgatctaccagaagctgggccagaccagcgaggaggagctgttcagcaccaacgaggagagccccgccttcgtggagttcctggagttcctgggccagaaggtgaagctgcaggacttcaagggcttcagaggcggcctggacgtgacccacggccagaccggcaccgagagcgtgtactgcaacttcagaaacaaggagatcatgttccacgtgagcaccaagctgccctacaccgagggcgacgcccagcagctgcagagaaagagacacatcggcaacgacatcgtggccgtggtgttccaggacgagaacacccccttcgtgcccgacatgatcgccagcaacttcctgcacgcctacgtggtggtgcaggccgagggcggcggccccgacggccccctgtacaaggtgagcgtgaccgccagagacgacgtgcccttcttcggcccccccctgcccgaccccgccgtgttcagaaagggccccgagttccaggagttcctgctgaccaagctgatcaacgccgagtacgcctgctacaaggccgagaagttcgccaagctggaggagagaaccagagccgccctgctggagaccctgtacgaggagctgcacatccacagccagagcatgatgggcctgggcggcgacgaggacaagatggagaacggcagcggcggcggcggcttcttcgagagcttcaagagagtgatcagaagcagaagccagagcatggacgccatgggcctgagcaacaagaagcccaacaccgtgagcaccagccacagcggcagcttcgcccccaacaaccccgacctggccaaggccgccggcatcagcctgctgatccccggcaagagcgccagcagattcggcagaagaggcagcgccatcggcatcggcaccgtggaggaggtggtggtgagaggcgccgccggcagcggcggctgcctgcacgccctgttcagcgccagaagccaggacggcggccacatcggcgacgtggcccccctgccccccggccaggcccccggcagagccggctggagcggcggcagcagcgacggcacccagcacctgctgtggggcctggtgcccgtgcccgagcccgtgcccctgaccagaggcttctggccctgcctgggcccctgggaccccggccccgtgcccgccagaatcagataccccaaggccctgcaccccgccgccagaccccccatcagccccgtgtgcatggagagacaccccagccccctgccctag

SEQ ID NO: 12840 - DNA, 1224 bp, synthetic construct
  source 1..1224: mol_type = other DNA; note = Synthetic coding sequence
atgggcaacaccagcttcaacgaggtgatggaggcccagctgcccagccacggcggccccaagcccagcgccgagagcgacatgggcaccagaagagactacatcatggccaagtacgtggagcacagattcgccagaagatgcacccccgagccccagagactgtggaccgccatctgcaacagagacctgctgagcgtgctggaggccttcgccaacggccaggacttcggccagcccctgcccggccccgacgcccaggcccccgaggagctggtgctgcacctggccgtgaaggtggccaaccaggccagcctgcccctggtggacttcatcatccagaacggcggccacctggacgccaaggccgccgacggcaacaccgccctgcactacgccgccctgtacaaccagcccgactgcctgaagctgctgctgaagggcagagccctggtgggcaccgtgaacgaggccggcgagaccgccctggacatcgccagaaagaagcaccacaaggagtgcgaggagctgctggagcaggcccaggccggcaccttcgccttccccctgcacgtggactacagctgggtgatcagcaccgagcccggcagcgacagcgaggaggacgaggaggagaagagatgcctgctgaagctgcccgcccaggcccactgggccagcggcagactggacatcagcaacaagacctacgagaccgtggccagcctgggcgccgccaccccccagggcgagagcgaggactgccccccccccctgcccgtgaagaacagcagcagaaccctggtgcagggctgcgccagacacgccagcggcgacagaagcgaggtgagcagcctgagcagcgaggcccccgagacccccgagagcctgggcagccccgccagcagcagcagcctgatgagccccctggagcccggcgaccccagccaggccccccccaacagcgaggagggcctgagagagccccccggcaccagcagacccagcctgaccagcggcaccacccccagcgagatgtacctgcccgtgagattcagcagcgagagcaccagaagctacagaagaggcgccagaagccccgaggacggccccagcgccagacagcccctgcccagaagaaacgtgcccgtgggcatcaccgagggcgacggcagcagaaccggcagcctgcccgccagcagcgtgcagctgctgcaggactag

SEQ ID NO: 12841 - DNA, 813 bp, synthetic construct
  source 1..813: mol_type = other DNA; note = Synthetic coding sequence
atggccatggagatgagactgcccgtggccagaaagcccctgagcgagagactgggcagagacaccaagaagcacctggtggtgcccggcgacaccatcaccaccgacaccggcttcatgagaggccacggcacctacatgggcgaggagaagctgatcgccagcgtggccggcagcgtggagagagtgaacaagctgatctgcgtgaaggccctgaagaccagatacatcggcgaggtgggcgacatcgtggtgggcagaatcaccgaggtgcagcagaagagatggaaggtggagaccaacagcagactggacagcgtgctgctgctgagcagcatgaacctgcccggcggcgagctgagaagaagaagcgccgaggacgagctggccatgagaggcttcctgcaggagggcgacctgatcagcctgggccagggcgtgctggtgcaggtgagccccagcctggtgaagagacagaagacccacttccacgacctgccctgcggcgccagcgtgatcctgggcaacaacggcttcatctggatctaccccacccccgagcacaaggaggaggaggccggcggcttcatcgccaacctggagcccgtgagcctggccgacagagaggtgatcagcagactgagaaactgcatcatcagcctggtgacccagagaatgatgctgtacgacaccagcatcctgtactgctacgaggccagcctgccccaccagatcaaggacatcctgaagcccgagatcatggaggagatcgtgatggagaccagacagagactgctggagcaggagggctag

SEQ ID NO: 12842 - DNA, 297 bp, synthetic construct
  source 1..297: mol_type = other DNA; note = Synthetic coding sequence
atgcccgaggaccaggtgggcaagctggaggccaccgagaacaccatcagcgccatggccgccgccgccgccgagcagcagcagttctacctgctgctgggcaacctgctgagccccgacaacgtggtgagaaagcaggccgaggagacctacgagaacatccccggccagagcaagatcaccttcctgctgcaggccatcagaaacaccaccgccgccgaggaggccagacagatggccgccgtgctgctgagaagactgctgagcagcgccttcgacgaggtgtaccccgcctag

SEQ ID NO: 12843 - DNA, 306 bp, synthetic construct
  source 1..306: mol_type = other DNA; note = Synthetic coding sequence
atggacgaggtggagcaggaccagcacgaggccagactgaaggagctgttcgacagcttcgacaccaccggcaccggcagcctgggccaggaggagctgaccgacctgtgccacatgctgagcctggaggaggtggcccccgtgctgcagcagaccctgctgcaggacaacctgctgggcagagtgcacttcgaccagttcaaggaggccctgatcctgatcctgagcagaaccctgagcaacgaggagcacttccaggagcccgactgcagcctggaggcccagcccaagtacgtgagaggctag

SEQ ID NO: 12844 - DNA, 1065 bp, synthetic construct
  source 1..1065: mol_type = other DNA; note = Synthetic coding sequence
atggcccacagccccgtggccgtgcaggtgcccggcatgcagaacaacatcgccgaccccgaggagctgttcaccaagctggagagaatcggcaagggcagcttcggcgaggtgttcaagggcatcgacaacagaacccagcaggtggtggccatcaagatcatcgacctggaggaggccgaggacgagatcgaggacatccagcaggagatcaccgtgctgagccagtgcgacagcagctacgtgaccaagtactacggcagctacctgaagggcagcaagctgtggatcatcatggagtacctgggcggcggcagcgccctggacctgctgagagccggccccttcgacgagttccagatcgccaccatgctgaaggagatcctgaagggcctggactacctgcacagcgagaagaagatccacagagacatcaaggccgccaacgtgctgctgagcgagcagggcgacgtgaagctggccgacttcggcgtggccggccagctgaccgacacccagatcaagagaaacaccttcgtgggcacccccttctggatggcccccgaggtgatccagcagagcgcctacgacagcaagagacccaccgccaaggagctgctgaagcacaagttcatcgtgaagaacagcaagaagaccagctacctgaccgagctgatcgacagattcaagagatggaaggccgagggccacagcgacgacgagagcgacagcgagggcagcgacagcgagagcaccagcagagagaacaacacccaccccgagtggagcttcaccaccgtgagaaagaagcccgaccccaagaaggtgcagaacggcgccgagcaggacctggtgcagaccctgagctgcctgagcatgatcatcacccccgccttcgccgagctgaagcagcaggacgagaacaacgccagcagaaaccaggccatcgaggagctggagaagagcatcgccgtggccgaggccgcctgccccggcatcaccgacaagatggtgaagaagctgatcgagaagttccagaagtgcagcgccgacgagagcccctag

SEQ ID NO: 12845 - DNA, 522 bp, synthetic construct; identical to SEQ ID NO: 12809
  source 1..522: mol_type = other DNA; note = Synthetic coding sequence

SEQ ID NO: 12846 - DNA, 801 bp, synthetic construct
  source 1..801: mol_type = other DNA; note = Synthetic coding sequence
tgacccagagccgccgccagagtgagagccgccggcgaggccctggagagaagaagaagatggctgggcagactgagccccagcgcccccagacccagaagagccagacccagcctgagaagagccagcgcctgggtgagagacagagtggccggcagacccggcgccctgcccggcttccaggccagcggcgtggccggcgaggcccagaaggcccccggccaccccgccgcccccgcccccgccgccagctgcctgaccgaggccgacggcagagtgttcctgcacgccttcagactggccctgatccagctgcagatcagcagcatcaagagcgacaacgtgaccagagcctgcagcttcatcagagaggccgccacccagggcgccaagatcgtgagcctgcccgagtgcttcaacagcccctacggcgccaagtacttccccgagtacgccgagaagatccccggcgagagcacccagaagctgagcgaggtggccaaggagtgcagcatctacctgatcggcggcagcatccccgaggaggacgccggcaagctgtacaacacctgcgccgtgttcggccccgacggcaccctgctggccaagtacagaaagatccacctgttcgacatcgacgtgcccggcaagatcaccttccaggagagcaagaccctgagccccggcgacagcttcagcaccttcgacaccccctactgcagagtgggcctgggcatctgctacgacatgagattcgccgagctggcccagatctacgcccagagaggcgaggccgtgtag

SEQ ID NO: 12847 - DNA, 216 bp, synthetic construct
  source 1..216: mol_type = other DNA; note = Synthetic coding sequence
atggacagcctgcccgacgagttcttcgtgagacaccccgccgtggaggaccagagaaaggaggagaccgagaacaagctggagaagagcagcggccagctgaacaagcaggagaacgacatccccaccgacctggtgcccgtgaacctgctgctggaggtgaagaagctgctgaacgccatcaacaccctgcccaagggcgtggtgccccactag

SEQ ID NO: 12848 - DNA, 2130 bp, synthetic construct
  source 1..2130: mol_type = other DNA; note = Synthetic coding sequence
atgagcgtggagagcgagcagctgaccggcgtgcccctggacgacagcgccatcacccccatgtgcgaggtgaccggcggcagaagctacagcgtgtgcagccccagaatgctgaaccagtgcctggagagcctggtgcagaaggtgcagagcggcgtggtgatcaacttcgagaaggccggccccgaccccagccccgtggaggacggccagcccgacatcagcagacccttcggcagccagccctggcacagctgccacaagctgatctacgtgagacccaaccccaagaccggcgtgcccatcggccactggcccgtgcccgagagcttctggcccgaccagaacagccccaccctgccccccagaaccagccaccccgtggtgaagttcagctgcaccgactgcgagcccatggtgatcgacaagctgcccttcgacaagtacgagctggagcccagccccctgacccagttcatcctggagagaaagagcccccagacctgctggcaggtgtacgtgagcaacagcgccaagtacagcgagctgggccaccccttcggctacctgaaggccagcaccgccctgaactgcgtgaacctgttcgtgatgccctacaactaccccgtgctgctgcccctgctggacgacctgttcaaggtgcacaaggccaagcccaccctgaagtggagacagagcttcgagagctacctgaagaccatgcccccctactacctgggccccctgaagaaggccgtgagaatgatgggcgcccccaacctgatcgccgacagcatggagtacggcctgagctacagcgtgatcagctacctgaagaagctgagccagcaggccaagatcgagagcgacagagtgatcggcagcgtgggcaagaaggtggtgcaggagaccggcatcaaggtgagaagcagaagccacggcctgagcatggcctacagaaaggacttccagcagctgctgcagggcatcagcgaggacgtgccccacagactgctggacctgaacatgaaggagtacaccggcttccaggtggccctgctgaacaaggacctgaagccccagaccttcagaaacgcctacgacatccccagaagaaacctgctggaccacctgaccagaatgagaagcaacctgctgaagagcaccagaagattcctgaagggccaggacgaggaccaggtgcacagcgtgcccatcgcccagatgggcaactaccaggagtacctgaagcaggtgcccagccccctgagagagctggaccccgaccagcccagaagactgcacaccttcggcaaccccttcaagctggacaagaagggcatgatgatcgacgaggccgacgagttcgtggccggcccccagaacaagcacaagagacccggcgagcccaacatgcagggcatccccaagagaagaagatgcatgagccccctgctgagaggcagacagcagaaccccgtggtgaacaaccacatcggcggcaagggcccccccgcccccaccacccaggcccagcccgacctgatcaagcccctgcccctgcacaagatcagcgagaccaccaacgacagcatcatccacgacgtggtggagaaccacgtggccgaccagctgagcagcgacatcacccccaacgccatggacaccgagttcagcgccagcagccccgccagcctgctggagagacccaccaaccacatggaggccctgggccacgaccacctgggcaccaacgacctgaccgtgggcggcttcctggagaaccacgaggagcccagagacaaggagcagtgcgccgaggagaacatccccgccagcagcctgaacaagggcaagaagctgatgcactgcagaagccacgaggaggtgaacaccgagctgaaggcccagatcatgaaggagatcagaaagcccggcagaaagtacgagagaatcttcaccctgctgaagcacgtgcagggcagcctgcagaccagactgatcttcctgcagaacgtgatcaaggaggccagcagattcaagaagagaatgctgatcgagcagctggagaacttcctggacgagatccacagaagagccaaccagatcaaccacatcaacagcaactag

SEQ ID NO: 12849 - DNA, 387 bp, synthetic construct
  source 1..387: mol_type = other DNA; note = Synthetic coding sequence
atggccagcagcaacaccgtgctgatgagactggtggccagcgcctacagcatcgcccagaaggccggcatgatcgtgagaagagtgatcgccgagggcgacctgggcatcgtggagaagacctgcgccaccgacctgcagaccaaggccgacagactggcccagatgagcatctgcagcagcctggccagaaagttccccaagctgaccatcatcggcgaggaggacctgcccagcgaggaggtggaccaggagctgatcgaggacagccagtgggaggagatcctgaagcagccctgccccagccagtacagcgccatcaaggaggaggacctggtggtgtgggtggaccccctggacggcaccaaggagtacaccgagggctag

SEQ ID NO: 12850 - DNA, 237 bp, synthetic construct; identical to SEQ ID NO: 9623
  source 1..237: mol_type = other DNA; note = Synthetic coding sequence

SEQ ID NO: 12851 - DNA, 171 bp, synthetic construct
  source 1..171: mol_type = other DNA; note = Synthetic coding sequence
atggtgatggagaagcccagccccctgctggtgggcagagagttcgtgagacagtactacaccctgctgaacaaggcccccgagtacctgcacagattctacggcagaaacagcagctacgtgcacggcggcgtggacgccagcggcaagccccaggaggccgtgtactag

SEQ ID NO: 12852 - DNA, 357 bp, synthetic construct
  source 1..357: mol_type = other DNA; note = Synthetic coding sequence
atgaagatcttcgtgggcaacgtggacggcgccgacaccacccccgaggagctggccgccctgttcgccccctacggcaccgtgatgagctgcgccgtgatgaagcagttcgccttcgtgcacatgagagagaacgccggcgccctgagagccatcgaggccctgcacggccacgagctgagacccggcagagccctggtggtggagatgagcagacccagacccctgaacacctggaagatcttcgtgggcaacgtgagcgccgcctgcaccagccaggagctgagaagcctgttcgagagaagaggcagagtgatcgagtgcgacgtggtgaagggcggcatgtgcgtgggctag

SEQ ID NO: 12853 - DNA, 438 bp, synthetic construct
  source 1..438: mol_type = other DNA; note = Synthetic coding sequence
atgagcagccccagagacttcagagccgagcccgtgaacgactacgagggcaacgacagcgaggccgaggacctgaacttcagagagaccctgcccagcagcagccaggagaacacccccagaagcaaggtgttcgagaacaaggtgaacagcgagaaggtgaagctgagcctgagaaacttcccccacaacgactacgaggacgtgttcgaggagcccagcgagagcggcagcgaccccagcatgtggaccgccagaggccccttcagaagagacagatggagcagcgaggacgaggaggccgccggccccagccaggccctgagccccctgctgagcgtgcagcaccacggctacagcggccccaacgagagaaccaccttctggcacggcagcaacgagggcgccgtgagcctgctgctgagatactgcgcctag

SEQ ID NO: 12854 - DNA, 438 bp, synthetic construct; identical to SEQ ID NO: 11428
  source 1..438: mol_type = other DNA; note = Synthetic coding sequence

SEQ ID NO: 12855 - DNA, 444 bp, synthetic construct; identical to SEQ ID NO: 10203
  source 1..444: mol_type = other DNA; note = Synthetic coding sequence

SEQ ID NO: 12856 - DNA, 300 bp, synthetic construct
  source 1..300: mol_type = other DNA; note = Synthetic coding sequence
atggacgagagcgccctgctggacctgctggagtgccccgtgtgcctggagagactggacgccagcgccaaggtgctgccctgccagcacaccttctgcaagagatgcctgctgggcatcgtgggcagcagaaacgagctgagatgccccgagtgcagaaccctggtgggcagcggcgtggaggagctgcccagcaacatcctgctggtgagactgctggacggcatcaagcagagaccctggaagcccggccccggcggcggcagcggcaccaactgcaccaacgccctgagaagctag

SEQ ID NO: 12857 - DNA, 3675 bp, synthetic construct
  source 1..3675: mol_type = other DNA; note = Synthetic coding sequence
atggccctgagacccggcgccggcagcggcggcggcggcgccgccggcgccggcgccggcagcgccggcggcggcggcttcatgttccccgtggccggcggcatcagacccccccaggccggcctgatgcccatgcagcagcagggcttccccatggtgagcgtgatgcagcccaacatgcagggcatcatgggcatgaactacagcagccagatgagccagggccccatcgccatgcaggccggcatccccatgggccccatgcccgccgccggcatgccctacctgggccaggcccccttcctgggcatgagaccccccggcccccagtacacccccgacatgcagaagcagttcgccgaggagcagcagaagagattcgagcagcagcagaagctgctggaggaggagagaaagagaagacagttcgaggagcagaagcagaagctgagactgctgagcagcgtgaagcccaagaccggcgagaagagcagagacgacgccctggaggccatcaagggcaacctggacggcttcagcagagacgccaagatgcaccccacccccgccagccaccccaagaagcccggcgtgggcgtgttccccagccaggaccccgcccagcccagaatgcccccctggatctacaacgagagcctggtgcccgacgcctacaagaagatcctggagaccaccatgacccccaccggcatcgacaccgccaagctgtaccccatcctgatgagcagcggcctgcccagagagaccctgggccagatctgggccctggccaacagaaccacccccggcaagctgaccaaggaggagctgtacaccgtgctggccatgatcgccgtgacccagagaggcgtgcccgccatgagccccgacgccctgaaccagttccccgccgcccccatccccaccctgagcggcttcagcatgaccctgcccacccccgtgagccagcccaccgtgatccccagcggccccgccggcagcatgcccctgagcctgggccagcccgtgatgggcatcaacctggtgggccccgtgggcggcgccgccgcccaggccagcagcggcttcatccccacctaccccgccaaccaggtggtgaagcccgaggaggacgacttccaggacttccaggacgccagcaagagcggcagcctggacgacagcttcagcgacttccaggagctgcccgccagcagcaagaccagcaacagccagcacggcaacagcgcccccagcctgctgatgcccctgcccggcaccaaggccctgcccagcatggacaagtacgccgtgttcaagggcatcgccgccgacaagagcagcgagaacaccgtgccccccggcgaccccggcgacaagtacagcgccttcagagagctggagcagaccgccgagaacaagcccctgggcgagagcttcgccgagttcagaagcgccggcaccgacgacggcttcaccgacttcaagaccgccgacagcgtgagccccctggagccccccaccaaggacaagaccttcccccccagcttccccagcggcaccatccagcagaagcagcagacccaggtgaagaaccccctgaacctggccgacctggacatgttcagcagcgtgaactgcagcagcgagaagcccctgagcttcagcgccgtgttcagcaccagcaagagcgtgagcaccccccagagcaccggcagcgccgccaccatgaccgccctggccgccaccaagaccagcagcctggccgacgacttcggcgagttcagcctgttcggcgagtacagcggcctggcccccgtgggcgagcaggacgacttcgccgacttcatggccttcagcaacagcagcatcagcagcgagcagaagcccgacgacaagtacgacgccctgaaggaggaggccagccccgtgcccctgaccagcaacgtgggcagcaccgtgaagggcggccagaacagcaccgccgccagcaccaagtacgacgtgttcagacagctgagcctggagggcagcggcctgggcgtggaggacctgaaggacaacacccccagcggcaagagcgacgacgacttcgccgacttccacagcagcaagttcagcagcatcaacagcgacaagagcctgggcgagaaggccgtggccttcagacacaccaaggaggacagcgccagcgtgaagagcctggacctgcccagcatcggcggcagcagcgtgggcaaggaggacagcgaggacgccctgagcgtgcagttcgacatgaagctggccgacgtgggcggcgacctgaagcacgtgatgagcgacagcagcctggacctgcccaccgtgagcggccagcacccccccgccgccgacatcgaggacctgaagtacgccgccttcggcagctacagcagcaacttcgccgtgagcaccctgaccagctacgactggagcgacagagacgacgccacccagggcagaaagctgagccccttcgtgctgagcgccggcagcggcagccccagcgccaccagcatcctgcagaagaaggagaccagcttcggcagcagcgagaacatcaccatgaccagcctgagcaaggtgaccaccttcgtgagcgaggacgccctgcccgagaccaccttccccgccctggccagcttcaaggacaccatcccccagaccagcgagcagaaggagtacgagaacagagactacaaggacttcaccaagcaggacctgcccaccgccgagagaagccaggaggccacctgccccagccccgccagcagcggcgccagccaggagacccccaacgagtgcagcgacgacttcggcgagttccagagcgagaagcccaagatcagcaagttcgacttcctggtggccaccagccagagcaagatgaagagcagcgaggagatgatcaagagcgagctggccaccttcgacctgagcgtgcagggcagccacaagagaagcctgagcctgggcgacaaggagatcagcagaagcagccccagccccgccctggagcagcccttcagagacagaagcaacaccctgaacgagaagcccgccctgcccgtgatcagagacaagtacaaggacctgaccggcgaggtggaggagaacgagagatacgcctacgagtggcagagatgcctgggcagcgccctgaacgtgatcaagaaggccaacgacaccctgaacggcatcagcagcagcagcgtgtgcaccgaggtgatccagagcgcccagggcatggagtacctgctgggcgtggtggaggtgtacagagtgaccaagagagtggagctgggcatcaaggccaccgccgtgtgcagcgagaagctgcagcagctgctgaaggacatcgacaaggtgtggaacaacctgatcggcttcatgagcctggccaccctgacccccgacgagaacagcctggacttcagcagctgcatgctgagacccggcatcaagaacgcccaggagctggcctgcggcgtgtgcctgctgaacgtggacagcagaagcagagccttcaacagcgagaccgacagcttcaagctggcctacggcggccaccagtaccacgccagctgcgccaacttctggatcaactgcgtggagcccaagccccccggcctggtgctgcccgacctgctgtag

SEQ ID NO: 12858 - DNA, 354 bp, synthetic construct; identical to SEQ ID NO: 11388
  source 1..354: mol_type = other DNA; note = Synthetic coding sequence

SEQ ID NO: 12859 - DNA, 621 bp, synthetic construct; identical to SEQ ID NO: 11427
  source 1..621: mol_type = other DNA; note = Synthetic coding sequence

SEQ ID NO: 12860 - DNA, 582 bp, synthetic construct
  source 1..582: mol_type = other DNA; note = Synthetic coding sequence
atggaggagaccatcaaggacccccccaccagcgccgtgctgctggaccactgccacttcagccaggtgatcttcaacagcgtggagaagttctacatccccggcggcgacgtgacctgccactacaccttcacccagcacttcatccccagaagaaaggactggatcggcatcttcagagtgggctggaagaccaccagagagtactacaccttcatgtgggtgaccctgcccatcgacctgaacaacaagagcgccaagcagcaggaggtgcagttcaaggcctactacctgcccaaggacgacgagtactaccagttctgctacgtggacgaggacggcgtggtgagaggcgccagcatccccttccagttcagacccgagaacgaggaggacatcctggtggtgaccacccagggcgaggtggaggagatcgagcagcacaacaaggagctgtgcaaggagaaccaggagctgaaggacagctgcatcagcctgcagaagcagaacagcgacatgcaggccgagctgcagaagaagcaggaggagctggagaccctgcagagcatcaacaagaagtag

SEQ ID NO: 12861 - DNA, 156 bp, synthetic construct
  source 1..156: mol_type = other DNA; note = Synthetic coding sequence
atggacttcttcagcagccacctgctggccgacagcagcagccccgccaccaacagcagccacaccgacgcccacgagatcctggtgagcgacttcctggtgagcgacgagaacctgcagaagatggagaacgtgctggacctgtggagcagctag

SEQ ID NO: 12862 - DNA, 513 bp, synthetic construct
  source 1..513: mol_type = other DNA; note = Synthetic coding sequence
atgagcagcaacgagtgcttcaagtgcggcagaagcggccactgggccagagagtgccccaccggcggcggcagaggcagaggcatgagaagcagaggcagaggcttccagttcgtgagcagcagcctgcccgacatctgctacagatgcggcgagagcggccacctggccaaggactgcgacctgcaggaggacgcctgctacaactgcggcagaggcggccacatcgccaaggactgcaaggagcccaagagagagagagagcagtgctgctacaactgcggcaagcccggccacctggccagagactgcgaccacgccgacgagcagaagtgctacagctgcggcgagttcggccacatccagaaggactgcaccaaggtgaagtgctacagatgcggcgagaccggccacgtggccatcaactgcagcaagaccagcgaggtgaactgctacagatgcggcgagagcggccacctggccagagagtgcaccatcgaggccaccgcctag

SEQ ID NO: 12863 - DNA, 399 bp, synthetic construct
  source 1..399: mol_type = other DNA; note = Synthetic coding sequence
atgaaccaggaggacctggaccccgacagcaccaccgacgtgggcgacgtgaccaacaccgaggaggagctgatcagagagtgcgaggagatgtggaaggacatggaggagtgccagaacaagctgagcctgatcggcaccgagaccctgaccgacagcaacgcccagctgagcctgctgatcatgcaggtgaagtgcctgaccgccgagctgagccagtggcagaagaagacccccgagaccatccccctgaccgaggacgtgctgatcaccctgggcaaggaggagttccagaagctgagacaggacctggagatggtgctgagcaccaaggagagcaagaacgagaagctgaaggaggacctggagagagagcagagatggctggacgagcagtag

SEQ ID NO: 12864 - DNA, 1095 bp, synthetic construct
  source 1..1095: mol_type = other DNA; note = Synthetic coding sequence
atggtgaagctgttcatcggcaacctgcccagagaggccaccgagcaggagatcagaagcctgttcgagcagtacggcaaggtgctggagtgcgacatcatcaagaactacggcttcgtgcacatcgaggacaagaccgccgccgaggacgccatcagaaacctgcaccactacaagctgcacggcgtgaacatcaacgtggaggccagcaagaacaagagcaagaccagcaccaagctgcacgtgggcaacatcagccccacctgcaccaacaaggagctgagagccaagttcgaggagtacggccccgtgatcgagtgcgacatcgtgaaggactacgccttcgtgcacatggagagagccgaggacgccgtggaggccatcagaggcctggacaacaccgagttccagggcaagagaatgcacgtgcagctgagcaccagcagactgagaaccgcccccggcatgggcgaccagagcggctgctacagatgcggcaaggagggccactggagcaaggagtgccccatcgacagaagcggcagagtggccgacctgaccgagcagtacaacgagcagtacggcgccgtgagaaccccctacaccatgagctacggcgacagcctgtactacaacaacgcctacggcgccctggacgcctactacaagagatgcagagccgccagaagctacgaggccgtggccgccgccgccgccagcgtgtacaactacgccgagcagaccctgagccagctgccccaggtgcagaacaccgccatggccagccacctgaccagcaccagcctggacccctacgacagacacctgctgcccaccagcggcgccgccgccaccgccgccgccgccgccgccgccgccgccgccgtgaccgccgccagcaccagctactacggcagagacagaagccccctgagaagagccaccgcccccgtgcccaccgtgggcgagggctacggctacggccacgagagcgagctgagccaggccagcgccgccgccagaaacagcctgtacgacatggccagatacgagagagagcagtacgccgacagagccagatacagcgccttctag

SEQ ID NO: 12865 - DNA, 420 bp, synthetic construct
  source 1..420: mol_type = other DNA; note = Synthetic coding sequence
atggccaccggcgacctgaagagaagcctgagaaacctggagcaggtgctgagactgctgaactaccccgaggaggtggactgcgtgggcctgatcaagggcgaccccgccgccagcctgcccatcatcagctacagcttcaccagctacagcccctacgtgaccgagctgatcatggagagcaacgtggagctgatcgccaagaacgacctgagattcatcgacgccgtgtacaagctgctgagagaccagttcaactacaagcccatcctgaccaagaagcagttcatccagtgcggcttcgccgagtggaagatccagatcgtgtgcgacatcctgaactgcgtgatgaagaagcacaaggagctgagcagcctgcagaagatccccagccagcagagaaagaagatcagcagctag

SEQ ID NO: 12866 - DNA, 450 bp, synthetic construct
  source 1..450: mol_type = other DNA; note = Synthetic coding sequence
atggccaacatcgccgtgcagagaatcaagagagagttcaaggaggtgctgaagagcgaggaggtgagattcatcaccaagatctggcaccccaacatcagcagcgtgaccggcgccatctgcctggacatcctgaaggaccagtgggccgccgccatgaccctgagaaccgtgctgctgagcctgcaggccctgctggccgccgccgagcccgacgacccccaggacgccgtggtggccaaccagtacaagcagaaccccgagatgttcaagcagaccgccagactgtgggcccacgtgtacgccggcgcccccgtgagcagccccgagtacaccaagaagatcgagaacctgtgcgccatgggcttcgacagaaacgccgtgatcgtggccctgagcagcaagagctgggacgtggagaccgccaccgagctgctgctgagcaactag

SEQ ID NO: 12867 - DNA, 597 bp, synthetic construct
  source 1..597: mol_type = other DNA; note = Synthetic coding sequence
atggtgatggagaagcccagccccctgctggtgggcagagagttcgtgagacagtactacaccctgctgaacaaggcccccgagtacctgcacagattctacggcagaaacagcagctacgtgcacggcggcgtggacgccagcggcaagccccaggaggccgtgtacggccagaacgacatccaccacaaggtgctgagcctgaacttcagcgagtgccacaccaagatcagacacgtggacgcccacgccaccctgagcgacggcgtggtggtgcaggtgatgggcctgctgagcaacagcggccagcccgagagaaagttcatgcagaccttcgtgctggcccccgagggcagcgtgcccaacaagttctacgtgcacaacgacatgttcagatacgaggacgaggtgttcggcgacagcgagcccgagctggacgaggagagcgaggacgaggtggaggaggagcaggaggagagacagcccagccccgagcccgtgcaggagaacgccaacagcggctactacgaggcccaccccgtgaccaacggcatcgaggagcccctggaggagagcagccacgagcccgagccctag

SEQ ID NO: 12868 - DNA, 150 bp, synthetic construct
  source 1..150: mol_type = other DNA; note = Synthetic coding sequence
atgatgctgggcaccgagggcggcgagggcttcgtggtgaaggtgagaggcctgccctggagctgcagcgccgacgaggtgcagagattcttcagcgactgcaagatccagaacggcgcccagggcatcagattcatctacaccagatag

SEQ ID NO: 12869 - DNA, 1266 bp, synthetic construct; identical to SEQ ID NO: 11954
  source 1..1266: mol_type = other DNA; note = Synthetic coding sequence

SEQ ID NO: 12870 - DNA, 1173 bp, synthetic construct; identical to SEQ ID NO: 9682
  source 1..1173: mol_type = other DNA; note = Synthetic coding sequence

SEQ ID NO: 12871 - DNA, 390 bp, synthetic construct
  source 1..390: mol_type = other DNA; note = Synthetic coding sequence
atgaagagaggcagactgcccagcagcagcgaggacagcgacgacaacggcagcctgagcaccacctggagccagaacagcagaagccagcacagaagaagcagctgcagcagacacgaggacagaaagcccagcgaggtgttcagaaccgacctgatcaccgccatgaagctgcacgacagctaccagctgaaccccgacgagtactacgtgctggccgacccctggagacaggagtgggagaagggcgtgcaggtgcccgtgagccccggcaccatcccccagcccgtggccagagtggtgagcgaggagaagagcctgatgttcatcagacccaagaagtacatcgtgagcagcggcagcgagccccccgagctgggctacgtgtag

SEQ ID NO: 12872 - DNA, 489 bp, synthetic construct
  source 1..489: mol_type = other DNA; note = Synthetic coding sequence
atggacttcttcagcagccacctgctggccgacagcagcagccccgccaccaacagcagccacaccgacgcccacgagatcctggtgagcgacttcctggtgagcgacgagaacctgcagaagatggagaacgtgctggacctgtggagcagcggcctgaagaccaacatcatcagcgagctgagcaagtggagactgaacttcatcgactggcacagaatggagatgagaaaggagaaggagaagcacgccgcccacctgaagcagctgtgcaaccagatcaacgagctgaaggagctgcagaagaccttcgagatcagcatcggcagaaaggacgaggtgatcagcagcctgagccacgccatcggcaagcagaaggagaagatcgagctgatgagaaccttcttccactggagaatcggccacgtgagagccagacaggacgtgtacgagggcaagctggccgaccagtactaccagagaacctag

SEQ ID NO: 12873 - DNA, 411 bp, synthetic construct
  source 1..411: mol_type = other DNA; note = Synthetic coding sequence
atgatcgtgaacgactacgagggcaacgacagcgaggccgaggacctgaacttcagagagaccctgcccagcagcagccaggagaacacccccagaagcaaggtgttcgagaacaaggtgaacagcgagaaggtgaagctgagcctgagaaacttcccccacaacgactacgaggacgtgttcgaggagcccagcgagagcggcagcgaccccagcatgtggaccgccagaggccccttcagaagagacagatggagcagcgaggacgaggaggccgccggccccagccaggccctgagccccctgctgagcgtgcagcaccacggctacagcggccccaacgagagaaccaccttctggcacggcagcaacgagggcgccgtgagcctgctgctgagatactgcgcctag

SEQ ID NO: 12874 - DNA, 321 bp, synthetic construct
  source 1..321: mol_type = other DNA; note = Synthetic coding sequence
atggccagccagctgcaggtgttcagcccccccagcgtgagcagcagcgccttctgcagcgccaagaagctgaagatcgagcccagcggctgggacgtgagcggccagagcagcaacgacaagtactacacccacagcaagaccctgcccgccacccagggccaggccaacagcagccaccaggtggccaacttcaacatccccgcctacgaccagggcctgctgctgcccgcccccgccgtggagcacatcgtggtgaccgccgccgacagcagcggcagcgccgccaccagcaccttccagagcagccagaccctgtag

SEQ ID NO: 12875 - DNA, 411 bp, synthetic construct
  source 1..411: mol_type = other DNA; note = Synthetic coding sequence
atgaagagaggcagactgcccagcagcagcgaggacagcgacgacaacggcagcctgagcaccacctggagccagaacagcagaagccagcacagaagaagcagctgcagcagacacgaggacagaaagcccagcgaggtgttcagaaccgacctgatcaccgccatgaagctgcacgacagctaccagctgaaccccgacgagtactacgtgctggccgacccctggagacaggagtgggagaagggcgtgcaggtgcccgtgagccccggcaccatcccccagcccgtggccagagtggtgagcgaggagaagagcctgatgttcatcagacccaagaagtacatcgtgagcagcggcagcgagccccccgagctgggctacgtggacatcagaaccctggccgactag

SEQ ID NO: 12876 - DNA, 396 bp, synthetic construct
  source 1..396: mol_type = other DNA; note = Synthetic coding sequence
atggaggacggcacccccaagcacatcatccagatgaccggcttcaagatggaggagaaggaggccctggtgaagctgctgctgaagctggactgcaccttcatcaagagcgagaagtacaagaactgcacccacctgatcgccgagagactgtgcaagagcgagaagttcctggccgcctgcgccgccggcaagtggatcctgaccaaggactacatcatccacagcgccaagagcggcagatggctggacgagaccacctacgagtggggctacaagatcgagaaggacagcagatacagcccccagatgcagagcgcccccaagagatggagagaggagctgaagagaaccggcgcccccggcgccttccacagatggaaggtggtgctgtag

SEQ ID NO: 12877 - DNA, 1668 bp, synthetic construct; identical to SEQ ID NO: 9476
  source 1..1668: mol_type = other DNA; note = Synthetic coding sequence

SEQ ID NO: 12878 - DNA, 1635 bp, synthetic construct; identical to SEQ ID NO: 10420
  source 1..1635: mol_type = other DNA; note = Synthetic coding sequence

SEQ ID NO: 12879 - DNA, 393 bp, synthetic construct
  source 1..393: mol_type = other DNA; note = Synthetic coding sequence
atgggcagactggacggcaaggtgatcatcctgaccgccgccgcccagggcatcggccaggccgccgccctggccttcgccagagagggcgccaaggtgatcgccaccgacatcaacgagagcaagctgcaggagctggagaagtaccccggcatccagaccagagtgctggacgtgaccaagaagaagcagatcgaccagttcgccaacgaggtggagagactggacgtgctgttcaacgtggccggcttcgtgcaccacggcaccgtgctggactgcgaggagaaggactgggacttcagcatgaacctgaacgtgagaagcatgtacctgatgatcaaggccttcctgcccaagatgctggcccagaagagcggcaacatcatcaactag

SEQ ID NO: 12880 - DNA, 1119 bp, synthetic construct
  source 1..1119: mol_type = other DNA; note = Synthetic coding sequence
atgcagggccccgccggcaacgccagcagaggcctgcccggcggcccccccagcaccgtggccagcggcgccggcagatgcgagagcggcgccctgatgcacagcttcggcatcttcctgcagggcctgctgggcgtggtggccttcagcaccctgatgctgaagagattcagagagcccaagcacgagagaagaccctggagaatctggttcctggacaccagcaagcaggccatcggcatgctgttcatccacttcgccaacgtgtacctggccgacctgaccgaggaggacccctgcagcctgtacctgatcaacttcctgctggacgccaccgtgggcatgctgctgatctacgtgggcgtgagagccgtgagcgtgctggtggagtggcagcagtgggagagcctgagattcggcgagtacggcgaccccctgcagtgcggcgcctgggtgggccagtgcgccctgtacatcgtgatcatgatcttcgagaagagcgtggtgttcatcgtgctgctgatcctgcagtggaagaaggtggccctgctgaaccccatcgagaaccccgacctgaagctggccatcgtgatgctgatcgtgcccttcttcgtgaacgccctgatgttctgggtggtggacaacttcctgatgagaaagggcaagaccaaggccaagctggaggagagaggcgccaaccaggacagcagaaacggcagcaaggtgagatacagaagagccgccagccacgaggagagcgagagcgagatcctgatcagcgccgacgacgagatggaggagagcgacgtggaggaggacctgagaagactgacccccctgaagcccgtgaagaagaagaagcacagattcggcctgcccgccggcgcccaggaggcccccatcaagaagaagagaccccccgtgaaggacgaggacctgaagggcgccagaggcaacctgaccaagaaccaggagatcaagagcaagacctaccaggtgatgagagagtgcgagcaggccggcagcgccgcccccagcgtgttcagcagaaccagaaccggcaccgagaccgtgttcgagaagcccaaggccggccccaccaagagcgtgttcggctag

SEQ ID NO: 12881 - DNA, 507 bp, synthetic construct
  source 1..507: mol_type = other DNA; note = Synthetic coding sequence
atgatgctgggcaccgagggcggcgagggcttcgtggtgaaggtgagaggcctgccctggagctgcagcgccgacgaggtgcagagattcttcagcgactgcaagatccagaacggcgcccagggcatcagattcatctacaccagagagggcagacccagcggcgaggccttcgtggagctggagagcgaggacgaggtgaagctggccctgaagaaggacagagagaccatgggccacagatacgtggaggtgttcaagagcaacaacgtggagatggactgggtgctgaagcacaccggccccaacagccccgacaccgccaacgacggcttcgtgagactgagaggcctgcccttcggctgcagcaaggaggagatcgtgcagttcttcagcggcctggagatcgtgcccaacggcatcaccctgcccgtggacttccagggcagaagcaccggcgaggccttcgtgcagttcgccagccaggagatcgccgagaaggcctag

SEQ ID NO: 12882 - skipped

SEQ ID NO: 12883 - DNA, 1131 bp, synthetic construct
  source 1..1131: mol_type = other DNA; note = Synthetic coding sequence
atgaccaccgtggtggtgcacgtggacagcaaggccgagctgaccaccctgctggagcagtgggagaaggagcacggcagcggccaggacatggtgcccatcctgaccagaatgagccagctgatcgagaaggagaccgaggagtacagaaagggcgaccccgaccccttcgacgacagacaccccggcagagccgaccccgagtgcatgctgggccacctgctgagaatcctgttcaagaacgacgacttcatgaacgccctggtgaacgcctacgtgatgaccagcagagagccccccctgaacaccgccgcctgcagactgctgctggacatcatgcccggcctggagaccgccgtggtgttccaggagaaggagggcatcgtggagaacctgttcaagtgggccagagaggccgaccagcccctgagaacctacagcaccggcctgctgggcggcgccatggagaaccaggacatcgccgccaactacagagacgagaacagccagctggtggccatcgtgctgagaagactgagagagctgcagctgcaggaggtggccctgagacaggagaacaagagacccagccccagaaagctgagcagcgagcccctgctgcccctggacgaggaggccgtggacatggactacggcgacatggccgtggacgtggtggacggcgaccaggaggaggccagcggcgacatggagatcagcttccacctggacagcggccacaagaccagcagcagagtgaacagcaccaccaagcccgaggacggcggcctgaagaagaacaagagcgccaagcagggcgacagagagaacttcagaaaggccaagcagaagctgggcttcagcagcagcgaccccgacagaatgttcgtggagctgagcaacagcagctggagcgagatgagcccctgggtgatcggcaccaactacaccctgtaccccatgacccccgccatcgagcagagactgatcctgcagtacctgacccccctgggcgagtaccaggagctgctgcccatcttcatgcagctgggcagcagagagctgatgatgttctacatcgacctgaagcagaccaacgacgtgctgctgaccttcgaggccctgaagtag

SEQ ID NO: 12884 - DNA, 504 bp, synthetic construct
  source 1..504: mol_type = other DNA; note = Synthetic coding sequence
atgagcagcaacgagtgcttcaagtgcggcagaagcggccactgggccagagagtgccccaccggcggcggcagaggcagaggcatgagaagcagaggcagaggcggcttcaccagcgacagagacatctgctacagatgcggcgagagcggccacctggccaaggactgcgacctgcaggaggacgcctgctacaactgcggcagaggcggccacatcgccaaggactgcaaggagcccaagagagagagagagcagtgctgctacaactgcggcaagcccggccacctggccagagactgcgaccacgccgacgagcagaagtgctacagctgcggcgagttcggccacatccagaaggactgcaccaaggtgaagtgctacagatgcggcgagaccggccacgtggccatcaactgcagcaagaccagcgaggtgaactgctacagatgcggcgagagcggccacctggccagagagtgcaccatcgaggccaccgcctag

SEQ ID NO: 12885 - DNA, 999 bp, synthetic construct; identical to SEQ ID NO: 10468
  source 1..999: mol_type = other DNA; note = Synthetic coding sequence

SEQ ID NO: 12886 - DNA, 615 bp, synthetic construct
  source 1..615: mol_type = other DNA; note = Synthetic coding sequence
atgagcgacctgagaatcaccgaggccttcctgtacatggactacctgtgcttcagagccctgtgctgcaagggccccccccccgccagacccgagtacgacctggtgtgcatcggcctgaccggcagcggcaagaccagcctgctgagcaagctgtgcagcgagagccccgacaacgtggtgagcaccaccggcttcagcatcaaggccgtgcccttccagaacgccatcctgaacgtgaaggagctgggcggcgccgacaacatcagaaagtactggagcagatactaccagggcagccagggcgtgatcttcgtgctggacagcgccagcagcgaggacgacctggaggccgccagaaacgagctgcacagcgccctgcagcacccccagctgtgcaccctgcccttcctgatcctggccaaccaccaggacaagcccgccgccagaagcgtgcaggagatcaagaagtacttcgagctggagcccctggccagaggcaagagatggatcctgcagccctgcagcctggacgacatggacgccctgaaggacagcttcagccagctgatcaacctgctggaggagaaggaccacgaggccgtgagaatgtag

SEQ ID NO: 12887 - DNA, 6315 bp, synthetic construct
  source 1..6315: mol_type = other DNA; note = Synthetic coding sequence
atggagagccaggagttcatcgtgctgtacacccaccagaagatgaagaagagcaaggtgtggcaggacggcatcctgaagatcacccacctgggcaacaaggccatcctgtacgacgacaagggcgcctgcctggagagcctgttcctgaagtgcctggaggtgaagcccggcgacgacctggagagcgacagatacctgatcaccgtggaggaggtgaaggtggccggcgccatcggcatcgtgaagcagaacgtgaacaaggaggcccccgagctgaacagcagaaccttcatcagcagcggcagaagcctgggctgccagcccagcggcctgaagagaaagttcaccggcttccagggccccagacaggtgcccaagaagatggtgatcatggagagcggcgagagcgccgccagccacgaggccaagaagaccggccccaccatcttcagccccttctgcagcatgccccccctgttccccaccgtgggcaagaaggacgtgaacaacatcctggccgaccccgagaacatcgtgacctacaagaacagagagagaaacgccatggacttcagcagcgtgttcagccccagcttccagatcaaccccgaggtgctgtgcgaggagaactacttctgcagccccgtgaacagcggcaacaagctgagcgacagcctgctgaccaacgagcccgtgaagagagacagcctggccagccactacagcggcgtgagccagaacatcagaagcaaggcccagatcctggccctgctgaagagcgagagcagcagcagctgcgaggagctgaacagcgagatgaccgagcacttcccccagaagcagccccagggcagcctgaagatcgccaccaagcccaagtacctgatccagcaggaggagtgcgccgagatgaagagcaccgagaacctgtactaccagcaccagagcgagaacaccatgagaaacaagagcagatgggccatgtacctgagcagccagagcagccccatccacagcagcaccgtggacggcaacgacaccgagagaaagcccaaggcccaggaggacgacgtgaacagcaacctgaaggacctgagcctgcagaagatcatccagttcgtggagacctacgccgaggagagaaagaagtacaacgtggaccagagcgtgggcaacaacgaccccagctggaaccaggaggtgaagctggagatccccagcttcaacgagagcagcagcctgcaggtgacctgcagcagcgccgagaacgacggcatcctgagcgagagcgacatccaggaggacaacaagatccccttcaaccagaacgacaagggctgcatcaagggcagcgtgctgatcaaggagaacgcccaggaggtgaacacctgcggcaccctggagaaggagtacgagcagagcgagagcagcctgcccgagctgaagcacctgcagatcgagagcagcaacaacagcagaatcagcgacgacatcaccgacatgatcagcgagagcaagatggacaacgagagcctgaacagcatccacgagagcctgagcaacgtgacccagcccttcctggaggtgaccttcaacctgaacaacttcgagaccagcgacaccgaggaggagagccaggagagcaacaagatcagccaggacagcgagagctgggtgaaggacatcctggtgaacgacggcaacagctgcttccagaagagaagcgagaacaccaactgcgaggagatcgagggcgagcacctgcccttcctgaccagcgtgagcgacaagcccaccgtgaccttccccgtgaaggagaccctgcccagccagttctgcgacaagacctacgtgggcttcgacatgggcatctgcaagaccgagaacaccggcaaggagatcgaggagtacagcgacaccctgagcaacttcgagagcttcaagtggaccgacgccgtgtacggcgacaacaaggaggacgccaacaagcccatccaggaggtgagaatcaactacgacttcgccctgccccccaacaagagcaagggcatcaacatgaacctgcacatcccccacatccagaaccagatcgccgagaacagcaacctgttcagcgaggacgcccagccccagcccttcatcctgggcagcgacctggacaagaacgacgagcacgtgctgcccagcaccagcagcagcgacaacagcgtgcagctgctgaacaccaaccagaaccactacgagtgcatcgccctggacaagagcaacacccacatcagcaacagcctgttctaccccctgggcaagaagcacctgatcagcaaggacaccgaggcccacatcagcgagcccgaggacctgggcaagatcagaagccccccccccgaccacgtggaggtggagaccgccagagagggcaagcagtactggaaccccagaaacagcagcgagctgagcggcctggtgaacaccatcagcatcctgaagagcctgtgcgagcacagcaccgccctggacagcctggagatcctgaagaagaagaacaccgtgttccagcagggcacccagcagacctacgagcccgacagcccccccgaggtgagaaagcccttcatcaccgtggtgagccccaagagcccccacctgcacaaggacagccagcagatcctgaaggaggacgaggtggagctgagcgagcccctgcagagcgtgcagttcagcagcagcggcagcaaggaggagaccgccttccaggccgtgatccccaagcagatcgagagaaagacctgcgaccccaagcccgtggagttccagggccaccaggtgaagggcagcgccaccagcggcgtgatggtgagaggccacagcagccagctgggctgcagccagttccccgacagcaccgagtacgagaacttcatgaccgagacccccgagctgcccagcacctgcatgcagatcgacttcctgcaggtgaccagccccgaggagaacatcagcaccctgagccccgtgagcaccttcagcctgaacagcagagacgaggacttcatggtggagttcagcgagaccagcctgaaggccagaaccctgcccgacgacctgcacttcctgaacctggagggcatgaagaagagcagaagcctggagaacgagaacctgcagagactgagcctgctgagcagaacccaggtgcccctgatcaccctgcccagaaccgacggcccccccgacctggacagccacagctacatgatcaacagcaacacctacgagagcagcggcagccccatgctgaacctgtgcgagaagagcgccgtgctgagcttcagcatcgagcccgaggaccagaacgagaccttcttcagcgaggagagcagagaggtgaaccccggcgacgtgagcctgaacaacatcagcacccagagcaagtggctgaagtaccagaacaccagccagtgcaacgtggccacccccaacagagtggacaagagaatcaccgacggcttcttcgccgaggccgtgagcggcatgcacttcagagacaccagcgagagacagagcgacgccgtgaacgagagcagcctggacagcgtgcacctgcagatgatcaagggcatgctgtaccagcagagacaggacttcagcagccaggacagcgtgagcagaaagaaggtgctgagcctgaacctgaagcagaccagcaagaccgaggagatcaagaacgtgctgggcggcagcacctgctacaactacagcgtgaaggacctgcaggagatcagcggcagcgagctgtgcttccccagcggccagaagatcaagagcgcctacctgccccagagacagatccacatccccgccgtgttccagagccccgcccactacaagcagaccttcaccagctgcctgatcgagcacctgaacatcctgctgttcggcctggcccagaacctgcagaaggccctgagcaaggtggacatcagcttctacaccagcctgaagggcgagaagctgaagaacgccgagaacaacgtgcccagctgccaccacagccagcccgccaagctggtgatggtgaagaaggagggccccaacaagggcagactgttctacacctgcgacggccccaaggccgacagatgcaagttcttcaagtggctggaggacgtgacccccggctacagcacccaggagggcgccagacccggcatggtgctgagcgacatcaagagcatcggcctgtacctgagaagccagaagatccccctgtacgaggagtgccagctgctggtgagaaagggcttcgacttccagagaaagcagtacggcaagctgaagaagttcaccaccgtgaaccccgagttctacaacgagcccaagaccaagctgtacctgaagctgagcagaaaggagagaagcagcgcctacagcaagaacgacctgtgggtggtgagcaagaccctggacttcgagctggacaccttcatcgcctgcagcgccttcttcggccccagcagcatcaacgagatcgagatcctgcccctgaagggctacttccccagcaactggcccaccaacatggtggtgcacgccctgctggtgtgcaacgccagcaccgagctgaccaccctgaagaacatccaggactacttcaaccccgccaccctgcccctgacccagtacctgctgaccaccagcagccccaccatcgtgagcaacaagagagtgagcaagagaaagttcatcccccccgccttcaccaacgtgagcaccaagttcgagctgctgagcctgggcgccaccctgaagctggccagcgagctgatccaggtgcacaagctgaacaaggaccaggccaccgccctgatccagatcgcccagatgatggccagccacgagagcatcgaggaggtgaaggagctgcagacccacaccttccccatcaccatcatccacggcgtgttcggcgccggcaagagctacctgctggccgtggtgatcctgttcttcgtgcagctgttcgagaagagcgaggcccccaccatcggcaacgccagaccctggaagctgctgatcagcagcagcaccaacgtggccgtggacagagtgctgctgggcctgctgagcctgggcttcgagaacttcatcagagtgggcagcgtgagaaagatcgccaagcccatcctgccctacagcctgcacgccggcagcgagaacgagagcgagcagctgaaggagctgcacgccctgatgaaggaggacctgacccccaccgagagagtgtacgtgagaaagagcatcgagcagcacaagctgggcaccaacagaaccctgctgaagcaggtgagagtggtgggcgtgacctgcgccgcctgccccttcccctgcatgaacgacctgaagttccccgtggtggtgctggacgagtgcagccagatcaccgagcccgccagcctgctgcccatcgccagattcgagtgcgagaagctgatcctggtgggcgaccccaagcagctgccccccaccatccagggcagcgacgccgcccacgagaacggcctggagcagaccctgttcgacagactgtgcctgatgggccacaagcccatcctgctgagaacccagtacagatgccaccccgccatcagcgccatcgccaacgacctgttctacaagggcgccctgatgaacggcgtgaccgagatcgagagaagccccctgctggagtggctgcccaccctgtgcttctacaacgtgaagggcctggagcagatcgagagagacaacagcttccacaacgtggccgaggccaccttcaccctgaagctgatccagagcctgatcgccagcggcatcgccggcagcatgatcggcgtgatcaccctgtacaagagccagatgtacaagctgtgccacctgctgagcgccgtggacttccaccaccccgacatcaagaccgtgcaggtgagcaccgtggacgccttccagggcgccgagaaggagatcatcatcctgagctgcgtgagaaccagacaggtgggcttcatcgacagcgagaagagaatgaacgtggccctgaccagaggcaagagacacctgctgatcgtgggcaacctggcctgcctgagaaagaaccagctgtggggcagagtgatccagcactgcgagggcagagaggacggcctgcagcacgccaaccagtacgagccccagctgaaccacctgctgaaggactacttcgagaagcaggtggaggagaagcagaagaagaagagcgagaaggagaagagcaaggacaagagccacagctag

SEQ ID NO: 12888 - DNA, 567 bp, synthetic construct
  source 1..567: mol_type = other DNA; note = Synthetic coding sequence
atggccgccaccgccagagaggacggcgccagcggccaggagagaggccagagaggctgcgagcactacgacagaggctgcctgctgaaggccccctgctgcgacaagctgtacacctgcagactgtgccacgacaacaacgaggaccaccagctggacagattcaaggtgaaggaggtgcagtgcatcaactgcgagaagatccagcacgcccagcagacctgcgaggagtgcagcaccctgttcggcgagtactactgcgacatctgccacctgttcgacaaggacaagaagcagtaccactgcgagaactgcggcatctgcagaatcggccccaaggaggacttcttccactgcctgaagtgcaacctgtgcctggccatgaacctgcagggcagacacaagtgcatcgagaacgtgagcagacagaactgccccatctgcctggaggacatccacaccagcagagtggtggcccacgtgctgccctgcggccacctgctgcacagaacctgctacgaggagatgctgaaggagtacgaccaggtgctggagaccgccggctag

SEQ ID NO: 12889 - DNA, 339 bp, synthetic construct
  source 1..339: mol_type = other DNA; note = Synthetic coding sequence
atggccaccggcgacctgaagagaagcctgagaaacctggagcaggtgctgagactgctgaactaccccgaggaggtggactgcgtgggcctgatcaagggcgaccccgccgccagcctgcccatcatcagctacagcttcaccagctacagcccctacgtgaccgagctgatcatggagagcaacgtggagctgatcgccaagaacgacctgagattcatcgacgccgtgtacaagctgctgagagaccagttcaactacaagcccatcctgaccaagaagcagttcatccagtgcggcttcgccgagtggaagatccagatcgtgtgcgacatctag

SEQ ID NO: 12890 - DNA, 363 bp, synthetic construct
  source 1..363: mol_type = other DNA; note = Synthetic coding sequence
atgtggaaggtggtgaacctgcccaccgacctgttcaacagcgtgatgaacgtgggcagattcaccgaggagatcgagtggctgaagttcctggccctggcctgcagcgccctgggcgtgaccatcaccaagaccctgaagatcgtgtgcgaggtgctgagctgcgaccacaacggcggcctgcccagaatccccttcagcaccttccagttcctgtacacctacatcgccgaggtggacggcgagatctgcgccagccacgtgagcagaatgctgaactacatcgagcaggaggtgatcggccccgacggcctgatcaccgtgaacgacttcacccagaaccccagagtgtggctggagtag

SEQ ID NO: 12891 - DNA, 2490 bp, synthetic construct
  source 1..2490: mol_type = other DNA; note = Synthetic coding sequence
atggccaagtacaacaccggcggcaaccccaccgaggacgtgagcgtgaacagcagacccttcagagtgaccggccccaacagcagcagcggcatccaggccagaaagaacctgttcaacaaccagggcaacgccagcccccccgccggccccagcaacgtgcccaagttcggcagccccaagccccccgtggccgtgaagcccagcagcgaggagaagcccgacaaggagcccaagccccccttcctgaagcccaccggcgccggccagagattcggcacccccgccagcctgaccaccagagaccccgaggccaaggtgggcttcctgaagcccgtgggccccaagcccatcaacctgcccaaggaggacagcaagcccaccttcccctggccccccggcaacaagcccagcctgcacagcgtgaaccaggaccacgacctgaagcccctgggccccaagagcggccccaccccccccaccagcgagaacgagcagaagcaggccttccccaagctgaccggcgtgaagggcaagttcatgagcgccagccaggacctggagcccaagcccctgttccccaagcccgccttcggccagaagccccccctgagcaccgagaacagccacgaggacgagagccccatgaagaacgtgagcagcagcaagggcagccccgcccccctgggcgtgagaagcaagagcggccccctgaagcccgccagagaggacagcgagaacaaggaccacgccggcgagatcagcagcctgcccttccccggcgtggtgctgaagcccgccgccagcagaggcggccccggcctgagcaagaacggcgaggagaagaaggaggacagaaagatcgacgccgccaagaacaccttccagagcaagatcaaccaggaggagctggccagcggcaccccccccgccagattccccaaggcccccagcaagctgaccgtgggcggcccctggggccagagccaggagaaggagaagggcgacaagaacagcgccacccccaagcagaagcccctgccccccctgttcaccctgggcccccccccccccaagcccaacagaccccccaacgtggacctgaccaagttccacaagaccagcagcggcaacagcaccagcaagggccagaccagctacagcaccaccagcctgcccccccccccccccagccaccccgccagccagccccccctgcccgccagccaccccagccagccccccgtgcccagcctgccccccagaaacatcaagccccccttcgacctgaagagccccgtgaacgaggacaaccaggacggcgtgacccacagcgacggcgccggcaacctggacgaggagcaggacagcgagggcgagacctacgaggacatcgaggccagcaaggagagagagaagaagagagagaaggaggagaagaagagactggagctggagaagaaggagcagaaggagaaggagaagaaggagcaggagatcaagaagaagttcaagctgaccggccccatccaggtgatccacctggccaaggcctgctgcgacgtgaagggcggcaagaacgagctgagcttcaagcagggcgagcagatcgagatcatcagaatcaccgacaaccccgagggcaagtggctgggcagaaccgccagaggcagctacggctacatcaagaccaccgccgtggagatcgactacgacagcctgaagctgaagaaggacagcctgggcgcccccagcagacccatcgaggacgaccaggaggtgtacgacgacgtggccgagcaggacgacatcagcagccacagccagagcggcagcggcggcatcttcccccccccccccgacgacgacatctacgacggcatcgaggaggaggacgccgacgacggcagcaccctgcaggtgcaggagaagagcaacacctggagctggggcatcctgaagatgctgaagggcaaggacgacagaaagaagagcatcagagagaagcccaaggtgagcgacagcgacaacaacgagggcagcagcttccccgccccccccaagcagctggacatgggcgacgaggtgtacgacgacgtggacaccagcgacttccccgtgagcagcgccgagatgagccagggcaccaacgtgggcaaggccaagaccgaggagaaggacctgaagaagctgaagaagcaggagaaggaggagaaggacttcagaaagaagttcaagtacgacggcgagatcagagtgctgtacagcaccaaggtgaccaccagcatcaccagcaagaagtggggcaccagagacctgcaggtgaagcccggcgagagcctggaggtgatccagaccaccgacgacaccaaggtgctgtgcagaaacgaggagggcaagtacggctacgtgctgagaagctacctggccgacaacgacggcgagatctacgacgacatcgccgacggctgcatctacgacaacgactag

SEQ ID NO: 12892 - DNA, 795 bp, synthetic construct
  source 1..795: mol_type = other DNA; note = Synthetic coding sequence
atgcccgacagcgcccccgccatggccgacaagatggacatgagcctggacgacatcatcaagctgaacagaagccagagaggcggcagaggcggcggcagaggcagaggcagagccggcagccagggcggcagaggcggcggcgcccaggccgccgccagagtgaacagaggcggcggccccatcagaaacagacccgccatcgccagaggcgccgccggcggcggcggcagaaacagacccgccccctacagcagacccaagcagctgcccgacaagtggcagcacgacctgttcgacagcggcttcggcggcggcgccggcgtggagaccggcggcaagctgctggtgagcaacctggacttcggcgtgagcgacgccgacatccaggagctgttcgccgagttcggcaccctgaagaaggccgccgtgcactacgacagaagcggcagaagcctgggcaccgccgacgtgcacttcgagagaaaggccgacgccctgaaggccatgaagcagtacaacggcgtgcccctggacggcagacccatgaacatccagctggtgaccagccagatcgacgcccagagaagacccgcccagagcgtgaacagaggcggcatgaccagaaacagaggcgccggcggcttcggcggcggcggcggcaccagaagaggcaccagaggcggcgccagaggcagaggcagaggcgccggcagaaacagcaagcagcagctgagcgccgaggagctggacgcccagctggacgcctacaacgccagaatggacaccagctag

SEQ ID NO: 12893 - DNA, 312 bp, synthetic construct
  source 1..312: mol_type = other DNA; note = Synthetic coding sequence
atggccaagcacggcgccgacgagcccagcagcagaagcggcagccccgacagagagggcagagccagcgaggacagaagcctgctgcaccagagactggccgtgagagagctgatcgacaccgaggtgagctacctgcacatgctgcagctgtgcgccagcgacatcagaagcagactgcagcagctgccccagggcgacctggacgtgctgttcagcaacatcgacgacatcatcaaggtgaacagcagattcctgcacgacctgcaggagaccgccagcaaggaggaggagcaggtgcagctggtgtag

SEQ ID NO: 12894 - DNA, 639 bp, synthetic construct
  source 1..639: mol_type = other DNA; note = Synthetic coding sequence
atgatgctgggcaccgagggcggcgagggcttcgtggtgaaggtgagaggcctgccctggagctgcagcgccgacgaggtgcagagattcttcagcgactgcaagatccagaacggcgcccagggcatcagattcatctacaccagagagggcagacccagcggcgaggccttcgtggagctggagagcgaggacgaggtgaagctggccctgaagaaggacagagagaccatgggccacagatacgtggaggtgttcaagagcaacaacgtggagatggactgggtgctgaagcacaccggccccaacagccccgacaccgccaacgacggcttcgtgagactgagaggcctgcccttcggctgcagcaaggaggagatcgtgcagttcttcagcggcctggagatcgtgcccaacggcatcaccctgcccgtggacttccagggcagaagcaccggcgaggccttcgtgcagttcgccagccaggagatcgccgagaaggccctgaagaagcacaaggagagaatcggccacagatacatcgagatcttcaagagcagcagagccgaggtgagaacccactacgacccccccagaaagctgatggccatgcagagacccggcccctacgacagatag

SEQ ID NO: 12895 - DNA, 1020 bp, synthetic construct; identical to SEQ ID NO: 10066
  source 1..1020: mol_type = other DNA; note = Synthetic coding sequence

SEQ ID NO: 12896 - DNA, 3213 bp, synthetic construct
  source 1..3213: mol_type = other DNA; note = Synthetic coding sequence
atggccggcgccctgagaagaggcagagccctgggcagcagacccagcggccccaccgtgagcagcagaagaagcccccagtgccccgtggcccaggagggcctgggcgccagaagcagacccagagtggcccccagaagcctggccagatgcggccccagcagcagactgatgggctggaagcccagcgaggccagaggccagagccagagcttccaggccagcggcctgcagcccagaagcctgaaggccgccagaagagccaccggcagacccgacagaagcagagccgccagacccaccatggaccccagcgcccacagaagcagagccgccccccccaacatggaccccgacccccaggccggcgtgcaggtgggcatgagagtggtgagaggcgtggactggaagtggggccagcaggacggcggcgagggcggcgtgggcaccgtggtggagctgggcagacacggcagccccagcacccccgacagaaccgtggtggtgcagtgggaccagggcaccagaaccaactacagagccggctaccagggcgcccacgacctgctgctgtacgacaacgcccagatcggcgtgagacaccccaacatcatctgcgactgctgcaagaagcacggcctgagaggcatgagatggaagtgcagagtgtgcctggactacgacctgtgcacccagtgctacatgcacaacaagcacgagctggcccacgccttcgacagatacgagaccgcccacagcagacccgtgaccctgagccccagacagggcctgcccagaatccccctgagaggcatcttccagggcgccaaggtggtgagaggccccgactgggagtggggcagccaggacggcggcgagggcaagcccggcagagtggtggacatcagaggctgggacgtggagaccggcagaagcgtggccagcgtgacctgggccgacggcaccaccaacgtgtacagagtgggccacaagggcaaggtggacctgaagtgcgtgggcgaggccgccggcggcttctactacaaggaccacctgcccagactgggcaagcccgccgagctgcagagaagagtgagcgccgacagccagcccttccagcacggcgacaaggtgaagtgcctgctggacaccgacgtgctgagagagatgcaggagggccacggcggctggaaccccagaatggccgagttcatcggccagaccggcaccgtgcacagaatcaccgacagaggcgacgtgagagtgcagttcaaccacgagaccagatggaccttccaccccggcgccctgaccaagcaccacagcttctgggtgggcgacgtggtgagagtgatcggcgacctggacaccgtgaagagactgcaggccggccacggcgagtggaccgacgacatggcccccgccctgggcagagtgggcaaggtggtgaaggtgttcggcgacggcaacctgagagtggccgtggccggccagagatggaccttcagccccagctgcctggtggcctacagacccgaggaggacgccaacctggacgtggccgagagagccagagagaacaagagcagcctgagcgtggccctggacaagctgagagcccagaagagcgaccccgagcaccccggcagactggtggtggaggtggccctgggcaacgccgccagagccctggacctgctgagaagaagacccgagcaggtggacaccaagaaccagggcagaaccgccctgcaggtggccgcctacctgggccaggtggagctgatcagactgctgctgcaggccagagccggcgtggacctgcccgacgacgagggcaacaccgccctgcactacgccgccctgggcaaccagcccgaggccaccagagtgctgctgagcgccggctgcagagccgacgccatcaacagcacccagagcaccgccctgcacgtggccgtgcagagaggcttcctggaggtggtgagagccctgtgcgagagaggctgcgacgtgaacctgcccgacgcccacagcgacacccccctgcacagcgccatcagcgccggcaccggcgccagcggcatcgtggaggtgctgaccgaggtgcccaacatcgacgtgaccgccaccaacagccagggcttcaccctgctgcaccacgccagcctgaagggccacgccctggccgtgagaaagatcctggccagagccagacagctggtggacgccaagaaggaggacggcttcaccgccctgcacctggccgccctgaacaaccacagagaggtggcccagatcctgatcagagagggcagatgcgacgtgaacgtgagaaacagaaagctgcagagccccctgcacctggccgtgcagcaggcccacgtgggcctggtgcccctgctggtggacgccggctgcagcgtgaacgccgaggacgaggagggcgacaccgccctgcacgtggccctgcagagacaccagctgctgcccctggtggccgacggcgccggcggcgaccccggccccctgcagctgctgagcagactgcaggccagcggcctgcccggcagcgccgagctgaccgtgggcgccgccgtggcctgcttcctggccctggagggcgccgacgtgagctacaccaaccacagaggcagaagccccctggacctggccgccgagggcagagtgctgaaggccctgcagggctgcgcccagagattcagagagagacaggccggcggcggcgccgcccccggccccagacagaccctgggcacccccaacaccgtgaccaacctgcacgtgggcgccgcccccggccccgaggccgccgagtgcctggtgtgcagcgagctggccctgctggtgctgttcagcccctgccagcacagaaccgtgtgcgaggagtgcgccagaagaatgaagaagtgcatcagatgccaggtggtggtgagcaagaagctgagacccgacggcagcgaggtggccagcgccgcccccgcccccggcccccccagacagctggtggaggagctgcagagcagatacagacagatggaggagagaatcacctgccccatctgcatcgacagccacatcagactggtgttccagtgcggccacggcgcctgcgccccctgcggcagcgccctgagcgcctgccccatctgcagacagcccatcagagacagaatccagatcttcgtgtag

SEQ ID NO: 12897 - DNA, 957 bp, synthetic construct; identical to SEQ ID NO: 12633
  source 1..957: mol_type = other DNA; note = Synthetic coding sequence

SEQ ID NO: 12898 - DNA, 1044 bp, synthetic construct; identical to SEQ ID NO: 10033
  source 1..1044: mol_type = other DNA; note = Synthetic coding sequence

SEQ ID NO: 12899 - DNA, 108 bp, synthetic construct
  source 1..108: mol_type = other DNA; note = Synthetic coding sequence
atgccccagaccttcagcggcggcagaggcttcgagctggacagcggcagcgacgacatggaccccggcagacccagaccccccagagaccccgacgagctgcactag

SEQ ID NO: 12900 - DNA, 1179 bp, synthetic construct; identical to SEQ ID NO: 11426
  source 1..1179: mol_type = other DNA; note = Synthetic coding sequence

SEQ ID NO: 12901 - DNA, 2052 bp, synthetic construct; identical to SEQ ID NO: 9821
  source 1..2052: mol_type = other DNA; note = Synthetic coding sequence

SEQ ID NO: 12902 - DNA, 99 bp, synthetic construct
  source 1..99: mol_type = other DNA; note = Synthetic coding sequence
atggacttcttcagcagccacctgctggccgacagcagcagccccgccaccaacagcagccacaccgacgcccacgagatcctggtgagcgacttctag

SEQ ID NO: 12903 - DNA, 858 bp, synthetic construct; identical to SEQ ID NO: 10401
  source 1..858: mol_type = other DNA; note = Synthetic coding sequence

SEQ ID NO: 12904 - DNA, 354 bp, synthetic construct; identical to SEQ ID NO: 11388
  source 1..354: mol_type = other DNA; note = Synthetic coding sequence

SEQ ID NO: 12905 - DNA, 7614 bp, synthetic construct
  source 1..7614: mol_type = other DNA; note = Synthetic coding sequence
atggaggacttcagaggcatcgccgaggagagcttccccagcttcctgaccaacagcctgttcggcaacagcggcatcctggagaacgtgaccctgagcagcaacctgggcctgcccgtggccgtgagcaccctggccagagacagaagcagcaccgacaacagataccccgacatccaggccagctacctggtggagggcagattcagcgtgcccagcggcagcagccccggcagccagagcgacgccgagcccagagagagactgcagctgagcttccaggacgacgacagcatcagcagaaagaagagctacgtggagagccagagactgagcaacgccctgagcaagcagagcgccctgcagatggagaccgccggccccgaggaggagcccgccggcgccaccgagagcctgcagggccaggacctgttcaacagagccagccccctggagcaggcccaggacagccccatcgacttccacctgcagagctggatgaacaacaaggagcccaagatcgtggtgctggacgccggcaagcacttcgaggacaagaccctgaagagcgacctgagccacaccagcctgctggagaacgagaagctgatcctgcccaccagcctggaggacagcagcgacgacgacatcgacgacgagatgttctacgacgaccacctggaggcctacttcgagcagctggccatccccggcatgatctacgaggacctggagggccccgagccccccgagaagggcttcaagctgcccaccaacggcctgagacaggccaacgagaacggcagcctgaactgcaagttccagagcgagaacaacagcagcctgatcagcctggacagccacagcagcgagaccacccacaaggagagcgaggagagccaggtgatctgcctgcccggcaccagcaacagcatcggcaccggcgacagcagaagatacaccgacggcatgctgcccttcagcagcggcacctggggcaccgagaaggagatcgagaacctgaagggcatcgtgcccgacctgaacagcgagtgcgccagcaaggacgtgctggtgaagaccctgagagccatcgacgtgaagctgaacagcgacaacttccacgacgccaacgccaacagaggcggcttcgacctgaccgaccccgtgaagcagggcgccgagtgcccccaccagaacaagaccgtgctgcacatggacggctgcctggacaccgagacccccaccgtgagcatccaggagaacgtggacgtggccagcctgaagcccatcagcgacagcggcatcaacttcaccgacgccatctggagccccacctgcgagagaagaacctgcgagtgccacgagagcatcgagaagaacaaggacaagaccgacctgccccagagcgtggtgtaccagaacgaggagggcagatgggtgaccgacctggcctactacaccagcttcaacagcaagcagaacctgaacgtgagcctgagcgacgagatgaacgaggacttcagaagcggcagcgaggccttcgacctgatcgcccaggacgaggaggagttcaacaaggagcaccagttcatccaggaggagaacatcgacgcccacaacaccagcgtggccctgggcgacaccagctggggcgccaccatcaactacagcctgctgagaaagagcagaagcaccagcgacctggacaaggacgacgccagctacctgagactgagcctgggcgagttcttcgcccagagaagcgaggccctgggctgcctgggcggcggcaacaacgtgaagagacccagcttcggctacttcatcagaagccccgagaagagagagcccatcgccctgatcagaaagagcgacgtgagcagaggcaacctggagaaggagatggcccacctgaaccacgacctgtacagcggcgacctgaacgagcagagccaggcccagctgagcgagggcagcatcaccctgcaggtggaggccgtggagagcaccagccaggtggacgagaacgacgtgaccctgaccgccgacaagggcaagaccgaggacaccttcttcatgagcaacaagccccagagatacaaggacaagctgcccgacagcggcgacagcatgctgagaatcagcaccatcgccagcgccatcgccgaggccagcgtgaacaccgaccccagccagctggccgccatgatcaaggccctgagcaacaagaccagagacaagaccttccaggaggacgagaagcagaaggactacagccacgtgagacacttcctgcccaacgacctggagaagagcaacggcagcaacgccctggacatggagaagtacctgaagaagaccgaggtgagcagatacgagagcgccctggagaacttcagcagagccagcatgagcgacacctgggacctgagcctgcccaaggagcagaccacccaggacatccaccccgtggacctgagcgccaccagcgtgagcgtgagagcccccgaggagaacaccgccgccatcgtgtacgtggagaacggcgagagcgagaaccaggagagcttcagaaccatcaacagcagcaacagcgtgaccaacagagagaacaacagcgccgtggtggacgtgaagacctgcagcatcgacaacaagctgcaggacgtgggcaacgacgagaaggccaccagcatcagcacccccagcgacagctacagcagcgtgagaaaccccagaatcaccagcctgtgcctgctgaaggactgcgaggagatcagagacaacagagagaaccagagacagaacgagtgcgtgagcgagatcagcaacagcgagaagcacgtgaccttcgagaaccacagaatcgtgagccccaagaacagcgacctgaagaacaccagccccgagcacggcggcagaggcagcgaggacgagcaggagagcttcagacccagcaccagccccctgagccacagcagccccagcgagatcagcggcaccagcagcagcggctgcgccctggagagcttcggcagcgccgcccagcagcagcagcccccctgcgagcaggagctgagccccctggtgtgcagccccgccggcgtgagcagactgacctacgtgagcgagcccgagagcagctaccccaccaccgccaccgacgacgccctggaggacagaaagagcgacatcaccagcgagctgagcaccaccatcatccagggcagccccgccgccctggaggagagagccatggagaagctgagagagaaggtgcccttccagaacagaggcaagggcaccctgagcagcatcatccagaacaacagcgacaccagaaaggccaccgagaccaccagcctgagcagcaagcccgagtacgtgaagcccgacttcagatggagcaaggaccccagcagcaagagcggcaacctgctggagaccagcgaggtgggctggaccagcaaccccgaggagctggaccccatcagactggccctgctgggcaagagcggcctgagctgccaggtgggcagcgccaccagccaccccgtgagctgccaggagcccatcgacgaggaccagagaatcagccccaaggacaagagcaccgccggcagagagttcagcggccaggtgagccaccagaccaccagcgagaaccagtgcacccccatccccagcagcaccgtgcacagcagcgtggccgacatgcagaacatgcccgccgccgtgcacgccctgctgacccagcccagcctgagcgccgcccccttcgcccagagatacctgggcaccctgcccagcaccggcagcaccaccctgccccagtgccacgccggcaacgccaccgtgtgcggcttcagcggcggcctgccctaccccgccgtggccggcgagcccgtgcagaacagcgtggccgtgggcatctgcctgggcagcaacatcggcagcggctggatgggcaccagcagcctgtgcaacccctacagcaacaccctgaaccagaacctgctgagcaccaccaagcccttccccgtgcccagcgtgggcaccaactgcggcatcgagccctgggacagcggcgtgaccagcggcctgggcagcgtgagagtgcccgaggagctgaagctgccccacgcctgctgcgtgggcatcgccagccagaccctgctgagcgtgctgaaccccaccgacagatggctgcaggtgagcatcggcgtgctgagcatcagcgtgaacggcgagaaggtggacctgagcacctacagatgcctggtgttcaagaacaaggccatcatcagaccccacgccaccgaggagatcaaggtgctgttcatccccagcagccccggcgtgttcagatgcaccttcagcgtggccagctggccctgcagcaccgacgccgagaccatcgtgcaggccgaggccctggccagcaccgtgaccctgaccgccatcgccgagagccccgtgatcgaggtggagaccgagaagaaggacgtgctggacttcggcgacctgacctacggcggctggaaggccctgcccctgaagctgatcaacagaacccacgccaccgtgcccatcagactgatcatcaacgccaacgccgtggcctggagatgcttcaccttcagcaaggagagcgtgagagcccccgtggaggtggccccctgcgccgacgtggtgaccagactggccggccccagcgtggtgaaccacatgatgcccgccagctacgacggccaggaccccgagttcctgatgatctgggtgctgttccacagccccaagaagcagatcagcagcagcgacatcctggacagcgccgaggagttcagcgccaaggtggacatcgaggtggacagccccaaccccacccccgtgctgagaagcgtgagcctgagagccagagccggcatcgccagaatccacgcccccagagacctgcagaccatgcacttcctggccaaggtggccagcagcagaaagcagcacctgcccctgaagaacgccggcaacatcgaggtgtacctggacatcaaggtgcccgagcagggcagccacttcagcgtggaccccaagaacctgctgctgaagcccggcgaggagcacgaggtgatcgtgagcttcacccccaaggaccccgaggcctgcgaggagagaatcctgaagatcttcgtgcagcccttcggcccccagtacgaggtggtgctgaagggcgaggtgatcagcagcggcagcaagcccctgagccccggcccctgcctggacatccccagcatcctgagcaacaagcagttcctggcctggggcggcgtgcccctgggcagaacccagctgcagaagctggccctgagaaacaacagcgccagcaccacccagcacctgagactgctgatcagaggccaggaccaggactgcttccagctgcagaacaccttcggcagcgagcagagactgaccagcaactgcgagatcagaatccaccccaaggaggacatcttcatcagcgtgctgttcgcccccaccagactgagctgcatgctggccagactggagatcaagcagctgggcaacagaagccagcccggcatcaagttcaccatccccctgagcggctacggcggcaccagcaacctgatcctggagggcgtgaagaagctgagcgacagctacatggtgaccgtgaacggcctggtgcccggcaaggagagcaagatcgtgttcagcgtgagaaacaccggcagcagagccgccttcgtgaaggccgtgggcttcaaggacagccagaagaaggtgctgctggaccccaaggtgctgagaatcttccccgacaagttcgtgctgaaggagagaacccaggagaacgtgaccctgatctacaaccccagcgacagaggcatcaacaacaagaccgccaccgagctgagcaccgtgtacctgttcggcggcgacgagatcagcagacagcagtacagaagagccctgctgcacaagcccgagatgatcaagcagatcctgcccgagcacagcgtgctgcagaacatcaacttcgtggaggccttccaggacgagctgctggtgaccgaggtgtacgacctgccccagagacccaacgacgtgcagctgttctacggcagcatgtgcaagatcatcctgagcgtgatcggcgagttcagagactgcatcagcagcagagagttcctgcagcccagcagcaaggccagcctggagagcaccagcgacctgggcgccagcggcaagcacggcggcaacgtgagcctggacgtgctgcccgtgaagggcccccagggcagccccctgctgagcagagccgccagaccccccctggaccagctggccagcgaggagccctggaccgtgctgcccgagcacctgatcctggtggcccccagcccctgcgacatggccaagaccggcagattccagatcgtgaacaacagcgtgagactgctgagattcgagctgtgctggcccgcccactgcctgaccgtgaccccccagcacggctgcgtggcccccgagagcaagctgcagatcctggtgagccccaacagcagcctgagcaccaagcagagcatgttcccctggagcggcctgatctacatccactgcgacgacggccagaagaagatcgtgaaggtgcagatcagagaggacctgacccaggtggagctgctgaccagactgaccagcaagcccttcggcatcctgagccccgtgagcgagcccagcgtgagccacctggtgaagcccatgaccaagccccccagcaccaaggtggagatcagaaacaagagcatcaccttccccaccaccgagcccggcgagaccagcgagagctgcctggagctggagaaccacggcaccaccgacgtgaagtggcacctgagcagcctggcccccccctacgtgaagggcgtggacgagagcggcgacgtgttcagagccacctacgccgccttcagatgcagccccatcagcggcctgctggagagccacggcatccagaaggtgagcatcaccttcctgcccagaggcagaggcgactacgcccagttctgggacgtggagtgccaccccctgaaggagccccacatgaagcacaccctgagattccagctgagcggccagagcatcgaggccgagaacgagcccgagaacgcctgcctgagcaccgacagcctgatcaagatcgaccacctggtgaagcccagaagacaggccgtgagcgaggccagcgccagaatccccgagcagctggacgtgaccgccagaggcgtgtacgcccccgaggacgtgtacagattcagacccaccagcgtgggcgagagcagaaccctgaaggtgaacctgagaaacaacagcttcatcacccacagcctgaagttcctgagccccagagagcccttctacgtgaagcacagcaagtacagcctgagagcccagcactacatcaacatgcccgtgcagttcaagcccaagagcgccggcaagttcgaggccctgctggtgatccagaccgacgagggcaagagcatcgccatcagactgatcggcgaggccctgggcaagaactag

SEQ ID NO: 12906 - DNA, 90 bp, synthetic construct
  source 1..90: mol_type = other DNA; note = Synthetic coding sequence
atgctgtgctggggcaacgccagcttcggccagctgggcctgggcggcatcgacgaggagatcgtgctggagcccagaaagagcgactag

SEQ ID NO: 12907 - DNA, 66 bp, synthetic construct
  source 1..66: mol_type = other DNA; note = Synthetic coding sequence
atggccaagtacaacaccggcggcaaccccaccgaggacgtgagcgtgaacagcagacccttctag

SEQ ID NO: 12908 - DNA, 261 bp, synthetic construct
  source 1..261: mol_type = other DNA; note = Synthetic coding sequence
atggaggccgacatcatcaccaacctgagatgcagactgaaggaggccgaggaggagagactgaaggccgcccagtacggcctgcagctggtggagagccagaacgagctgcagaaccagctggacaagtgcagaaacgagatgatgaccatgaccgagagctacgagcaggagaagtacaccctgcagagagaggtggagctgaagagcagaatgctggagagcctgagctgcgagtgcgaggccatcaagcagcagtag

SEQ ID NO: 12909 - DNA, 1983 bp, synthetic construct
  source 1..1983: mol_type = other DNA; note = Synthetic coding sequence
atggtgaccagcctgaacgaggacaacgagagcgtgaccgtggagtggatcgagaacggcgacaccaagggcaaggagatcgacctggagagcatcttcagcctgaaccccgacctggtgcccgacgaggagatcgagcccagccccgagaccccccccccccccgccagcagcgccaaggtgaacaagatcgtgaagaacagaagaaccgtggccagcatcaagaacgacccccccagcagagacaacagagtggtgggcagcgccagagccagacccagccagttccccgagcagagcagcagcgcccagcagaacgccagaagaaagagcaactgcgtgaaggaggtggagaagctgcaggagaagagagagaagagaagactgcagcagcaggagctgagagagaagagagcccaggacgtggacgccaccaaccccaactacgagatcatgtgcatgatcagagacttcagaggcagcctggactacagacccctgaccaccgccgaccccatcgacgagcacagaatctgcgtgtgcgtgagaaagagacccctgaacaagaaggagacccagatgaaggacctggacgtgatcaccatccccagcaaggacgtggtgatggtgcacgagcccaagcagaaggtggacctgaccagatacctggagaaccagaccttcagattcgactacgccttcgacgacagcgcccccaacgagatggtgtacagattcaccgccagacccctggtggagaccatcttcgagagaggcatggccacctgcttcgcctacggccagaccggcagcggcaagacccacaccatgggcggcgacttcagcggcaagaaccaggactgcagcaagggcatctacgccctggccgccagagacgtgttcctgatgctgaagaagcccaactacaagaagctggagctgcaggtgtacgccaccttcttcgagatctacagcggcaaggtgttcgacctgctgaacagaaagaccaagctgagagtgctggaggacggcaagcagcaggtgcaggtggtgggcctgcaggagagagaggtgaagtgcgtggaggacgtgctgaagctgatcgacatcggcaacagctgcagaaccagcggccagaccagcgccaacgcccacagcagcagaagccacgccgtgttccagatcatcctgagaagaaagggcaagctgcacggcaagttcagcctgatcgacctggccggcaacgagagaggcgccgacaccagcagcgccgacagacagaccagactggagggcgccgagatcaacaagagcctgctggccctgaaggagtgcatcagagccctgggcagaaacaagccccacacccccttcagagccagcaagctgacccaggtgctgagagacagcttcatcggcgagaacagcagaacctgcatgatcgccaccatcagccccggcatggccagctgcgagaacaccctgaacaccctgagatacgccaacagagtgaaggagctgaccgtggaccccaccgccgccggcgacgtgagacccatcatgcaccacccccccaaccagatcgacgacctggagacccagtggggcgtgggcagcagcccccagagagacgacctgaagctgctgtgcgagcagaacgaggaggaggtgagcccccagctgttcaccttccacgaggccgtgagccagatggtggagatggaggagcaggtggtggaggaccacagagccgtgttccaggagagcatcagatggctggaggacgagaaggccctgctggagatgaccgaggaggtggactacgacgtggacagctacgccacccagctggaggccatcctggagcagaagatcgacatcctgaccgagctgagagacaaggtgaagagcttcagagccgccctgcaggaggaggagcaggccagcaagcagatcaaccccaagagacccagagccctgtag

SEQ ID NO: 12910 - DNA, 207 bp, synthetic construct
  source 1..207: mol_type = other DNA; note = Synthetic coding sequence
atgagcagccccagagacttcagagccgagcccgtgaacgactacgagggcaacgacagcgaggccgaggacctgaacttcagagagaccctgcccagcagcagccaggagaacacccccagaagcaaggtgttcgagaacaaggtgaacagcgagaaggtgaagctgagcctgagaaacttcccccacaacgactacgaggactag

SEQ ID NO: 12911 - DNA, 294 bp, synthetic construct
  source 1..294: mol_type = other DNA; note = Synthetic coding sequence
atgaacggcagagccgacttcagagagcccaacgccgaggtgcccagacccatcccccacatcggccccgactacatccccaccgaggaggagagaagagtgttcgccgagtgcaacgacgagagcttctggttcagaagcgtgcccctggccgccaccagcatgctgatcacccagggcctgatcagcaagggcatcctgagcagccaccccaagtacggcagcatccccaagctgatcctggcctgcatcatgggctacttcgccggcaagctgagctacgtgaagacctag

SEQ ID NO: 12912 - DNA, 309 bp, synthetic construct
  source 1..309: mol_type = other DNA; note = Synthetic coding sequence
atggtgatggagaagcccagccccctgctggtgggcagagagttcgtgagacagtactacaccctgctgaacaaggcccccgagtacctgcacagattctacggcagaaacagcagctacgtgcacggcggcgtggacgccagcggcaagccccaggaggccgtgtacggccagaacgacatccaccacaaggtgctgagcctgaacttcagcgagtgccacaccaagatcagacacgtggacgcccacgccaccctgagcgacggcgtggtggtgcaggtgatgggcctgctgagcaacagcggctag

SEQ ID NO: 12913 - DNA, 597 bp, synthetic construct
  source 1..597: mol_type = other DNA; note = Synthetic coding sequence
atgggcaccacctgcctgcacctgggcaccctggagcagagcctggtgttcgagaacaaggtgaacagcgagaaggtgaagctgagcctgagaaacttcccccacaacgactacgaggacgtgttcgaggagcccagcgagagcggcagcgaccccagcatgtggaccgccagaggccccttcagaagagacagatggagcagcgaggacgaggaggccgccggccccagccaggccctgagccccctgctgagcgacaccagaaagatcgtgagcgagggcgagctggaccagctggcccagatcagacccctgatcttcaacttccacgagcagaccgccatcaaggactgcctgaagatcctggaggagaagaccgccgcctacgacatcatgcaggagttcatggccctggagctgaagaacctgcccggcgagttcaacagcggcaaccagcccagcaacagagagaagaacagatacagagacatcctgcccttccagcaccacggctacagcggccccaacgagagaaccaccttctggcacggcagcaacgagggcgccgtgagcctgctgctgagatactgcgcctag

SEQ ID NO: 12914 - DNA, 384 bp, synthetic construct; identical to SEQ ID NO: 9944
  source 1..384: mol_type = other DNA; note = Synthetic coding sequence

SEQ ID NO: 12915 - DNA, 426 bp, synthetic construct
  source 1..426: mol_type = other DNA; note = Synthetic coding sequence
atggtgatggagaagcccagccccctgctggtgggcagagagttcgtgagacagtactacaccctgctgaacaaggcccccgagtacctgcacagattctacggcagaaacagcagctacgtgcacggcggcgtggacgccagcggcaagccccaggaggccgtgtacggccagaacgacatccaccacaaggtgctgagcctgaacttcagcgagtgccacaccaagatcagacacgtggacgcccacgccaccctgagcgacggcgtggtggtgcaggtgatgggcctgctgagcaacagcggccagcccgagagaaagttcatgcagaccttcgtgctggcccccgagggcagcgtgcccaacaagttctacgtgcacaacgacatgttcagatacgaggacgaggtgttcggcgacagctag

SEQ ID NO: 12916 - DNA, 135 bp, synthetic construct
  source 1..135: mol_type = other DNA; note = Synthetic coding sequence
atgctgctgctggactgcaaccccgaggtggacggcctgaagcacctgctggagaccggcgccagcgtgaacgccccccccgacccctgcaagcagagccccgtgcacctggccgccggcagcggcctggcctag

SEQ ID NO: 12917 - DNA, 399 bp, synthetic construct
  source 1..399: mol_type = other DNA; note = Synthetic coding sequence
atgaagagaggcagactgcccagcagcagcgaggacagcgacgacaacggcagcctgagcaccacctggagccagaacagcagaagccagcacagaagaagcagctgcagcagacacgaggacagaaagcccagcgaggtgttcagaaccgacctgatcaccgccatgaagctgcacgacagctaccagctgaaccccgacgagtactacgtgctggccgacccctggagacaggagtgggagaagggcgtgcaggtgcccgtgagccccggcaccatcccccagcccgtggccagagtggtgagcgaggagaagagcctgatgttcatcagacccaagaagtacatcgtgagcagcggcagcgagccccccgagctgggctacgtggacatcagatag

SEQ ID NO: 12918 - DNA, 972 bp, synthetic construct; identical to SEQ ID NO: 11565
  source 1..972: mol_type = other DNA; note = Synthetic coding sequence

SEQ ID NO: 12919 - DNA, 312 bp, synthetic construct
  source 1..312: mol_type = other DNA; note = Synthetic coding sequence
atggcccagaccgacaagcccacctgcatcccccccgagctgcccaagatgctgaaggagttcgccaaggccgccatcagagcccagccccaggacctgatccagtggggcgccgactacttcgaggccctgagcagaggcgagaccccccccgtgagagagagaagcgagagagtggccctgtgcaactgggccgagctgacccccgagctgctgaagatcctgcacagccaggtggccggcagactgatcatcagagccgaggagctggcccagatgtggaaggtggtgaacctgcccaccgacctgtag

SEQ ID NO: 12920 - DNA, 540 bp, synthetic construct
  source 1..540: mol_type = other DNA; note = Synthetic coding sequence
atggaggacggcacccccaagcacatcatccagatgaccggcttcaagatggaggagaaggaggccctggtgaagctgctgctgaagctggactgcaccttcatcaagagcgagaagtacaagaactgcacccacctgatcgccgagagactgtgcaagagcgagaagttcctggccgcctgcgccgccggcaagtggatcctgaccaaggactacatcatccacagcgccaagagcggcagatggctggacgagaccacctacgagtggggctacaagatcgagaaggacagcagatacagcccccagatgcagagcgcccccaagagatggagagaggagctgaagagaaccggcgcccccggcgccttccacagatggaaggtggtgctgctggtgagaaccgacaagagaagcgacagcctgatcagaaagaagttcagaatgatgaagatccccaagcccatcctgttcggcctgaacatcgccatgaagaagcagaccaagatcagcggcaagatgcaggacttcctgaagtag

SEQ ID NO: 12921 - DNA, 453 bp, synthetic construct
  source 1..453: mol_type = other DNA; note = Synthetic coding sequence
atggaggccgacatcatcaccaacctgagatgcagactgaaggaggccgaggaggagagactgaaggccgcccagtacggcctgcagctggtggagagccagaacgagctgcagaaccagctggacaagtgcagaaacgagatgatgaccatgaccgagagctacgagcaggagaagtacaccctgcagagagaggtggagctgaagagcagaatgctggagagcctgagctgcgagtgcgaggccatcaagcagcagcagaagatgcacctggagaagctggaggagcagctgagcagaagccacggccaggaggtgaacgagctgaagaccaagatcgagaagctgaaggtggagctggacgaggccagactgagcgagaagcagctgaagcaccaggtggaccaccagaaggagctgctgagctgcaagagcgaggagctgagagtgtag

SEQ ID NO: 12922 - DNA, 738 bp, synthetic construct; identical to SEQ ID NO: 9467
  source 1..738: mol_type = other DNA; note = Synthetic coding sequence

SEQ ID NO: 12923 - DNA, 180 bp, synthetic construct
  source 1..180: mol_type = other DNA; note = Synthetic coding sequence
atggtgatggagaagcccagccccctgctggtgggcagagagttcgtgagacagtactacaccctgctgaacaaggcccccgagtacctgcacagattctacggcagaaacagcagctacgtgcacggcggcgtggacgccagcggcaagccccaggaggccgtgtacggccagaactag

SEQ ID NO: 12924 - DNA, 597 bp, synthetic construct; identical to SEQ ID NO: 12913
  source 1..597: mol_type = other DNA; note = Synthetic coding sequence

SEQ ID NO: 12925 - DNA, 465 bp, synthetic construct
  source 1..465: mol_type = other DNA; note = Synthetic coding sequence
atggccagcgccagcgccagaggcaaccaggacaaggacgcccacttccccccccccagcaagcagagcctgctgttctgccccaagagcaagctgcacatccacagagccgagatcagcaagatcatgagagagtgccaggaggagagcttctggaagagagccctgcccttcagcctggtgagcatgctggtgacccagggcctggtgtaccagggctacctggccgccaacagcagattcggcagcctgcccaaggtggccctggccggcctgctgggcttcggcctgggcaaggtgagctacatcggcgtgtgccagagcaagttccacttcttcgaggaccagctgagaggcgccggcttcggcccccagcacaacagacactgcctgctgacctgcgaggagtgcaagatcaagcacggcctgagcgagaagggcgacagccagcccagcgccagctag

SEQ ID NO: 12926 - DNA, 2520 bp, synthetic construct; identical to SEQ ID NO: 9680
  source 1..2520: mol_type = other DNA; note = Synthetic coding sequence

SEQ ID NO: 12927 - DNA, 54 bp, synthetic construct
  source 1..54: mol_type = other DNA; note = Synthetic coding sequence
atggacgagggcatggagatcagcagcgagggcaacagcctgatcaaggcctag

SEQ ID NO: 12928 - DNA, 2394 bp, synthetic construct
  source 1..2394: mol_type = other DNA; note = Synthetic coding sequence
atgggcgtgagcagactgatggacctgctggccgacagcagagaggtgatcagaaacgacggcgtgctgctgctgcaggccctgaccagaagcaacggcgccatccagaagatcgtggccttcgagaacgccttcgagagactgctggacatcatcagcgaggagggcaacagcgacggcggcatcgtggtggaggactgcctgatcctgctgcagaacctgctgaagaacaacaacagcaaccagaacttcttcaaggagggcagctacatccagagaatgaagccctggttcgaggtgggcgacgagaacagcggctggagcgcccagaaggtgaccaacctgcacctgatgctgcagctggtgagagtgctggtgagccccaccaacccccccggcgccaccagcagctgccagaaggccatgttccagtgcggcctgctgcagcagctgtgcaccatcctgatggccaccggcgtgcccgccgacatcctgaccgagaccatcaacaccgtgagcgaggtgatcagaggctgccaggtgaaccaggactacttcgccagcgtgaacgcccccagcaacccccccagacccgccatcgtggtgctgctgatgagcatggtgaacgagagacagcccttcgtgctgagatgcgccgtgctgtactgcttccagtgcttcctgtacaagaaccagaagggccagggcgagatcgtgagcaccctgctgcccagcaccatcgacgccaccggcaacagcgtgagcgccggccagctgctgtgcggcggcctgttcagcaccgacagcctgagcaactggtgcgccgccgtggccctggcccacgccctgcaggagaacgccacccagaaggagcagctgctgagagtgcagctggccaccagcatcggcaacccccccgtgagcctgctgcagcagtgcaccaacatcctgagccagggcagcaagatccagaccagagtgggcctgctgatgctgctgtgcacctggctgagcaactgccccatcgccgtgacccacttcctgcacaacagcgccaacgtgcccttcctgaccggccagatcgccgagaacctgggcgaggaggagcagctggtgcagggcctgtgcgccctgctgctgggcatcagcatctacttcaacgacaacagcctggagagctacatgaaggagaagctgaagcagctgatcgagaagagaatcggcaaggagaacttcatcgagaagctgggcttcatcagcaagcacgagctgtacagcagagccagccagaagccccagcccaacttccccagccccgagtacatgatcttcgaccacgagttcaccaagctggtgaaggagctggagggcgtgatcaccaaggccatctacaagagcagcgaggaggacaagaaggaggaggaggtgaagaagaccctggagcagcacgacaacatcgtgacccactacaagaacatgatcagagagcaggacctgcagctggaggagctgagacagcaggtgagcaccctgaagtgccagaacgagcagctgcagaccgccgtgacccagcaggtgagccagatccagcagcacaaggaccagtacaacctgctgaagatccagctgggcaaggacaaccagcaccagggcagctacagcgagggcgcccagatgaacggcatccagcccgaggagatcggcagactgagagaggagatcgaggagctgaagagaaaccaggagctgctgcagagccagctgaccgagaaggacagcatgatcgagaacatgaagagcagccagaccagcggcaccaacgagcagagcagcgccatcgtgagcgccagagacagcgagcaggtggccgagctgaagcaggagctggccaccctgaagagccagctgaacagccagagcgtggagatcaccaagctgcagaccgagaagcaggagctgctgcagaagaccgaggccttcgccaagagcgtggaggtgcagggcgagaccgagaccatcatcgccaccaagaccaccgacgtggagggcagactgagcgccctgctgcaggagaccaaggagctgaagaacgagatcaaggccctgagcgaggagagaaccgccatcaaggagcagctggacagcagcaacagcaccatcgccatcctgcagaccgagaaggacaagctggagctggagatcaccgacagcaagaaggagcaggacgacctgctggtgctgctggccgaccaggaccagaagatcctgagcctgaagaacaagctgaaggacctgggccaccccgtggaggaggaggacgagctggagagcggcgaccaggaggacgaggacgacgagagcgaggaccccggcaaggacctggaccacatctag

SEQ ID NO: 12929 - DNA, 441 bp, synthetic construct
  source 1..441: mol_type = other DNA; note = Synthetic coding sequence
tgaagacacctgagagccacccccaacaccagaggcagcgccagactgctgtgcgccgagatgcccaagaaggccggcgccaccaccaagggcaagagccagagcaaggagcccgagagacccctgccccccctgggccccgtggccgtggaccccaagggctgcgtgaccatcgccatccacgccaagcccggcagcaagcagaacgccgtgaccgacctgaccgccgaggccgtgaacgtggccatcgccgccccccccagcgagggcgaggccaacgccgagctgtgcagatacctgagcaaggtgctggagctgagaaagagcgacgtggtgctggacaagaagctgagagacctgctgaagatcgtgccctgcaagctggccaccagaacccagatcctgggcctgctggtggagtgcagcttcagcagactgtag

SEQ ID NO: 12930 - DNA, 243 bp, synthetic construct
  source 1..243: mol_type = other DNA; note = Synthetic coding sequence
atgaacggcagagccgacttcagagagcccaacgccgaggtgcccagacccatcccccacatcggccccgactacatccccaccgaggaggagagaagagtgttcgccgagtgcaacgacgagagcttctggttcagaagcgtgcccctggccgccaccagcatgctgatcacccagggcctgatcagcaagggcatcctgagcagccaccccaagtacggcagcatccccaagctgatctag

SEQ ID NO: 12931 - DNA, 360 bp, synthetic construct
  source 1..360: mol_type = other DNA; note = Synthetic coding sequence
atgaagagaggcagactgcccagcagcagcgaggacagcgacgacaacggcagcctgagcaccacctggagccagaacagcagaagccagcacagaagaagcagctgcagcagacacgaggacagaaagcccagcgaggtgttcagaaccgacctgatcaccgccatgaagctgcacgacagctaccagctgaaccccgacgagtactacgtgctggccgacccctggagacaggagtgggagaagggcgtgcaggtgcccgtgagccccggcaccatcccccagcccgtggccagagtggtgagcgaggagaagagcctgatgttcatcagacccaagaagtacatcgtgagcagctag

SEQ ID NO: 12932 - DNA, 69 bp, synthetic construct
  source 1..69: mol_type = other DNA; note = Synthetic coding sequence
atggccaagtacaacaccggcggcaaccccaccgaggacgtgagcgtgaacagcagacccttcagatag

SEQ ID NO: 12933 - DNA, 1059 bp, synthetic construct
  source 1..1059: mol_type = other DNA; note = Synthetic coding sequence
atggccgccgccgtgagacaggacctggcccagctgatgaacagcagcggcagccacaaggacctggccggcaagtacagacagatcctggagaaggccatccagctgagcggcgccgagcagctggaggccctgaaggccttcgtggaggccatggtgaacgagaacgtgagcctggtgatcagcagacagctgctgaccgacttctgcacccacctgcccaacctgcccgacagcaccgccaaggagatctaccacttcaccctggagaagatccagcccagagtgatcagcttcgaggagcaggtggccagcatcagacagcacctggccagcatctacgagaaggaggaggactggagaaacgccgcccaggtgctggtgggcatccccctggagaccggccagaagcagtacaacgtggactacaagctggagacctacctgaagatcgccagactgtacctggaggacgacgaccccgtgcaggccgaggcctacatcaacagagccagcctgctgcagaacgagagcaccaacgagcagctgcagatccactacaaggtgtgctacgccagagtgctggactacagaagaaagttcatcgaggccgcccagagatacaacgagctgagctacaagaccatcgtgcacgagagcgagagactggaggccctgaagcacgccctgcactgcaccatcctggccagcgccggccagcagagaagcagaatgctggccaccctgttcaaggacgagagatgccagcagctggccgcctacggcatcctggagaagatgtacctggacagaatcatcagaggcaaccagctgcaggagttcgccgccatgctgatgccccaccagaaggccaccaccgccgacggcagcagcatcctggacagagccgtgatcgagcacaacctgctgagcgccagcaagctgtacaacaacatcaccttcgaggagctgggcgccctgctggagatccccgccgccaagcacgagaagccctgccagagaggcatcagcagaagcaaccacttcgtgagcaagtag

SEQ ID NO: 12934 - DNA, 378 bp, synthetic construct
  source 1..378: mol_type = other DNA; note = Synthetic coding sequence
atggtgatggagaagcccagccccctgctggtgggcagagagttcgtgagacagtactacaccctgctgaacaaggcccccgagtacctgcacagattctacggcagaaacagcagctacgtgcacggcggcgtggacgccagcggcaagccccaggaggccgtgtacggccagaacgacatccaccacaaggtgctgagcctgaacttcagcgagtgccacaccaagatcagacacgtggacgcccacgccaccctgagcgacggcgtggtggtgcaggtgatgggcctgctgagcaacagcggccagcccgagagaaagttcatgcagaccttcgtgctggcccccgagggcagcgtgcccaacaagttctactag

SEQ ID NO: 12935 - DNA, 657 bp, synthetic construct
  source 1..657: mol_type = other DNA; note = Synthetic coding sequence
atgaacggcagagccgacttcagagagcccaacgccgaggtgcccagacccatcccccccgtgcccctggccgccaccagcatgctgatcacccagggcctgatcagcaagggcatcctgagcagccaccccaagtacggcagcatccccaagctgatcctggcctgcatcatgggctacttcgccggcaagctgagctacgtgaagacctgccaggagaagttcaagaagctggagaacagccccctgggcgaggccctgagaagcggccaggccagaagaagcagcccccccggccactactaccagaagagcaagtacgacagcagcgtgagcggccagagcagcttcgtgaccagccccgccgccgacaacatcgagatgctgccccactacgagcccatccccttcagcagcagcatgaacgagagcgcccccaccggcatcaccgaccacatcgtgcagggccccgaccccaacctggaggagagccccaagagaaagaacatcacctacgaggagctgagaaacaagaacagagagagctacgaggtgagcctgacccagaagaccgaccccagcgtgagacccatgcacgagagagtgcccaagaaggaggtgaaggtgaacaagtacggcgacacctgggacgagtag

SEQ ID NO: 12936 - DNA, 243 bp, synthetic construct; identical to SEQ ID NO: 12930
  source 1..243: mol_type = other DNA; note = Synthetic coding sequence

SEQ ID NO: 12937 - DNA, 654 bp, synthetic construct
  source 1..654: mol_type = other DNA; note = Synthetic coding sequence
atgatcgtgaacgactacgagggcaacgacagcgaggccgaggacctgaacttcagagagaccctgcccagcagcagccaggagaacacccccagaagcaaggtgttcgagaacaaggtgaacagcgagaaggtgaagctgagcctgagaaacttcccccacaacgactacgaggacgtgttcgaggagcccagcgagagcggcagcgaccccagcatgtggaccgccagaggccccttcagaagagacagatggagcagcgaggacgaggaggccgccggccccagccaggccctgagccccctgctgagcgacaccagaaagatcgtgagcgagggcgagctggaccagctggcccagatcagacccctgatcttcaacttccacgagcagaccgccatcaaggactgcctgaagatcctggaggagaagaccgccgcctacgacatcatgcaggagttcatggccctggagctgaagaacctgcccggcgagttcaacagcggcaaccagcccagcaacagagagaagaacagatacagagacatcctgcccttccagcaccacggctacagcggccccaacgagagaaccaccttctggcacggcagcaacgagggcgccgtgagcctgctgctgagatactgcgcctag

SEQ ID NO: 12938 - DNA, 351 bp, synthetic construct
  source 1..351: mol_type = other DNA; note = Synthetic coding sequence
atgggcagactggacggcaaggtgatcatcctgaccgccgccgcccagggcatcggccaggccgccgccctggccttcgccagagagggcgccaaggtgatcgccaccgacatcaacgagagcaagctgcaggagctggagaagtaccccggcatccagaccagagtgctggacgtgaccaagaagaagcagatcgaccagttcgccaacgaggtggagagactggacgtgctgttcaacgtggccggcttcgtgcaccacggcaccgtgctggactgcgaggagaaggactgggacttcagcatgaacctgaacgtgagaagcatgtacctgatgatcaaggccttctag

SEQ ID NO: 12939 - DNA, 504 bp, synthetic construct
  source 1..504: mol_type = other DNA; note = Synthetic coding sequence
atgaaggccatcaagaagagcctgaccgaggaggagtacctgtacctggacttcagccaccagaccgagggctgcatcttccccctgcacaccagcgtgaccctgttcctgctgagctactgcgactgcaagatcttcaagatctgcctggtggtgaccaaggaggtgagcagagacagcagcctgctgagagacgacctgatccaggacgtggagatccagatcatcagcagacaggagctgccccccatcgtgcagaactgctgcctgcccgccgtggtggagagaagcgacaacttctgcagagccggcctggccgtggtgctgagacacatcatccagaagagctacgaggccgaccccctgaagaaggagctgctggagctgctgggcttcaagaagacctgcctgaaggcctgcgccgaggtgagccagtggaccagactgtgcgagctgaccatccccctggccatcgagaacttcctgagagagagcagcgactag

SEQ ID NO: 12940 - DNA, 933 bp, synthetic construct; identical to SEQ ID NO: 10011
  source 1..933: mol_type = other DNA; note = Synthetic coding sequence

SEQ ID NO: 12941 - DNA, 237 bp, synthetic construct
  source 1..237: mol_type = other DNA; note = Synthetic coding sequence
atggtgatggagaagcccagccccctgctggtgggcagagagttcgtgagacagtactacaccctgctgaacaaggcccccgagtacctgcacagattctacggcagaaacagcagctacgtgcacggcggcgtggacgccagcggcaagccccaggaggccgtgtacggccagaacgacatccaccacaaggtgctgagcctgaacttcagcgagtgccacaccaagatcagatag

SEQ ID NO: 12942 - DNA, 681 bp, synthetic construct; identical to SEQ ID NO: 10935
  source 1..681: mol_type = other DNA; note = Synthetic coding sequence

SEQ ID NO: 12943 - DNA, 1020 bp, synthetic construct; identical to SEQ ID NO: 10066
  source 1..1020: mol_type = other DNA; note = Synthetic coding sequence

SEQ ID NO: 12944 - DNA, 1179 bp, synthetic construct; identical to SEQ ID NO: 11426
  source 1..1179: mol_type = other DNA; note = Synthetic coding sequence

SEQ ID NO: 12945 - DNA, 654 bp, synthetic construct; identical to SEQ ID NO: 12937
  source 1..654: mol_type = other DNA; note = Synthetic coding sequence

SEQ ID NO: 12946 - DNA, 438 bp, synthetic construct; identical to SEQ ID NO: 11428
  source 1..438: mol_type = other DNA; note = Synthetic coding sequence

SEQ ID NO: 12947 - DNA, 207 bp, synthetic construct; identical to SEQ ID NO: 12910
  source 1..207: mol_type = other DNA; note = Synthetic coding sequence

SEQ ID NO: 12948 - DNA, 525 bp, synthetic construct
  source 1..525: mol_type = other DNA; note = Synthetic coding sequence
atggccaagtacaacaccggcggcaaccccaccgaggacgtgagcgtgaacagcagacccttcagagtgaccggccccaacagcagcagcggcatccaggccagaaagaacctgttcaacaaccagggcaacgccagcccccccgccggccccagcaacgtgcccaagttcggcagccccaagccccccgtggccgtgaagcccagcagcgaggagaagcccgacaaggagcccaagccccccttcctgaagcccaccggcgccggccagagattcggcacccccgccagcctgaccaccagagaccccgaggccaaggtgggcttcctgaagcccgtgggccccaagcccatcaacctgcccaaggaggacagcaagcccaccttcccctggccccccggcaacaagcccagcctgcacagcgtgaaccaggaccacgacctgaagcccctgggccccaagagcggccccaccccccccaccagcgagaacgagcagaagcaggccttccccaagctgacctag

SEQ ID NO: 12949 - DNA, 405 bp, synthetic construct
  source 1..405: mol_type = other DNA; note = Synthetic coding sequence
atgagcgacgacgccggcgacaccctggccaccggcgacaaggccgaggtgaccgagatgcccaacagcgacagcctgcccgaggacgccgaggtgcactgcgacagcgccgccgtgagccacgagcccacccccgccgaccccagaggcgagggccacgagaacgccgccgtgcagggcgccggcgccgccgccatcggcccccccgtgcagccccaggacgccaacgccctggagccccccctgaacggcgacgtgaccgaggacaccctggccgagtgcatcgacagcgtgagcctggaggccgagcccagaagcgagatccccctgcaggagcagaactacctggccgtggacagcccccccagcggcggcggctgggccggctggggcagctggggctag

SEQ ID NO: 12950 - DNA, 432 bp, synthetic construct
  source 1..432: mol_type = other DNA; note = Synthetic coding sequence
atgaagagaggcagactgcccagcagcagcgaggacagcgacgacaacggcagcctgagcaccacctggagccagaacagcagaagccagcacagaagaagcagctgcagcagacacgaggacagaaagcccagcgaggtgttcagaaccgacctgatcaccgccatgaagctgcacgacagctaccagctgaaccccgacgagtactacgtgctggccgacccctggagacaggagtgggagaagggcgtgcaggtgcccgtgagccccggcaccatcccccagcccgtggccagagtggtgagcgaggagaagagcctgatgttcatcagacccaagaagtacatcgtgagcagcggcagcgagccccccgagctgggctacgtggacatcagaaccctggccgacagcgtgtgcagatacgacctgtag

SEQ ID NO: 12951 - DNA, 1200 bp, synthetic construct; identical to SEQ ID NO: 11147
  source 1..1200: mol_type = other DNA; note = Synthetic coding sequence

SEQ ID NO: 12952 - DNA, 240 bp, synthetic construct
  source 1..240: mol_type = other DNA; note = Synthetic coding sequence
atggacgagagcgccctgctggacctgctggagtgccccgtgtgcctggagagactggacgccagcgccaaggtgctgccctgccagcacaccttctgcaagagatgcctgctgggcatcgtgggcagcagaaacgagctgagatgccccgagtgcagaaccctggtgggcagcggcgtggaggagctgcccagcaacatcctgctggtgagactgctggacggcatcaagcagagatag

SEQ ID NO: 12953 - DNA, 621 bp, synthetic construct; identical to SEQ ID NO: 11427
  source 1..621: mol_type = other DNA; note = Synthetic coding sequence

SEQ ID NO: 12954 - DNA, 501 bp, synthetic construct
  source 1..501: mol_type = other DNA; note = Synthetic coding sequence
atgaaggccatcaagaagagcctgaccgaggaggagtacctgtacctggacttcagccaccagaccgagggctgcatcttccccctgcacaccagcgtgaccctgttcctgctgagctactgcgactgcaagatcttcaagatctgcctggtggtgaccaaggaggtgagcagagacagcagcctgctgagagacgacctgatccaggacgtggagatccagatcatcagcagacaggagctgccccccatcgtgcagaactgctgcctgcccgccgtggtggagagaagcgacaacttctgcagagccggcctggccgtggtgctgagacacatcatccagaagagctacgaggccgaccccctgaagaaggagctgctggagctgctgggcttcaagaagacctgcctgaaggcctgcgccgaggtgagccagtggaccagactgtgcgagctgaccatccccctggccatcgagaacttcctgagagagagcagctag

SEQ ID NO: 12955 - DNA, 363 bp, synthetic construct; identical to SEQ ID NO: 12890
  source 1..363: mol_type = other DNA; note = Synthetic coding sequence

SEQ ID NO: 12956 - DNA, 351 bp, synthetic construct
  source 1..351: mol_type = other DNA; note = Synthetic coding sequence
atggtgatggagaagcccagccccctgctggtgggcagagagttcgtgagacagtactacaccctgctgaacaaggcccccgagtacctgcacagattctacggcagaaacagcagctacgtgcacggcggcgtggacgccagcggcaagccccaggaggccgtgtacggccagaacgacatccaccacaaggtgctgagcctgaacttcagcgagtgccacaccaagatcagacacgtggacgcccacgccaccctgagcgacggcgtggtggtgcaggtgatgggcctgctgagcaacagcggccagcccgagagaaagttcatgcagaccttcgtgctggccccctag

SEQ ID NO: 12957 - DNA, 480 bp, synthetic construct
  source 1..480: mol_type = other DNA; note = Synthetic coding sequence
atgagcgaccacagatacggcgacggcggcagcaccttccagagcaccaccggccactgcgtgcacatgagaggcctgccctacagagccaccgagaacgacatctacaacttcttcagccccctgaaccccgtgagagtgcacatcgagatcggccccgacggcagagtgaccggcgaggccgacgtggagttcgccacccacgaggacgccgtggccgccatgagcaaggacaaggccaacatgcagcacagatacgtggagctgttcctgaacagcaccgccggcgccagcggcggcgcctacggcagccagatgctgggcggcatgggcctgagcaaccagagcagctacggcggccccgccagccagcagctgagcggcggctacggcggcggctacggcggccagagcagcatgagcggctacgaccaggtgctgcaggagaacagcagcgacttccagagcaacatcgcctag

SEQ ID NO: 12958 - DNA, 411 bp, synthetic construct; identical to SEQ ID NO: 12873
  source 1..411: mol_type = other DNA; note = Synthetic coding sequence

SEQ ID NO: 12959 - DNA, 462 bp, synthetic construct
  source 1..462: mol_type = other DNA; note = Synthetic coding sequence
atgaagctgaccagcgagaagctgcccaagaaccccttctacgccagcgtgagccagtacgccgccaagaaccagaagttcttccagtggaagaaggagaagaccgactacacccacgccaacctggtggacaaggccctgcagctgctgaaggagagaatcctgaagggcgacaccctggcctacttcctgagaggccagctgtacttcgaggagggctggtacgaggaggccctggagcagttcgaggagatcaaggagaaggaccaccaggccacctaccagctgggcgtgatgtactacgacggcctgggcaccaccctggacgccgagaagggcgtggactacatgaagaagatcctggacagcccctgccccaaggccagacacctgaagttcgccgccgcctacaacctgggcagagcctactacgagggcaagggcgtgaagagaagcaactag

SEQ ID NO: 12960 - DNA, 489 bp, synthetic construct
  source 1..489: mol_type = other DNA; note = Synthetic coding sequence
atggaggccctgctggagggcatccagaacagaggccacggcggcggcttcctgaccagctgcgaggccgagctgcaggagctgatgaagcagatcgacatcatggtggcccacaagaagagcgagtgggagggcagaacccacgccctggagacctgcctgaagatcagagagcaggagctgaagagcctgagaagccagctggacgtgacccacaaggaggtgggcatgctgcaccagcaggtggaggagcacgagaagatcaagcaggagatgaccatggagtacaagcaggagctgaagaagctgcacgaggagctgtgcatcctgaagagaagctacgagaagctgcagaagaagcagatgagagagttcagaggcaacaccaagaaccacagagaggacagaagcgagatcgagagactgaccgccaagatcgaggagttcagacagaagagcctggactgggagaagcagagactgatctag

SEQ ID NO: 12961 - DNA, 1530 bp, synthetic construct; identical to SEQ ID NO: 11778
  source 1..1530: mol_type = other DNA; note = Synthetic coding sequence

SEQ ID NO: 12962 - DNA, 90 bp, synthetic construct
  source 1..90: mol_type = other DNA; note = Synthetic coding sequence
atgaacggcagagccgacttcagagagcccaacgccgaggtgcccagacccatcccccacatcggccccgactacatccccaccgagtag

SEQ ID NO: 12963 - DNA, 1236 bp, synthetic construct
  source 1..1236: mol_type = other DNA; note = Synthetic coding sequence
atgatcgtgaacgactacgagggcaacgacagcgaggccgaggacctgaacttcagagagaccctgcccagcagcagccaggagaacacccccagaagcaaggtgttcgagaacaaggtgaacagcgagaaggtgaagctgagcctgagaaacttcccccacaacgactacgaggacgtgttcgaggagcccagcgagagcggcagcgaccccagcatgtggaccgccagaggccccttcagaagagacagatggagcagcgaggacgaggaggccgccggccccagccaggccctgagccccctgctgagcgacaccagaaagatcgtgagcgagggcgagctggaccagctggcccagatcagacccctgatcttcaacttccacgagcagaccgccatcaaggactgcctgaagatcctggaggagaagaccgccgcctacgacatcatgcaggagttcatggccctggagctgaagaacctgcccggcgagttcaacagcggcaaccagcccagcaacagagagaagaacagatacagagacatcctgccctacgacagcaccagagtgcccctgggcaagagcaaggactacatcaacgccagctacatcagaatcgtgaactgcggcgaggagtacttctacatcgccacccagggccccctgctgagcaccatcgacgacttctggcagatggtgctggagaacaacagcaacgtgatcgccatgatcaccagagagatcgagggcggcatcatcaagtgctaccactactggcccatcagcctgaagaagcccctggagctgaagcacttcagagtgttcctggagaactaccagatcctgcagtacttcatcatcagaatgttccaggtggtggagaagagcaccggcaccagccacagcgtgaagcagctgcagttcaccaagtggcccgaccacggcacccccgccagcgccgacagcttcatcaagtacatcagatacgccagaaagagccacctgaccggccccatggtggtgcactgcagcgccggcatcggcagaaccggcgtgttcctgtgcgtggacgtggtgttctgcgccatcgtgaagaactgcagcttcaacatcatggacatcgtggcccagatgagagagcagagaagcggcatggtgcagaccaaggagcagtaccacttctgctacgacatcgtgctggaggtgctgagaaagctgctgaccctggactag

SEQ ID NO: 12964 - DNA, 300 bp, synthetic construct
  source 1..300: mol_type = other DNA; note = Synthetic coding sequence
atggtgatggagaagcccagccccctgctggtgggcagagagttcgtgagacagtactacaccctgctgaacaaggcccccgagtacctgcacagattctacggcagaaacagcagctacgtgcacggcggcgtggacgccagcggcaagccccaggaggccgtgtacggccagaacgacatccaccacaaggtgctgagcctgaacttcagcgagtgccacaccaagatcagacacgtggacgcccacgccaccctgagcgacggcgtggtggtgcaggtgatgggcctgctgagctag

SEQ ID NO: 12965 - DNA, 705 bp, synthetic construct
  source 1..705: mol_type = other DNA; note = Synthetic coding sequence
atggccagcagcgccaagagcgccgagatgcccaccatcagcaagaccgtgaaccccacccccgacccccaccaggagtacctggaccccagaatcaccatcgccctgttcgagatcggcagccacagccccagcagctggggcagcctgcccttcctgaagaacagcagccaccaggtgaccgagcagcagaccgcccagaagttcaacaacctgctgaaggagatcaaggacatcctgaagaacatggccggcttcgaggagaagatcaccgaggccaaggagctgttcgaggagaccaacatcaccgaggacgtgagcgcccacaaggagaacatcagaggcctggacaagatcaacgagatgctgagcaccaacctgcccgtgagcctggcccccgagaaggaggacaacgagaagaagcaggagatgatcctggagaccaacatcaccgaggacgtgagcgcccacaaggagaacatcagaggcctggacaagatcaacgagatgctgagcaccaacctgcccgtgagcctggcccccgagaaggaggacaacgagaagaagcagcagatgatcatggagaaccagaacagcgagaacaccgcccaggtgttcgccagagacctggtgaacagactggaggagaagaaggtgctgaacgagacccagcagagccaggagaaggccaagaacagactgtag

SEQ ID NO: 12966 - DNA, 1095 bp, synthetic construct
  source 1..1095: mol_type = other DNA; note = Synthetic coding sequence
atgtacttctgctggggcgccgacagcagagagctgcagagaagaagaaccgccggcagccccggcgccgagctgctgcaggccgccagcggcgagagacacagcctgctgctgctgaccaaccacagagtgctgagctgcggcgacaacagcagaggccagctgggcagaagaggcgcccagagaggcgagctgcccgagcccatccaggccctggagaccctgatcgtggacctggtgagctgcggcaaggagcacagcctggccgtgtgccacaagggcagagtgttcgcctggggcgccggcagcgagggccagctgggcatcggcgagttcaaggagatcagcttcacccccaagaagatcatgaccctgaacgacatcaagatcatccaggtgagctgcggccactaccacagcctggccctgagcaaggacagccaggtgttcagctggggcaagaacagccacggccagctgggcctgggcaaggagttccccagccaggccagcccccagagagtgagaagcctggagggcatccccctggcccaggtggccgccggcggcgcccacagcttcgccctgagcctgtgcggcaccagcttcggctggggcagcaacagcgccggccagctggccctgagcggcagaaacgtgcccgtgcagagcaacaagcccctgagcgtgggcgccctgaagaacctgggcgtggtgtacatcagctgcggcgacgcccacaccgccgtgctgacccaggacggcaaggtgttcaccttcggcgacaacagaagcggccagctgggctacagccccacccccgagaagagaggcccccagctggtggagagaatcgacggcctggtgagccagatcgactgcggcagctaccacaccctggcctacgtgcacaccaccggccaggtggtgagcttcggccacggccccagcgacaccagcaagcccacccaccccgaggccctgaccgagaacttcgacatcagctgcctgatcagcgccgaggacttcgtggacgtgcaggtgaagcacatcttcgccggcacctacgccaacttcgtgaccacccaccagtag

SEQ ID NO: 12967 - DNA, 348 bp, synthetic construct
  source 1..348: mol_type = other DNA; note = Synthetic coding sequence
atggccaagtacaacaccggcggcaaccccaccgaggacgtgagcgtgaacagcagacccttcagagtgaccggccccaacagcagcagcggcatccaggccagaaagaacctgttcaacaaccagggcaacgccagcccccccgccggccccagcaacgtgcccaagttcggcagccccaagccccccgtggccgtgaagcccagcagcgaggagaagcccgacaaggagcccaagccccccttcctgaagcccaccggcgccggccagagattcggcacccccgccagcctgaccaccagagaccccgaggccaaggtgggcttcctgaagcccgtgggcccctag

SEQ ID NO: 12968 - DNA, 486 bp, synthetic construct
  source 1..486: mol_type = other DNA; note = Synthetic coding sequence
atggccggcatcctgagactggtggtgcagtggccccccggcagactgcagaccgtgaccaagggcgtggagagcctgatctgcaccgactggatcagacacaagttcaccagaagcagaatccccgagaaggtgttccaggccagccccgaggaccacgagaagtacggcggcgacccccagaacccccacaagctgcacatcgtgaccagaatcaagagcaccagaagaagaccctactgggagaaggacatcatcaagatgctgggcctggagaaggcccacaccccccaggtgcacaagaacatccccagcgtgaacgccaagctgaaggtggtgaagcacctgatcagaatcaagcccctgaagctgccccagggcctgcccgccgaggagaacatgagcaacacctgcctgaagagcaccggcgagctggtggtgcagtggcacctgaagcccgtggagcagaaggcccacgagagctag

SEQ ID NO: 12969 - DNA, 516 bp, synthetic construct
  source 1..516: mol_type = other DNA; note = Synthetic coding sequence
atgaacggcagagccgacttcagagagcccaacgccgaggtgcccagacccatcccccacatcggccccgactacatccccaccgaggaggagagaagagtgttcgccgagtgcaacgacgagagcttctggttcagaagcgtgcccctggccgccaccagcatgctgatcacccagggcctgatcagcaagggcatcctgagcagccaccccaagtacggcagcatccccaagctgatcctggcctgcatcatgggctacttcgccggcaagctgagctacgtgaagacctgccaggagaagttcaagaagctggagaacagccccctgggcgaggccctgagaagcggccaggccagaagaagcagcccccccggccactactaccagaagagcaagtacgacagcagcgtgagcggccagagcagcttcgtgaccagccccgccgccgacaacatcgagatgctgccccactacgagcccatccccttcagcagcagcatgaacgagagctag

SEQ ID NO: 12970 - DNA, 438 bp, synthetic construct; identical to SEQ ID NO: 12853
  source 1..438: mol_type = other DNA; note = Synthetic coding sequence

SEQ ID NO: 12971 - DNA, 243 bp, synthetic construct
  source 1..243: mol_type = other DNA; note = Synthetic coding sequence
atggtgaccagcctgaacgaggacaacgagagcgtgaccgtggagtggatcgagaacggcgacaccaagggcaaggagatcgacctggagagcatcttcagcctgaaccccgacctggtgcccgacgaggagatcgagcccagccccgagaccccccccccccccgccagcagcgccaaggtgaacaagatcgtgaagaacagaagaaccgtggccagcatcaagaacgacccccccagctag

SEQ ID NO: 12972 - DNA, 123 bp, synthetic construct
  source 1..123: mol_type = other DNA; note = Synthetic coding sequence
atgaaggccatcaagaagagcctgaccgaggaggagtacctgtacctggacttcagccaccagaccgagggctgcatcttccccctgcacaccagcgtgaccctgttcctgctgagctactag

SEQ ID NO: 12973 - DNA, 192 bp, synthetic construct
  source 1..192: mol_type = other DNA; note = Synthetic coding sequence
atggaggccctgctggagggcatccagaacagaggccacggcggcggcttcctgaccagctgcgaggccgagctgcaggagctgatgaagcagatcgacatcatggtggcccacaagaagagcgagtgggagggcagaacccacgccctggagacctgcctgaagatcagagagcaggagctgaagagctag

SEQ ID NO: 12974 - DNA, 594 bp, synthetic construct
  source 1..594: mol_type = other DNA; note = Synthetic coding sequence
atgtggaccgccagaggccccttcagaagagacagatggagcagcgaggacgaggaggccgccggccccagccaggccctgagccccctgctgagcgacaccagaaagatcgtgagcgagggcgagctggaccagctggcccagatcagacccctgatcttcaacttccacgagcagaccgccatcaaggactgcctgaagatcctggaggagaagaccgccgcctacgacatcatgcaggagttcatgaccggcaccagccacagcgtgaagcagctgcagttcaccaagtggcccgaccacggcacccccgccagcgccgacagcttcatcaagtacatcagatacgccagaaagagccacctgaccggccccatggtggtgcactgcagcgccggcatcggcagaaccggcgtgttcctgtgcgtggacgtggtgttctgcgccatcgtgaagaactgcagcttcaacatcatggacatcgtggcccagatgagagagcagagaagcggcatggtgcagaccaaggagcagtaccacttctgctacgacatcgtgctggaggtgctgagaaagctgctgaccctggactag

SEQ ID NO: 12975 - DNA, 2529 bp, synthetic construct
  source 1..2529: mol_type = other DNA; note = Synthetic coding sequence
atgaagagaggcagactgcccagcagcagcgaggacagcgacgacaacggcagcctgagcaccacctggagccagaacagcagaagccagcacagaagaagcagctgcagcagacacgaggacagaaagcccagcgaggtgttcagaaccgacctgatcaccgccatgaagctgcacgacagctaccagctgaaccccgacgagtactacgtgctggccgacccctggagacaggagtgggagaagggcgtgcaggtgcccgtgagccccggcaccatcccccagcccgtggccagagtggtgagcgaggagaagagcctgatgttcatcagacccaagaagtacatcgtgagcagcggcagcgagccccccgagctgggctacgtggacatcagaaccctggccgacagcgtgtgcagatacgacctgaacgacatggacgccgcctggctggagctgaccaacgaggagttcaaggagatgggcatgcccgagctggacgagtacaccatggagagagtgctggaggagttcgagcagagatgctacgacaacatgaaccacgccatcgagaccgaggagggcctgggcatcgagtacgacgaggacgtggtgtgcgacgtgtgccagagccccgacggcgaggacggcaacgagatggtgttctgcgacaagtgcaacatctgcgtgcaccaggcctgctacggcatcctgaaggtgcccgagggcagctggctgtgcagaacctgcgccctgggcgtgcagcccaagtgcctgctgtgccccaagaagggcggcgccatgaagcccaccagaagcggcaccaagtgggtgcacgtgagctgcgccctgtggatccccgaggtgagcatcggcagccccgagaagatggagcccatcaccaaggtgagccacatccccagcagcagatgggccctggtgtgcagcctgtgcaacgagaagttcggcgccagcatccagtgcagcgtgaagaactgcagaaccgccttccacgtgacctgcgccttcgacagaggcctggagatgaagaccatcctggccgagaacgacgaggtgaagttcaagagctactgccccaagcacagcagccacagaaagcccgaggagagcctgggcaagggcgccgcccaggagaacggcgcccccgagtgcagccccagaaaccccctggagcccttcgccagcctggagcagaacagagaggaggcccacagagtgagcgtgagaaagcagaagctgcagcagctggaggacgagttctacaccttcgtgaacctgctggacgtggccagagccctgagactgcccgaggaggtggtggacttcctgtaccagtactggaagctgaagagaaaggtgaacttcaacaagcccctgatcacccccaagaaggacgaggaggacaacctggccaagagagagcaggacgtgctgttcagaagactgcagctgttcacccacctgagacaggacctggagagagtgagaaacctgacctacatggtgaccagaagagagaagatcaagagaagcgtgtgcaaggtgcaggagcagatcttcaacctgtacaccaagctgctggagcaggagagagtgagcggcgtgcccagcagctgcagcagcagcagcctggagaacatgctgctgttcaacagccccagcgtgggccccgacgcccccaagatcgaggacctgaagtggcacagcgccttcttcagaaagcagatgggcaccagcctggtgcacagcctgaagaagccccacaagagagaccccctgcagaacagccccggcagcgagggcaagaccctgctgaagcagcccgacctgtgcggcagaagagagggcatggtggtgcccgagagcttcctgggcctggagaagaccttcgccgaggccagactgatcagcgcccagcagaagaacggcgtggtgatgcccgaccacggcaagagaagagacaacagattccactgcgacctgatcaagggcgacctgaaggacaagagcttcaagcagagccacaagcccctgagaagcaccgacgtgagccagagacacctggacaacaccagagccgccaccagccccggcgtgggccagagcgcccccggcaccagaaaggagatcgtgcccaagtgcaacggcagcctgatcaaggtgaactacaaccagaccgccgtgaaggtgcccaccacccccgccagccccgtgaagaactggggcggcttcagaatccccaagaagggcgagagacagcagcagggcgaggcccacgacggcgcctgccaccagcacagcgactacccctacctgggcctgggcagagtgcccgccaaggagagagccaagagcaagctgaagagcgacaacgagaacgacggctacgtgcccgacgtggagatgagcgacagcgagagcgaggccagcgagaagaagtgcatccacaccagcagcaccatcagcagaagaaccgacatcatcagaagaagcatcctggccagctag

SEQ ID NO: 12976 - DNA, 2490 bp, synthetic construct; identical to SEQ ID NO: 12891
  source 1..2490: mol_type = other DNA; note = Synthetic coding sequence

SEQ ID NO: 12977 - DNA, 810 bp, synthetic construct
  source 1..810: mol_type = other DNA; note = Synthetic coding sequence
atgatcgtgaacgactacgagggcaacgacagcgaggccgaggacctgaacttcagagagaccctgcccagcagcagccaggagaacacccccagaagcaaggtgttcgagaacaaggtgaacagcgagaaggtgaagctgagcctgagaaacttcccccacaacgactacgaggacgtgttcgaggagcccagcgagagcggcagcgaccccagcatgtggaccgccagaggccccttcagaagagacagatggagcagcgaggacgaggaggccgccggccccagccaggccctgagccccctgctgagcgacaccagaaagatcgtgagcgagggcgagctggaccagctggcccagatcagacccctgatcttcaacttccacgagcagaccgccatcaaggactgcctgaagatcctggaggagaagaccgccgcctacgacatcatgcaggagttcatgaccggcaccagccacagcgtgaagcagctgcagttcaccaagtggcccgaccacggcacccccgccagcgccgacagcttcatcaagtacatcagatacgccagaaagagccacctgaccggccccatggtggtgcactgcagcgccggcatcggcagaaccggcgtgttcctgtgcgtggacgtggtgttctgcgccatcgtgaagaactgcagcttcaacatcatggacatcgtggcccagatgagagagcagagaagcggcatggtgcagaccaaggagcagtaccacttctgctacgacatcgtgctggaggtgctgagaaagctgctgaccctggactag

SEQ ID NO: 12978 - DNA, 492 bp, synthetic construct
  source 1..492: mol_type = other DNA; note = Synthetic coding sequence
atgatgctgggcaccgagggcggcgagggcttcgtggtgaaggtgagaggcctgccctggagctgcagcgccgacgaggtgcagagattcttcagcgactgcaagatccagaacggcgcccagggcatcagattcatctacaccagagagggcagacccagcggcgaggccttcgtggagctggagagcgaggacgaggtgaagctggccctgaagaaggacagagagaccatgggccacagatacgtggaggtgttcaagagcaacaacgtggagatggactgggtgctgaagcacaccggccccaacagccccgacaccgccaacgacggcttcgtgagactgagaggcctgcccttcggctgcagcaaggaggagatcgtgcagttcttcagcggcctggagatcgtgcccaacggcatcaccctgcccgtggacttccagggcagaagcaccggcgaggccttcgtgcagttcgccagccaggagtag

SEQ ID NO: 12979 - DNA, 759 bp, synthetic construct
  source 1..759: mol_type = other DNA; note = Synthetic coding sequence
atggccgccaccgccagagaggacggcgccagcggccaggagagaggccagagaggctgcgagcactacgacagaggctgcctgctgaaggccccctgctgcgacaagctgtacacctgcagactgtgccacgacaacaacgaggaccaccagctggacagattcaaggtgaaggaggtgcagtgcatcaactgcgagaagatccagcacgcccagcagacctgcgaggagtgcagcaccctgttcggcgagtactactgcgacatctgccacctgttcgacaaggacaagaagcagtaccactgcgagaactgcggcatctgcagaatcggccccaaggaggacttcttccactgcctgaagtgcaacctgtgcctggccatgaacctgcagggcagacacaagtgcatcgagaacgtgagcagacagaactgccccatctgcctggaggacatccacaccagcagagtggtggcccacgtgctgccctgcggccacctgctgcacagaggctacagatgccccctgtgcatgcacagcgccctggacatgaccagatactggagacagctggacgacgaggtggcccagacccccatgcccagcgagtaccagaacatgaccgtggacatcctgtgcaacgactgcaacggcagaagcaccgtgcagttccacatcctgggcatgaagtgcaagatctgcgagagctacaacaccgcccaggccggcggcagaagaatcagcctggaccagcagtag

SEQ ID NO: 12980 - DNA, 594 bp, synthetic construct; identical to SEQ ID NO: 12974
  source 1..594: mol_type = other DNA; note = Synthetic coding sequence

SEQ ID NO: 12981 - DNA, 4203 bp, synthetic construct
  source 1..4203: mol_type = other DNA; note = Synthetic coding sequence
tgacccccccccccccccccccccatgtggaaccccatgatccccgccttcgacctgttccagggcaaccacggcttcgtggcccccgtggtgaccaccgccgcccactggagaagcgtgaactacaccttcccccccagcgtgatcagccacaccagccccaccaaggtgtggagaaacaaggacggcaccagcgcctaccaggtgcaggagacccccgtgagccaggtggtgagaaagaagaccagctacgtgggcctggtgctggtgctgctgagaggcctgcccggcagcggcaagagcttcctggccagaaccctgcaggaggacaaccccagcggcgtgatcctgagcaccgacgactacttctacatcaacggccagtaccagttcgacgtgaagtacctgggcgaggcccacgagtggaaccagaacagagccaaggaggccttcgagaagaagatcagccccatcatcatcgacaacaccaacctgcaggcctgggagatgaagccctacgtggccctgagccagaagcacaagtacaaggtgctgttcagagagcccgacacctggtggaagttcaagcccaaggagctggccagaagaaacatccacggcgtgagcaaggagaagatcaccagaatgctggagcactaccagagattcgtgagcgtgcccatcatcatgagcagcagcgtgcccgagaagatcgagagaatcgagctgtgcgcctacagctgcgaggacagaagcaccagccccagagacgacgaggacatcatcagcgagaaggaggagaacatcctgagcctgagcctgaagcacctggagttcaccgaggagaagaacctggacgtgaccaaggagaccatgctgcccgagaacgtggcctacctgagcaacgccgacctgaacaagagaagaaaggagatcagcgacatgaaccccagcatccagagcgccctgatcctggagaccccccacatgtacttcagcgacagcgagagcaagctgcaggccaccgacaagagcgagaacgagcagatcgagatggtggccgtgaagggctacagcaagaccgacaccgacagcagcatggagagagtgagccccagcacctgctgcagcgagaacaaccaggaggactgcgacctggccaacagcggccccctgcagaacgagaagagcagccccggcgagatcgtggaggagagagccaccgtgaccaagaaggccttcggcaagcagaagagcaagagcaccctggagaagttccccagacacgagctgagcaacttcgtgggcgactggcccgtggacaagaccatcggccagagaaccaagagaaacagaaagaccgagaagaccagcagcgtgcagagcgacaagaagtacaactacccccagagccacaagctggtgaacagcgtgagcgtgaacaccgactgcgtgcagcagagaggcagcccccacgagagcgtggaggacggcagaaagagccagtgcgacgacgccagcgagcccctgaacagctacaagtacgacgcctacaagaacatcgacaagaacagcttcaacatcatgggcgactggcccagcagcgacagcctggcccagagagagcacagaagcagaatgcccaagaccggcctgagcgagcccaacctggagatcggcaccaacgacaagatgaacgagatcagcctgagcaccgcccacgaggcctgctggggcaccagcagccagaagctgaagaccctgggcagcagcaacctgggcagcagcgagatgctgctgagcgagatgacctgcgagagccagacctgcctgagcaagaagagccacggccagcacaccagcctgcccctgaccttcaccaacagcgcccccaccgtgagcggcgtggtggagccccagaccctggccgagtgccaggagcagatgcccaagagagaccccggcaaggaggtgggcatgtgcacccagaccgagccccaggacttcgccctgctgtggaagatcgagaagaacaagatcagcatcagcgacagcatcaaggtgctgaccggcagactggacggcttcaagcccaaggtgttcaacatcaacaccaagagcgacgtgcaggaggccatcccctacagagtgatgtacgacaagagcaccttcgtggaggagagcgagctgaccagcgccgacgagagcgagaacctgaacatcctgtgcaagctgttcggcagcttcagcctggaggccctgaaggacctgtacgagagatgcaacaaggacatcatctgggccaccagcctgctgctggacagcgagaccaagctgtgcgaggacaccgagttcgagaacttccagaagagctgcgacggcagccagatcggccccttcagcctgggcctgaacctgaaggagatcatcagccagagaggcaccctggagaacagcaacagccccgtgcccgagttcagccacggcatcggcatcagcaacgccgacagccagagcacctgcgacgccgagagaggcaacagcgagcaggccgagatgagagccgtgacccccgagaaccacgagagcatgaccagcatcttccccagcgccgccgtgggcctgaagaacaacaacgacatcctgcccaacagccaggaggagctgctgtacagcagcaagcagagcttccccggcatcctgaaggccaccacccccaaggacatgagcgagaccgagaagaacctggtggtgaccgagaccggcgacaacatccacagccccagccacttcagcgacatcttcaacttcgtgagcagcaccagcaacctggagctgaacgaggagatctacttcaccgacagcctggagatcaagagaaacgagaacttccccaaggactacgtgaagttcagcgacgaggaggagttcatgaacgaggacgagaaggagatgaaggagatcctgatggccggcagcagcctgagcgccggcgtgagcggcgaggacaagaccgagatcctgaaccccacccccgccatggccaagagcctgaccatcgactgcctggagctggccctgccccccgagctggccttccagctgaacgagctgttcggccccgtgggcatcgacagcggcagcctgaccgtggaggactgcgtggtgcacatcgacctgaacctggccaaggtgatccacgagaagtggaaggagagcgtgatggagagacagagacaggaggaggtgagctgcggcaagttcatgcaggaccccagcctggtgggccacaccggcctggacaaccccgagcagaagagcagccagagaaccggcaagaagctgctgaagaccctgaccgccagcgagatgctgcccctgctggaccactggaacacccagaccaagaaggtgagcctgagagagatcatgagcgaggagatcgccctgcaggagaagcacaacctgaagagagagaccctgatgttcgagaaggactgcgccaccaagctgaaggagaagcagctgttcaagatcttccccgccatcaaccagaacttcctggtggacatcttcaaggaccacaactacagcctggagcacaccgtgcagttcctgaactgcgtgctggagggcgaccccgtgaagaccgtggtggcccaggagttcgtgcaccagaacgagaacgtgaccagccacaccggccagaagagcaaggagaagaaggacttcgagtaccccgactacgacgactacagagccgaggccttcctgcaccagcagaagagaatggagtgctacagcaaggccaaggaggcctacagaatcggcaagaagaacgtggccaccttctacgcccagcagggcaccctgcacgagcagaagatgaaggaggccaaccacctggccgccatcgagatcttcgagaaggtgaacgccagcctgctgccccagaacgtgctggacctgcacggcctgcacgtggacgaggccctggagcacctgatgagagtgctggagaagaagaccgaggagttcaagcagaacggcggcaagccctacctgagcgtgatcaccggcagaggcaaccacagccagggcggcgtggccagaatcaagcccgccgtgatcaagtacctgatcagccacagcttcagattcagcgagatcaagcccggctgcctgaaggtgatgctgaagtag

SEQ ID NO: 12982 - DNA, 237 bp, synthetic construct
  source 1..237: mol_type = other DNA; note = Synthetic coding sequence
atgctgtgctggggctactggagcctgggccagcccggcatcagcaccaacctgcagggcatcgtggccgagccccaggtgtgcggcttcatcagcgacagaagcgtgaaggaggtggcctgcggcggcaaccacagcgtgttcctgctggaggacggcgaggtgtacacctgcggcctgaacaccaagggccagctgggccacgagagagagggcaacaagcccgagcagatctag

SEQ ID NO: 12983 - DNA, 738 bp, synthetic construct; identical to SEQ ID NO: 9467
  source 1..738: mol_type = other DNA; note = Synthetic coding sequence

SEQ ID NO: 12984 - DNA, 2112 bp, synthetic construct; identical to SEQ ID NO: 10172
  source 1..2112: mol_type = other DNA; note = Synthetic coding sequence

SEQ ID NO: 12985 - DNA, 573 bp, synthetic construct
  source 1..573: mol_type = other DNA; note = Synthetic coding sequence
atggccggcaccgccagacacgacagagagatggccatccaggccaagaagaagctgaccaccgccaccgaccccatcgagagactgagactgcagtgcctggccagaggcagcgccggcatcaagggcctgggcagagtgttcagaatcatggacgacgacaacaacagaaccctggacttcaaggagttcatgaagggcctgaacgactacgccgtggtgatggagaaggaggaggtggaggagctgttcagaagattcgacaaggacggcaacggcaccatcgacttcaacgagttcctgctgaccctgagaccccccatgagcagagccagaaaggaggtgatcatgcaggccttcagaaagctggacaagaccggcgacggcgtgatcaccatcgaggacctgagagaggtgtacaacgccaagcaccaccccaagtaccagaacggcgagtggagcgaggagcaggtgttcagaaagttcctggacaacttcgacagcccctacgacaaggacggcctggtgacccccgaggagttcatgaactactacgccggcgtgagcgcctag

SEQ ID NO: 12986 - DNA, 231 bp, synthetic construct
  source 1..231: mol_type = other DNA; note = Synthetic coding sequence
atgacccccccccagcagcccccccccctgagaagcgagcccggcaccctgggcagcgccgccagcagctacagccccctgggcctgaacggcgtgcccggcagcatctgggacttcgtgagcggcagcttcagccccagccccagccccatcctgagcgccggcccccccagcagcagcagcgccagccccaacggcgccgagctggccagagtgagaagacagctgtag

SEQ ID NO: 12987 - DNA, 108 bp, synthetic construct
  source 1..108: mol_type = other DNA; note = Synthetic coding sequence
atggccaccctggtggtgaacaagctgggcgccggcgtggacagcggcagacagggcagcagaggcaccgccgtggtgaaggtgctggagtgcggcgtgtgcgagtag

SEQ ID NO: 12988 - DNA, 477 bp, synthetic construct
  source 1..477: mol_type = other DNA; note = Synthetic coding sequence
atggaggccgacatcatcaccaacctgagatgcagactgaaggaggccgaggaggagagactgaaggccgcccagtacggcctgcagctggtggagagccagaacgagctgcagaaccagctggacaagtgcagaaacgagatgatgaccatgaccgagagctacgagcaggagaagtacaccctgcagagagaggtggagctgaagagcagaatgctggagagcctgagctgcgagtgcgaggccatcaagcagcagcagaagatgcacctggagaagctggaggagcagctgagcagaagccacggccaggaggtgaacgagctgaagaccaagatcgagaagctgaaggtggagctggacgaggccagactgagcgagaagcagctgaagcaccaggtggaccaccagaaggagctgctgagctgcaagagcgaggagctgagagtgatgagcgagagagtgcaggagagctag

SEQ ID NO: 12989 - DNA, 393 bp, synthetic construct
  source 1..393: mol_type = other DNA; note = Synthetic coding sequence
atggcccagaccgacaagcccacctgcatcccccccgagctgcccaagatgctgaaggagttcgccaaggccgccatcagagcccagccccaggacctgatccagtggggcgccgactacttcgaggccctgagcagaggcgagaccccccccgtgagagagagaagcgagagagtggccctgtgcaactgggccgagctgacccccgagctgctgaagatcctgcacagccaggtggccggcagactgatcatcagagccgaggagctggcccagatgtggaaggtggtgaacctgcccaccgacctgttcaacagcgtgatgaacgtgggcagattcaccgaggagatcgagtggctgaagttcctggccctggcctgcagcgccctgtag

SEQ ID NO: 12990 - DNA, 693 bp, synthetic construct
  source 1..693: mol_type = other DNA; note = Synthetic coding sequence
atggaggccgacatcatcaccaacctgagatgcagactgaaggaggccgaggaggagagactgaaggccgcccagtacggcctgcagctggtggagagccagaacgagctgcagaaccagctggacaagtgcagaaacgagatgatgaccatgaccgagagctacgagcaggagaagtacaccctgcagagagaggtggagctgaagagcagaatgctggagagcctgagctgcgagtgcgaggccatcaagcagcagcagaagatgcacctggagaagctggaggagcagctgagcagaagccacggccaggaggtgaacgagctgaagaccaagatcgagaagctgaaggtggagctggacgaggccagactgagcgagaagcagctgaagcaccaggtggaccaccagaaggagctgctgagctgcaagagcgaggagctgagagtgatgagcgagagagtgcaggagagcatgagcagcgagatgctggccctgcagatcgagctgaccgagatggagagcatgaagaccaccctgaaggaggaggtgaacgagctgcagtacagacaggagcagctggagctgctgatcaccaacctgatgagacaggtggacagactgaaggaggagaaggaggagagagagaaggaggccgtgagctactacaacgccctggagaaggccagatag

SEQ ID NO: 12991 - DNA, 639 bp, synthetic construct; identical to SEQ ID NO: 9337
  source 1..639: mol_type = other DNA; note = Synthetic coding sequence

SEQ ID NO: 12992 - DNA, 2844 bp, synthetic construct
  source 1..2844: mol_type = other DNA; note = Synthetic coding sequence
atgaacttcctgagaggcgtgatgggcggccagagcgccggcccccagcacaccgaggccgagaccgtgagaggcgccgccgaccccaaggtgaccagcagctgcggcctgaagttcagacacagcttcagactggtgaagcacatcctgtaccacgtgaccatcaacgtgtacagcgacagcgagatcatcggctacgccctggacaccctgtacaacatcatcagcaacgaggaggaggaggaggtggaggagaacagcaccagacagagcgaggacctgggcagccagttcaccgagatcttcatcaagcagcaggagaacgtgaccctgctgctgagcctgctggaggagttcgacttccacgtgagatggcccggcgtgaagctgctgaccagcctgctgaagcagctgggcccccaggtgcagcagatcatcctggtgagccccatgggcgtgagcagactgatggacctgctggccgacagcagagaggtgatcagaaacgacggcgtgctgctgctgcaggccctgaccagaagcaacggcgccatccagaagatcgtggccttcgagaacgccttcgagagactgctggacatcatcagcgaggagggcaacagcgacggcggcatcgtggtggaggactgcctgatcctgctgcagaacctgctgaagaacaacaacagcaaccagaacttcttcaaggagggcagctacatccagagaatgaagccctggttcgaggtgggcgacgagaacagcggctggagcgcccagaaggtgaccaacctgcacctgatgctgcagctggtgagagtgctggtgagccccaccaacccccccggcgccaccagcagctgccagaaggccatgttccagtgcggcctgctgcagcagctgtgcaccatcctgatggccaccggcgtgcccgccgacatcctgaccgagaccatcaacaccgtgagcgaggtgatcagaggctgccaggtgaaccaggactacttcgccagcgtgaacgcccccagcaacccccccagacccgccatcgtggtgctgctgatgagcatggtgaacgagagacagcccttcgtgctgagatgcgccgtgctgtactgcttccagtgcttcctgtacaagaaccagaagggccagggcgagatcgtgagcaccctgctgcccagcaccatcgacgccaccggcaacagcgtgagcgccggccagctgctgtgcggcggcctgttcagcaccgacagcctgagcaactggtgcgccgccgtggccctggcccacgccctgcaggagaacgccacccagaaggagcagctgctgagagtgcagctggccaccagcatcggcaacccccccgtgagcctgctgcagcagtgcaccaacatcctgagccagggcagcaagatccagaccagagtgggcctgctgatgctgctgtgcacctggctgagcaactgccccatcgccgtgacccacttcctgcacaacagcgccaacgtgcccttcctgaccggccagatcgccgagaacctgggcgaggaggagcagctggtgcagggcctgtgcgccctgctgctgggcatcagcatctacttcaacgacaacagcctggagagctacatgaaggagaagctgaagcagctgatcgagaagagaatcggcaaggagaacttcatcgagaagctgggcttcatcagcaagcacgagctgtacagcagagccagccagaagccccagcccaacttccccagccccgagtacatgatcttcgaccacgagttcaccaagctggtgaaggagctggagggcgtgatcaccaaggccatctacaagagcagcgaggaggacaagaaggaggaggaggtgaagaagaccctggagcagcacgacaacatcgtgacccactacaagaacatgatcagagagcaggacctgcagctggaggagctgagacagcaggtgagcaccctgaagtgccagaacgagcagctgcagaccgccgtgacccagcaggtgagccagatccagcagcacaaggaccagtacaacctgctgaagatccagctgggcaaggacaaccagcaccagggcagctacagcgagggcgcccagatgaacggcatccagcccgaggagatcggcagactgagagaggagatcgaggagctgaagagaaaccaggagctgctgcagagccagctgaccgagaaggacagcatgatcgagaacatgaagagcagccagaccagcggcaccaacgagcagagcagcgccatcgtgagcgccagagacagcgagcaggtggccgagctgaagcaggagctggccaccctgaagagccagctgaacagccagagcgtggagatcaccaagctgcagaccgagaagcaggagctgctgcagaagaccgaggccttcgccaagagcgtggaggtgcagggcgagaccgagaccatcatcgccaccaagaccaccgacgtggagggcagactgagcgccctgctgcaggagaccaaggagctgaagaacgagatcaaggccctgagcgaggagagaaccgccatcaaggagcagctggacagcagcaacagcaccatcgccatcctgcagaccgagaaggacaagctggagctggagatcaccgacagcaagaaggagcaggacgacctgctggtgctgctggccgaccaggaccagaagatcctgagcctgaagaacaagctgaaggacctgggccaccccgtggaggaggaggacgagctggagagcggcgaccaggaggacgaggacgacgagagcgaggaccccggcaaggacctggaccacatctag

SEQ ID NO: 12993 - DNA, 1095 bp, synthetic construct; identical to SEQ ID NO: 12864
  source 1..1095: mol_type = other DNA; note = Synthetic coding sequence

SEQ ID NO: 12994 - DNA, 1236 bp, synthetic construct; identical to SEQ ID NO: 12963
  source 1..1236: mol_type = other DNA; note = Synthetic coding sequence

SEQ ID NO: 12995 - DNA, 810 bp, synthetic construct; identical to SEQ ID NO: 12977
  source 1..810: mol_type = other DNA; note = Synthetic coding sequence

SEQ ID NO: 12996 - DNA, 360 bp, synthetic construct
  source 1..360: mol_type = other DNA; note = Synthetic coding sequence
atggccagccagctgcaggtgttcagcccccccagcgtgagcagcagcgccttctgcagcgccaagaagctgaagatcgagcccagcggctgggacgtgagcggccagagcagcaacgacaagtactacacccacagcaagaccctgcccgccacccagggccaggccaacagcagccaccaggtggccaacttcaacatccccgcctacgaccagggcctgctgctgcccgcccccgccgtggagcacatcgtggtgaccgccgccgacagcagcggcagcgccgccaccagcaccttccagagcagccagaccctgacccacagaagcaacgtgagcctgctggagccctaccagtag

SEQ ID NO: 12997 - DNA, 339 bp, synthetic construct; identical to SEQ ID NO: 12889
  source 1..339: mol_type = other DNA; note = Synthetic coding sequence

SEQ ID NO: 12998 - DNA, 54 bp, synthetic construct
  source 1..54: mol_type = other DNA; note = Synthetic coding sequence
atgaagagaggcagactgcccagcagcagcgaggacagcgacgacaacggctag

SEQ ID NO: 12999 - DNA, 810 bp, synthetic construct; identical to SEQ ID NO: 9299
  source 1..810: mol_type = other DNA; note = Synthetic coding sequence

SEQ ID NO: 13000 - DNA, 339 bp, synthetic construct
  source 1..339: mol_type = other DNA; note = Synthetic coding sequence
atgaacggcagagccgacttcagagagcccaacgccgaggtgcccagacccatcccccacatcggccccgactacatccccaccgaggaggagagaagagtgttcgccgagtgcaacgacgagagcttctggttcagaagcgtgcccctggccgccaccagcatgctgatcacccagggcctgatcagcaagggcatcctgagcagccaccccaagtacggcagcatccccaagctgatcctggcctgcatcatgggctacttcgccggcaagctgagctacgtgaagacctgccaggagaagttcaagaagctggagaacagccccctgggcgagtag

SEQ ID NO: 13001 - DNA, 687 bp, synthetic construct
  source 1..687: mol_type = other DNA; note = Synthetic coding sequence
atggaggagcagccccagatgcaggacgccgacgagcccgccgacagcggcggcgagggcagagccggcggccccccccaggtggccggcgcccaggccgcctgcagcgaggacagaatgaccctgctgctgagactgagagcccagaccaagcagcagctgctggagtacaagagcatggtggacgccagcgaggagaagacccccgagcagatcatgcaggagaagcagatcgaggccaagatcgaggacctggagaacgagatcgaggaggtgaaggtggccttcgagatcaagaagctggccctggacagcgtgctgatggacaacatgaagcacctgctggagctgaacaagctgatcatgaagagccagcaggagagctgggacctggaggagaagctgctggacatcagaaagaagagactgcagctgaagcaggccagcgagagcaagctgctggagatccagaccgagaagaacaagcagaagatcgacctggacagcatggagaacagcgagagaatcaagatcatcagacagaacctgcagatggagatcaagatcaccaccgtgatccagcacgtgttccagaacctgatcctgggcagcaaggtgaactgggccgaggaccccgccctgaaggagatcgtgctgcagctggagaagaacgtggacatgatgtag

SEQ ID NO: 13002 - DNA, 2352 bp, synthetic construct; identical to SEQ ID NO: 10346
  source 1..2352: mol_type = other DNA; note = Synthetic coding sequence

SEQ ID NO: 13003 - DNA, 393 bp, synthetic construct
  source 1..393: mol_type = other DNA; note = Synthetic coding sequence
atgatgctgggcaccgagggcggcgagggcttcgtggtgaaggtgagaggcctgccctggagctgcagcgccgacgaggtgcagagattcttcagcgactgcaagatccagaacggcgcccagggcatcagattcatctacaccagagagggcagacccagcggcgaggccttcgtggagctggagagcgaggacgaggtgaagctggccctgaagaaggacagagagaccatgggccacagatacgtggaggtgttcaagagcaacaacgtggagatggactgggtgctgaagcacaccggccccaacagccccgacaccgccaacgacggcttcgtgagactgagaggcctgcccttcggctgcagcaaggaggagatcgtgcagttctag

SEQ ID NO: 13004 - DNA, 267 bp, synthetic construct
  source 1..267: mol_type = other DNA; note = Synthetic coding sequence
atggaggccgacatcatcaccaacctgagatgcagactgaaggaggccgaggaggagagactgaaggccgcccagtacggcctgcagctggtggagagccagaacgagctgcagaaccagctggacaagtgcagaaacgagatgatgaccatgaccgagagctacgagcaggagaagtacaccctgcagagagaggtggagctgaagagcagaatgctggagagcctgagctgcgagtgcgaggccatcaagcagcagcagaagtag

SEQ ID NO: 13005 - DNA, 1902 bp, synthetic construct; identical to SEQ ID NO: 10526
  source 1..1902: mol_type = other DNA; note = Synthetic coding sequence

SEQ ID NO: 13006 - DNA, 597 bp, synthetic construct
  source 1..597: mol_type = other DNA; note = Synthetic coding sequence
atggccaccggcgacctgaagagaagcctgagaaacctggagcaggtgctgagactgctgaactaccccgaggaggtggactgcgtgggcctgatcaagggcgaccccgccgccagcctgcccatcatcagctacagcttcaccagctacagcccctacgtgaccgagctgatcatggagagcaacgtggagctgatcgccaagaacgacctgagattcatcgacgccgtgtacaagctgctgagagaccagttcaactacaagcccatcctgaccaagaagcagttcatccagtgcggcttcgccgagtggaagatccagatcgtgtgcgacatcctgaactgcgtgatgaagaagcacaaggagctgagcagcctgcagaagatccccagccagcagagaaagaagatcagcagcggcaagagcgagccccccctgggcaacgagaagatcagcgccgaggccgtgggcgtggacatcagcggcagattcatgaccagcggcaagaagaaggccgtggtgatcagacacctgtacaacgaggacaacgtggacatcagcgaggacaccctgagccccatcaccgacgtgaactag

SEQ ID NO: 13007 - DNA, 336 bp, synthetic construct
  source 1..336: mol_type = other DNA; note = Synthetic coding sequence
atggtgatggagaagcccagccccctgctggtgggcagagagttcgtgagacagtactacaccctgctgaacaaggcccccgagtacctgcacagattctacggcagaaacagcagctacgtgcacggcggcgtggacgccagcggcaagccccaggaggccgtgtacggccagaacgacatccaccacaaggtgctgagcctgaacttcagcgagtgccacaccaagatcagacacgtggacgcccacgccaccctgagcgacggcgtggtggtgcaggtgatgggcctgctgagcaacagcggccagcccgagagaaagttcatgcagacctag

SEQ ID NO: 13008 - DNA, 681 bp, synthetic construct; identical to SEQ ID NO: 10935
  source 1..681: mol_type = other DNA; note = Synthetic coding sequence

SEQ ID NO: 13009 - DNA, 1872 bp, synthetic construct
  source 1..1872: mol_type = other DNA; note = Synthetic coding sequence
atgagcgacgaggtgttcagcaccaccctggcctacaccaagagccccaaggtgaccaagagaaccaccttccaggacgagctgatcagagccatcaccgccagaagcgccagacagagaagcagcgagtacagcgacgacttcgacagcgacgagatcgtgagcctgggcgacttcagcgacaccagcgccgacgagaacagcgtgaacaagaagatgaacgacttccacatcagcgacgacgaggagaagaaccccagcaagctgctgttcctgaagaccaacaagagcaacggcaacatcaccaaggacgagcccgtgtgcgccatcaagaacgaggaggagatggcccccgacggctgcgaggacatcgtggtgaagagcttcagcgagagccagaacaaggacgaggagttcgagaaggacaagatcaagatgaagcccaagcccagaatcctgagcatcaagagcaccagcagcgccgagaacaacagcctggacaccgacgaccacttcaagcccagccccagacccagaagcatgctgaagaagaagagccacatggaggagaaggacggcctggaggacaaggagaccgccctgagcgaggagctggagctgcacagcgcccccagcagcctgcccacccccaacggcatccagctggaggccgagaagaaggccttcagcgagaacctggaccccgaggacagctgcctgaccagcctggccagcagcagcctgaagcagatcctgggcgacagcttcagccccggcagcgagggcaacgccagcggcaaggccgaccacgtgaccaccgccgtggagaagagcaaggagagccaggtgaccgccgacgacctggaggaggagaaggccaaggccgagctgatcatggacgacgacagaaccgtggaccccctgctgagcaagagccagagcatcctgatcagcaccagcgccaccgccagcagcaagaagaccatcgaggacagaaacatcaagaacaagaagagcaccaacaacagagccagcagcgccagcgccagactgatgaccagcgagttcctgaagaagagcagcagcaagagaagaacccccagcaccaccaccagcagccactacctgggcaccctgaaggtgctggaccagaagcccagccagaagcagagcatcgagcccgacagagccgacaacatcagagccgccgtgtaccaggagtggctggagaagaagaacgtgtacctgcacgagatgcacagaatcaagagaatcgagagcgagaacctgagaatccagaacgagcagaagaaggccgccaagagagaggaggccctggccagcttcgaggcctggaaggccatgaaggagaaggaggccaagaagatcgccgccaagaagagactggaggagaagaacaagaagaagaccgaggaggagaacgccgccagaaagggcgaggccctgcaggccttcgagaagtggaaggagaagaagatggagtacctgaaggagaagaacagaaaggagagagagtacgagagagccaagaagcagaaggaggaggagaccgtggccgagaagaagaaggacaacctgaccgccgtggagaagtggaacgagaagaaggaggccttcttcaagcagaaggagaaggagaagatcaacgagaagagaaaggaggagctgaagagagccgagaagaaggacaaggacaagcaggccatcaacgagtacgagaagtggctggagaacaaggagaagcaggagagaatcgagagaaagcagaagaagagacacagcttcctggagagcgaggccctgcccccctggagcccccccagcagaaccgtgttcgccaaggtgttctag

SEQ ID NO: 13010 - DNA, 255 bp, synthetic construct
  source 1..255: mol_type = other DNA; note = Synthetic coding sequence
atgatgctgggcaccgagggcggcgagggcttcgtggtgaaggtgagaggcctgccctggagctgcagcgccgacgaggtgcagagattcttcagcgactgcaagatccagaacggcgcccagggcatcagattcatctacaccagagagggcagacccagcggcgaggccttcgtggagctggagagcgaggacgaggtgaagctggccctgaagaaggacagagagaccatgggccacagatacgtggagtag

SEQ ID NO: 13011 - DNA, 993 bp, synthetic construct
  source 1..993: mol_type = other DNA; note = Synthetic coding sequence
atggaccagggcgacacccccaccctggaggaggacctgaagaagctgcagctgagcgagttcttcgacatcttcgagaaggagaaggtggacaaggaggccctggccctgtgcaccgacagagacctgcaggagatcggcatccccctgggccccagaaagaagatcctgaactacttcagcaccagaaagaacagcatgggcatcaagagacccgccccccagcccgccagcggcgccaacatccccaaggagagcgagttctgcagcagcagcaacaccagaaacggcgactacctggacgtgggcatcggccaggtgagcgtgaagtaccccagactgatctacaagcccgagatcttcttcgccttcggcagccccatcggcatgttcctgaccgtgagaggcctgaagagaatcgaccccaactacagattccccacctgcaagggcttcttcaacatctaccaccccttcgaccccgtggcctacagaatcgagcccatggtggtgcccggcgtggagttcgagcccatgctgatcccccaccacaagggcagaaagagaatgcacctggagctgagagagggcctgaccagaatgagcatggacctgaagaacaacctgctgggcagcctgagaatggcctggaagagcttcaccagagccccctaccccgccctgcaggccagcgagacccccgaggagaccgaggccgagcccgagagcaccagcgagaagcccagcgacgtgaacaccgaggagaccagcgtggccgtgaaggaggaggtgctgcccatcaacgtgggcatgctgaacggcggccagagaatcgactacgtgctgcaggagaagcccatcgagagcttcaacgagtacctgttcgccctgcagagccacctgtgctactgggagagcgaggacaccgtgctgctggtgctgaaggagatctaccagacccagggcatcttcctggaccagcccctgcagtag

SEQ ID NO: 13012 - DNA, 1383 bp, synthetic construct; identical to SEQ ID NO: 10506
  source 1..1383: mol_type = other DNA; note = Synthetic coding sequence

SEQ ID NO: 13013 - DNA, 1068 bp, synthetic construct
  source 1..1068: mol_type = other DNA; note = Synthetic coding sequence
atgaccggcagcgccgccgacacccacagatgcccccaccccaagggcgccaagggcaccagaagcagaagcagccacgccagacccgtgagcctggccaccagcggcggcagcgaggaggaggacaaggacggcggcgtgctgttccacgtgaacaagagcggcttccccatcgacagccacacctgggagagaatgtggatgcacgtggccaaggtgcaccccaagggcggcgagatggtgggcgccatcagaaacgccgccttcctggccaagcccagcatcccccaggtgcccaactacagactgagcatgaccatccccgactggctgcaggccatccagaactacatgaagaccctgcagtacaaccacaccggcacccagttcttcgagatcagaaagatgagacccctgagcggcctgatggagaccgccaaggagatgaccagagagagcctgcccatcaagtgcctggaggccgtgatcctgggcatctacctgaccaacggccagcccagcatcgagagattccccatcagcttcaagacctacttcagcggcaactacttccaccacgtggtgctgggcatctactgcaacggcagatacggcagcctgggcatgagcagaagagccgagctgatggacaagcccctgaccttcagaaccctgagcgacctgatcttcgacttcgaggacagctacaagaagtacctgcacaccgtgaagaaggtgaagatcggcctgtacgtgccccacgagccccacagcttccagcccatcgagtggaagcagctggtgctgaacgtgagcaagatgctgagagccgacatcagaaaggagctggagaagtacgccagagacatgagaatgaagatcctgaagcccgccagcgcccacagccccacccaggtgagaagcagaggcaagagcctgagccccagaagaagacaggccagcccccccagaagactgggcagaagagagaagagccccgccctgcccgagaagaaggtggccgacctgagcaccctgaacgaggtgggctaccagatcagaatctag

SEQ ID NO: 13014 - DNA, 384 bp, synthetic construct
  source 1..384: mol_type = other DNA; note = Synthetic coding sequence
atggccagcaaccacaagagcagcgccgccagacccgtgagcagaggcggcgtgggcctgaccggcagaccccccagcggcatcagacccctgagcggcaacatcagagtggccaccgccatgccccccggcaccgccagacccggcagcagaggctgccccatcggcaccggcggcgtgctgagcagccagatcaaggtggcccacagacccgtgacccagcagggcctgaccggcatgaagaccggcaccaagggcccccagagacagatcctggacaagagctactacctgggcctgctgagaagcaagatcagcgagctgaccaccgaggtgaacaagctgcagaagggcatcgagatgtacaaccaggagaacagctag

SEQ ID NO: 13015 - DNA, 510 bp, synthetic construct
  source 1..510: mol_type = other DNA; note = Synthetic coding sequence
atgcacaagctgcagagcggcatcggcagactgatcctgaaggaggagatgaaggccagaagcagcagctacgccgacccctggaccccccccagaagcagcaccagcagcagagaggccctgcacaccgccggctacgagatgagcctgaacggcagccccagaagccactacctggccgacagcgaccccctgatcagcaagagcgccagcctgcccgcctacagaagaaacggcctgcacagaacccccagcgccgacctgttccactacgacagcatgaacgccgtgaactggggcatgagagagtacaagatctacccctacgagctgctgctggtgaccaccagaggcagaaacagactgcccaaggacgtggacagaaccagactggagagacacctgagccaggaggagttctaccaggtgttcggcatgaccatcagcgagttcgacagactggccctgtggaagagaaacgagctgaagaagcaggccagactgttctag

SEQ ID NO: 13016 - DNA, 144 bp, synthetic construct
  source 1..144: mol_type = other DNA; note = Synthetic coding sequence
atggccagcgtgctgagcagaagactgggcaagagaagcctgctgggcgccagagtgctgggccccagcgccagcgagggccccagcgccgccccccccagcgagcccctgctggagggcgccgccccccagcccttcacctag

SEQ ID NO: 13017 - DNA, 558 bp, synthetic construct
  source 1..558: mol_type = other DNA; note = Synthetic coding sequence
atggacgacagcatcaacaacagattcagctacgtgacccacgaggacatctgcaactgcttcaacggcgacaccctgctggccatccaggcccccagcggcacccagctggaggtgcccatccccgagatgggccagaacggccagaagaagtaccagatcaacctgaagagccacagcggccccatccacgtgctgctgatcaacaaggagagcagcagcagcaagcccgtggtgttccccgtgcccccccccgacgacctgacccagcccagcagccagagcctgacccccgtgaccccccagaagagcagcatggccacccagaacctgcccgagcagcacgtgagcgagagaagccaggccctgcagcagaccagcgccaccgacatcagcagcgccggcagcatcagcggcgacatcatcgacgagctgatgagcagcgacgtgttccccctgctgagactgagccccacccccgccgacgactacaacttcaacctggacgacaacgagggcgtgtgcgacctgttcgacgtgcagatcctgaactactag

SEQ ID NO: 13018 - DNA, 492 bp, synthetic construct; identical to SEQ ID NO: 10357
  source 1..492: mol_type = other DNA; note = Synthetic coding sequence

SEQ ID NO: 13019 - DNA, 915 bp, synthetic construct
  source 1..915: mol_type = other DNA; note = Synthetic coding sequence
atgagcaagagaagaagactgaagcagggcgagcccatcatgaccggcaagacccagaccagcaacgtgaccaacaagaacgaccccaagagcatcaacagcagagtgttcatcggcaacctgaacaccgccatcgtgaagaaggtggacatcgaggccatcttcagcaagtacggcaagatcgtgggctgcagcgtgcacaagggctacgccttcgtgcagtacatgagcgagagacacgccagagccgccgtggccggcgagaacgccagagtgatcgccggccagcccctggacatcaacatggccggcgagcccaagccctacagacccaagcccggcaacaagagacccctgagcgccctgtacagactggagagcaaggagcccttcctgagcgtgggcggctacgtgttcgactacgactactacagagacgacttctacaacagactgttcgactaccacggcagagtgccccccccccccagagccgtgatccccctgaagagacccagagtggccgtgaccaccaccagaagaggcaagggcgtgttcagcatgaagggcggcagcagaagcaccgccagcggcagcaccggcagcaagctgaagagcgacgagctgcagaccatcaagaaggagctgacccagatcaagaccaagatcgacagcctgctgggcagactggagaagatcgagaagcagcagaaggccgaggccgaggcccagaagaagcagctggaggagagcctggtgctgatccaggaggagtgcgtgagcgagatcgccgaccacagcaccgaggagcccgccgagggcggccccgacgccgacggcgaggagatgaccgacggcatcgaggaggacttcgacgaggacggcggccacgagctgttcctgcagatcaagtag

SEQ ID NO: 13020 - DNA, 405 bp, synthetic construct
  source 1..405: mol_type = other DNA; note = Synthetic coding sequence
atgcccagcgccgaggccaagctgaagaagaacagatgcgccaactgcttcgactgccccggctgcatgcacaccctgagcaccagagccaccagcatcagcacccagctgcccgacgaccccgccaagaccaccatgaagaaggcctactacctggcctgcggcttctgcagatggaccagcagagacgtgggcatggccgacaagagcgtggccagcggcggctggcaggagcccgagaacccccacacccagagaatgaacaagctgatcgagtactaccagcagctggcccagaaggagaaggtggagagagacagaaagaagctggccagaagaagaaactacatgcccctggccttcagcgacaagtacggcctgggcaccagactgcagagaccctag

SEQ ID NO: 13021 - DNA, 1230 bp, synthetic construct
  source 1..1230: mol_type = other DNA; note = Synthetic coding sequence
atgtggagagtgatcgagcccccctgccccggcgcccccagcaccgagaacggcaagagcgtgcactggaagctgggcgccgacaaggaggtgtgggtgtgggtgatgggcgagcaccacctggacaagccctacgacgtgctgtgcaacgagatcatcgccgagagagccagactgaaggccgagcaggaggccgaggagcccagaaagacccacagcgaggagttcaccaacagcctgaagaccaagagccagtaccacgacctgcaggcccccgacaaccagcagaccaaggacatctggaagaaggtggccgagaaggaggagctggagcagggcagcagacccgcccccaccctggaggaggagaagatcagaagcctgagcagcagcagcagaaacatccagcagatgctggccgacagcatcaacagaatgaaggcctacgccttccaccagaagaaggagagcatgaagaagaagcaggacgaggagatcaaccagatcgaggaggagagaaccaagcagatctgcaagagctggaaggaggacagcgagtggcaggccagcctgagaaagagcaaggccgccgacgagaagagaagaagcctggccaagcaggccagagaggactacaagagactgagcctgggcgcccagaagggcagaggcggcgagagactgcagagccccctgagagtgccccagaagcccgagagaccccccctgccccccaagccccagttcctgaacagcggcgcctacccccagaagcccctgagaaaccagggcgtggtgagaaccctgagcagcagcgcccaggaggacatcatcagatggttcaaggaggagcagctgcccctgagagccggctaccagaagaccagcgacaccatcgccccctggttccacggcatcctgaccctgaagaaggccaacgagctgctgctgagcaccggcatgcccggcagcttcctgatcagagtgagcgagagaatcaagggctacgccctgagctacctgagcgaggacggctgcaagcacttcctgatcgacgccagcgccgacgcctacagcttcctgggcgtggaccagctgcagcacgccaccctggccgacctggtggagtaccacaaggaggagcccatcaccagcctgggcaaggagctgctgctgtacccctgcggccagcaggaccagctgcccgactacctggagctgttcgagtag

SEQ ID NO: 13022 - DNA, 390 bp, synthetic construct
  source 1..390: mol_type = other DNA; note = Synthetic coding sequence
atgagcgacaagagcgacctgaaggccgagctggagagaaagaagcagagactggcccagatcagagaggagaagaagagaaaggaggaggagagaaagaagaaggaggccgacatgcagcagaagaaggagcccgtgcaggacgacagcgacctggacagaaagagaagagagaccgaggccctgctgcagagcatcggcatcagccccgagccccccctggtgcccacccccatgagccccagcagcaagagcgtgagcacccccagcgaggccggcagccaggacagcggcgacctgggccccctgaccagaaccctgcagtgggacaccgaccccagcgtgctgcagctgcagagcgacagcgagctgggctacatgagcgcctag

SEQ ID NO: 13023 - DNA, 780 bp, synthetic construct
  source 1..780: mol_type = other DNA; note = Synthetic coding sequence
atggtgggcagagagaaggagctgagcatccacttcgtgcccggcagctgcagactggtggaggaggaggtgaacatccccaacagaagagtgctggtgaccggcgccaccggcctgctgggcagagccgtgcacaaggagttccagcagaacaactggcacgccgtgggctgcggcttcagaagagccagacccaagttcgagcaggtgaacctgctggacagcaacgccgtgcaccacatcatccacgacttccagccccacgtgatcgtgcactgcgccgccgagagaagacccgacgtggtggagaaccagcccgacgccgccagccagctgaacgtggacgccagcggcaacctggccaaggaggccgccgccgtgggcgccttcctgatctacatcagcagcgactacgtgttcgacggcaccaaccccccctacagagaggaggacatccccgcccccctgaacctgtacggcaagaccaagctggacggcgagaaggccgtgctggagaacaacctgggcgccgccgtgctgagaatccccatcctgtacggcgaggtggagaagctggaggagagcgccgtgaccgtgatgttcgacaaggtgcagttcagcaacaagagcgccaacatggaccactggcagcagagattccccacccacgtgaaggacgtggccaccgtgtgcagacagctggccgagaagagaatgctggtgagaagaatccccgagagctgcctgagcgagggccccctgtgcctgttccacgcctag

SEQ ID NO: 13024 - DNA, 549 bp, synthetic construct
  source 1..549: mol_type = other DNA; note = Synthetic coding sequence
agctacgacagcaccttcagctacgtgacccacgaggacatctgcaactgcttcaacggcgacaccctgctggccatccaggcccccagcggcacccagctggaggtgcccatccccgagatgggccagaacggccagaagaagtaccagatcaacctgaagagccacagcggccccatccacgtgctgctgatcaacaaggagagcagcagcagcaagcccgtggtgttccccgtgcccccccccgacgacctgacccagcccagcagccagagcctgacccccgtgaccccccagaagagcagcatggccacccagaacctgcccgagcagcacgtgagcgagagaagccaggccctgcagcagaccagcgccaccgacatcagcagcgccggcagcatcagcggcgacatcatcgacgagctgatgagcagcgacgtgttccccctgctgagactgagccccacccccgccgacgactacaacttcaacctggacgacaacgagggcgtgtgcgacctgttcgacgtgcagatcctgaactactag

SEQ ID NO: 13025 - DNA, 162 bp, synthetic construct
  source 1..162: mol_type = other DNA; note = Synthetic coding sequence
atggacagcgagctgatgcacagcatcgtgggcagctaccacaagccccccgagagagtgttcgtgcccagcttcacccagaacgagcccagccagaactgccaccccgccaacctggaggtgaccagccccaagatcctgcacagccccaacagccagtag

SEQ ID NO: 13026 - DNA, 3018 bp, synthetic construct
  source 1..3018: mol_type = other DNA; note = Synthetic coding sequence
atggccggcgccctgagaagaggcagagccctgggcagcagacccagcggccccaccgtgagcagcagaagaagcccccagtgccccgtggcccaggagggcctgggcgccagaagcagacccagagtggcccccagaagcctggccagatgcggccccagcagcagactgatgggctggaagcccagcgaggccagaggccagagccagagcttccaggccagcggcctgcagcccagaagcctgaaggccgccagaagagccaccggcagacccgacagaagcagagccgccagacccaccatggaccccagcgcccacagaagcagagccgccccccccaacatggaccccgacccccaggccggcgtgcaggtgggcatgagagtggtgagaggcgtggactggaagtggggccagcaggacggcggcgagggcggcgtgggcaccgtggtggagctgggcagacacggcagccccagcacccccgacagaaccgtggtggtgcagtgggaccagggcaccagaaccaactacagagccggctaccagggcgcccacgacctgctgctgtacgacaacgcccagatcggcgtgagacaccccaacatcatctgcgactgctgcaagaagcacggcctgagaggcatgagatggaagtgcagagtgtgcctggactacgacctgtgcacccagtgctacatgcacaacaagcacgagctggcccacgccttcgacagatacgagaccgcccacagcagacccgtgaccctgagccccagacagggcctgcccagaatccccctgagaggcatcttccagggcgccaaggtggtgagaggccccgactgggagtggggcagccaggacggcaagcccgccgagctgcagagaagagtgagcgccgacagccagcccttccagcacggcgacaaggtgaagtgcctgctggacaccgacgtgctgagagagatgcaggagggccacggcggctggaaccccagaatggccgagttcatcggccagaccggcaccgtgcacagaatcaccgacagaggcgacgtgagagtgcagttcaaccacgagaccagatggaccttccaccccggcgccctgaccaagcaccacagcttctgggtgggcgacgtggtgagagtgatcggcgacctggacaccgtgaagagactgcaggccggccacggcgagtggaccgacgacatggcccccgccctgggcagagtgggcaaggtggtgaaggtgttcggcgacggcaacctgagagtggccgtggccggccagagatggaccttcagccccagctgcctggtggcctacagacccgaggaggacgccaacctggacgtggccgagagagccagagagaacaagagcagcctgagcgtggccctggacaagctgagagcccagaagagcgaccccgagcaccccggcagactggtggtggaggtggccctgggcaacgccgccagagccctggacctgctgagaagaagacccgagcaggtggacaccaagaaccagggcagaaccgccctgcaggtggccgcctacctgggccaggtggagctgatcagactgctgctgcaggccagagccggcgtggacctgcccgacgacgagggcaacaccgccctgcactacgccgccctgggcaaccagcccgaggccaccagagtgctgctgagcgccggctgcagagccgacgccatcaacagcacccagagcaccgccctgcacgtggccgtgcagagaggcttcctggaggtggtgagagccctgtgcgagagaggctgcgacgtgaacctgcccgacgcccacagcgacacccccctgcacagcgccatcagcgccggcaccggcgccagcggcatcgtggaggtgctgaccgaggtgcccaacatcgacgtgaccgccaccaacagccagggcttcaccctgctgcaccacgccagcctgaagggccacgccctggccgtgagaaagatcctggccagagccagacagctggtggacgccaagaaggaggacggcttcaccgccctgcacctggccgccctgaacaaccacagagaggtggcccagatcctgatcagagagggcagatgcgacgtgaacgtgagaaacagaaagctgcagagccccctgcacctggccgtgcagcaggcccacgtgggcctggtgcccctgctggtggacgccggctgcagcgtgaacgccgaggacgaggagggcgacaccgccctgcacgtggccctgcagagacaccagctgctgcccctggtggccgacggcgccggcggcgaccccggccccctgcagctgctgagcagactgcaggccagcggcctgcccggcagcgccgagctgaccgtgggcgccgccgtggcctgcttcctggccctggagggcgccgacgtgagctacaccaaccacagaggcagaagccccctggacctggccgccgagggcagagtgctgaaggccctgcagggctgcgcccagagattcagagagagacaggccggcggcggcgccgcccccggccccagacagaccctgggcacccccaacaccgtgaccaacctgcacgtgggcgccgcccccggccccgaggccgccgagtgcctggtgtgcagcgagctggccctgctggtgctgttcagcccctgccagcacagaaccgtgtgcgaggagtgcgccagaagaatgaagaagtgcatcagatgccaggtggtggtgagcaagaagctgagacccgacggcagcgaggtggccagcgccgcccccgcccccggcccccccagacagctggtggaggagctgcagagcagatacagacagatggaggagagaatcacctgccccatctgcatcgacagccacatcagactggtgttccagtgcggccacggcgcctgcgccccctgcggcagcgccctgagcgcctgccccatctgcagacagcccatcagagacagaatccagatcttcgtgtag

SEQ ID NO: 13027 - DNA, 294 bp, synthetic construct
  source 1..294: mol_type = other DNA; note = Synthetic coding sequence
atggccagcagcgccgagctggacttcaacctgcaggccctgctggagcagctgagccaggacgagctgagcaagttcaagagcctgatcagaaccatcagcctgggcaaggagctgcagaccgtgccccagaccgaggtggacaaggccaacggcaagcagctggtggagatcttcaccagccacagctgcagctactgggccggcatggccgccatccaggtgttcgagaagatgaaccagacccacctgagcggcagagccgacgagcactgcgtgatgccccccccctag

SEQ ID NO: 13028 - DNA, 693 bp, synthetic construct
  source 1..693: mol_type = other DNA; note = Synthetic coding sequence
atggacagcgagctgatgcacagcatcgtgggcagctaccacaagccccccgagagagtgttcgtgcccagcttcacccagaacgagcccagccagaactgccaccccgccaacctggaggtgaccagccccaagatcctgcacagccccaacagccaggccctgatcctggccctgaagaccctgcaggagaagatccacagactggagctggagagaacccaggccgaggacaacctgaacatcctgagcagagaggccgcccagtacaagaaggccctggagaacgagaccaacgagagaaacctggcccaccaggagctgatcaagcagaagaaggacatcagcatccagctgagcagcgcccagagcagatgcaccctgctggagaagcagctggagtacaccaagagaatggtgctgaacgtggagagagagaagaacatgatcctggagcagcaggcccagctgcagagagagaaggagcaggaccagatgaagctgtacgccaagctggagaagctggacgtgctggagaaggagtgcttcagactgaccaccacccagaagaccgccgaggacaagatcaagcacctggaggagaagctgaaggaggaggagcaccagagaaagctgttccaggacaaggccagcgagctgcagaccggcctggagatcagcaagatcatctag

SEQ ID NO: 13029 - DNA, 624 bp, synthetic construct
  source 1..624: mol_type = other DNA; note = Synthetic coding sequence
atggacagaggcgagcagggcctgctgagaaccgaccccgtgcccgaggagggcgaggacgtggccgccaccatcagcgccaccgagaccctgagcgaggaggagcaggaggagctgagaagagagctggccaaggtggaggaggagatccagaccctgagccaggtgctggccgccaaggagaagcacctggccgagatcaagagaaagctgggcatcaacagcctgcaggagctgaagcagaacatcgccaagggctggcaggacgtgaccgccaccagcgcctacaagaagaccagcgagaccctgagccaggccggccagaaggccagcgccgccttcagcagcgtgggcagcgtgatcaccaagaagctggaggacgtgaagctgcaggccttcagccacagcttcagcatcagaagcatccagcacagcatcagcatgcccgccatgagaaacagccccaccttcaagagcttcgaggagaaggtggagaacctgaagagcaaggtgggcggcaccaagcccgccggcggcgacttcggcgaggtgctgaacagcgccgccaacgccagcgccaccaccaccgagcccctgcccgagaagacccaggagagcctgtag

SEQ ID NO: 13030 - DNA, 387 bp, synthetic construct
  source 1..387: mol_type = other DNA; note = Synthetic coding sequence
atgaagttcaaccccttcgtgaccagcgacagaagcaagaacagaaagagacacttcaacgcccccagccacgtgagaagaaagatcatgagcagccccctgagcaaggagctgagacagaagtacaacgtgagaagcatgcccatcagaaaggacgacgaggtgcaggtggtgagaggccactacaagggccagcagatcggcaaggtggtgcaggtgtacagaaagaagtacgtgatctacatcgagagagtgcagagagagaaggccaacggcaccaccgtgcacgtgggcatccaccccagcaaggtggtgatcaccagactgaagctggacaaggacagaaagaagatcctggagagaaaggccaagagcagacaggtgtag

SEQ ID NO: 13031 - DNA, 126 bp, synthetic construct
  source 1..126: mol_type = other DNA; note = Synthetic coding sequence
ggcctgaccaagcagctgctggacgacaccatcggcatccaccccacctgcggcgaggtgttcaccaccctggagatcaccaagagcagcggcctggacatcacccagaagggctgctgaggctag

SEQ ID NO: 13032 - DNA, 1365 bp, synthetic construct; identical to SEQ ID NO: 9494
  source 1..1365: mol_type = other DNA; note = Synthetic coding sequence

SEQ ID NO: 13033 - DNA, 438 bp, synthetic construct; identical to SEQ ID NO: 9483
  source 1..438: mol_type = other DNA; note = Synthetic coding sequence

SEQ ID NO: 13034 - DNA, 621 bp, synthetic construct
  source 1..621: mol_type = other DNA; note = Synthetic coding sequence
atggacagcgagctgatgcacagcatcgtgggcagctaccacaagccccccgagagagtgttcgtgcccagcttcacccagaacgagcccagccagaactgccaccccgccaacctggaggtgaccagccccaagatcctgcacagccccaacagccaggccctgatcctggccctgaagaccctgcaggagaagatccacagactggagctggagagaacccaggccgaggacaacctgaacatcctgagcagagaggccgcccagtacaagaaggccctggagaacgagaccaacgagagaaacctggcccaccaggagctgatcaagcagaagaaggacatcagcatccagctgagcagcgcccagagcagatgcaccctgctggagaagcagctggagtacaccaagagaatggtgctgaacgtggagagagagaagaacatgatcctggagcagcaggcccagctgcagagagagaaggagcaggaccagatgaagctgtacgccaagctggagaagctggacgtgctggagaaggagtgcttcagactgaccaccacccagaagaccgccgaggacaagatcaagcacctggaggagaagctgaaggaggagtag

SEQ ID NO: 13035 - DNA, 1050 bp, synthetic construct; identical to SEQ ID NO: 9332
  source 1..1050: mol_type = other DNA; note = Synthetic coding sequence

SEQ ID NO: 13036 - DNA, 429 bp, synthetic construct
  source 1..429: mol_type = other DNA; note = Synthetic coding sequence
atgcccagcatcaagctgcagagcagcgacggcgagatcttcgaggtggacgtggagatcgccaagcagagcgtgaccatcaagaccatgctggaggacctgggcatggacgacgagggcgacgacgaccccgtgcccctgcccaacgtgaacgccgccatcctgaagaaggtgatccagtggtgcacccaccacaaggacgacccccccccccccgaggacgacgagaacaaggagaagagaaccgacgacatccccgtgtgggaccaggagttcctgaaggtggaccagggcaccctgttcgagctgatcctggccgccaactacctggacatcaagggcctgctggacgtgacctgcaagaccgtggccaacatgatcaagggcaagacccccgaggagatcagaaagaccttcaacatcaagtag

SEQ ID NO: 13037 - DNA, 375 bp, synthetic construct
  source 1..375: mol_type = other DNA; note = Synthetic coding sequence
atgagcgccaccgtggtggacgccgtgaacgccgcccccctgagcggcagcaaggagatgagcctggaggagcccaagaagatgaccagagaggactggagaaagaagaaggagctggaggagcagagaaagctgggcaacgcccccgccgaggtggacgaggagggcaaggacatcaacccccacatcccccagtacatcagcagcgtgccctggtacatcgaccccagcaagagacccaccctgaagcaccagagaccccagcccgagaagcagaagcagttcagcagcagcggcgagtggtacaagagaggcgtgaaggagaacagcatcatcaccaagtacagaaagggcgcctgcgagaactgcggctag

SEQ ID NO: 13038 - DNA, 750 bp, synthetic construct; identical to SEQ ID NO: 9881
  source 1..750: mol_type = other DNA; note = Synthetic coding sequence

SEQ ID NO: 13039 - DNA, 120 bp, synthetic construct
  source 1..120: mol_type = other DNA; note = Synthetic coding sequence
atgaagttcaaccccttcgtgaccagcgacagaagcaagaacagaaagagacacttcaacgcccccagccacgtgagaagaaagatcatgagcagccccctgagcaaggagctgagatag

SEQ ID NO: 13040 - DNA, 1401 bp, synthetic construct; identical to SEQ ID NO: 9331
  source 1..1401: mol_type = other DNA; note = Synthetic coding sequence

SEQ ID NO: 13041 - DNA, 528 bp, synthetic construct
  source 1..528: mol_type = other DNA; note = Synthetic coding sequence
atggccagcaaccacaagagcagcgccgccagacccgtgagcagaggcggcgtgggcctgaccggcagaccccccagcggcatcagacccctgagcggcaacatcagagtggccaccgccatgccccccggcaccgccagacccggcagcagaggctgccccatcggcaccggcggcgtgctgagcagccagatcaaggtggcccacagacccgtgacccagcagggcctgaccggcatgaagaccggcaccaagggcccccagagacagatcctggacaagagctactacctgggcctgctgagaagcaagatcagcgagctgaccaccgaggtgaacaagctgcagaagggcatcgagatgtacaaccaggagaacagcgtgtacctgagctacgagaagagagccgagaccctggccgtggagatcaaggagctgcagggccagctggccgactacaacatgctggtggacaagctgaacaccaacaccgagatggaggaggtgatgaacgactacaacatgtag

SEQ ID NO: 13042 - DNA, 438 bp, synthetic construct; identical to SEQ ID NO: 9483
  source 1..438: mol_type = other DNA; note = Synthetic coding sequence

SEQ ID NO: 13043 - DNA, 2136 bp, synthetic construct; identical to SEQ ID NO: 11492
  source 1..2136: mol_type = other DNA; note = Synthetic coding sequence

SEQ ID NO: 13044 - DNA, 471 bp, synthetic construct
  source 1..471: mol_type = other DNA; note = Synthetic coding sequence
atggccagcgtgctgagcagaagactgggcaagagaagcctgctgggcgccagagtgctgggccccagcgccagcgagggccccagcgccgccccccccagcgagcccctgctggagggcgccgccccccagcccttcaccaccagcgacgacaccccctgccaggagcagcccaaggaggtgctgaaggcccccagcaccagcggcctgcagcaggtggccttccagcccggccagaaggtgtacgtgtggtacggcggccaggagtgcaccggcctggtggagcagcacagctggatggagggccaggtgaccgtgtggctgctggagcagaagctgcaggtgtgctgcagagtggaggaggtgtggctggccgagctgcagggcccctgcccccaggccccccccctggagcccggcgcccaggccctggcctacagacccgtgagcagaaacatcgacgtgccctag

SEQ ID NO: 13045 - DNA, 309 bp, synthetic construct
  source 1..309: mol_type = other DNA; note = Synthetic coding sequence
atgcccagcatcaagctgcagagcagcgacggcgagatcttcgaggtggacgtggagatcgccaagcagagcgtgaccatcaagaccatgctggaggacctgggcatggacgacgagggcgacgacgaccccgtgcccctgcccaacgtgaacgccgccatcctgaagaaggtgatccagtggtgcacccaccacaaggacgacccccccccccccgaggacgacgagaacaaggagaagagaaccgacgacatccccgtgtgggaccaggagttcctgaaggtggaccagggcaccctgttcgagtag

SEQ ID NO: 13046 - DNA, 465 bp, synthetic construct
  source 1..465: mol_type = other DNA; note = Synthetic coding sequence
atggccgacgacctggacttcgagaccggcgacgccggcgccagcgccaccttccccatgcagtgcagcgccctgagaaagaacggcttcgtggtgctgaagggctggccctgcaagatcgtggagatgagcgccagcaagaccggcaagcacggccacgccaaggtgcacctggtgggcatcgacatcttcaccggcaagaagtacgaggacatctgccccagcacccacaacatggacgtgcccaacatcaagagaaacgacttccagctgatcggcatccaggacggctacctgagcctgctgcaggacagcggcgaggtgcccgaggacctgagactgcccgagggcgacctgggcaaggagatcgagcagaagtacgactgcggcgaggagatcctgatcaccgtgctgagcgccatgaccgaggaggccgccgtggccatcaaggccatggccaagtag

SEQ ID NO: 13047 - DNA, 306 bp, synthetic construct
  source 1..306: mol_type = other DNA; note = Synthetic coding sequence
atgagcgccaccgtggtggacgccgtgaacgccgcccccctgagcggcagcaaggagatgagcctggaggagcccaagaagatgaccagagaggactggagaaagaagaaggagctggaggagcagagaaagctgggcaacgcccccgccgaggtggacgaggagggcaaggacatcaacccccacatcccccagtacatcagcagcgtgccctggtacatcgaccccagcaagagacccaccctgaagcaccagagaccccagcccgagaagcagaagcagttcagcagcagcggcgagtggtag

SEQ ID NO: 13048 - DNA, 3201 bp, synthetic construct
  source 1..3201: mol_type = other DNA; note = Synthetic coding sequence
atggccggcgccctgagaagaggcagagccctgggcagcagacccagcggccccaccgtgagcagcagaagaagcccccagtgccccgtggcccaggagggcctgggcgccagaagcagacccagagtggcccccagaagcctggccagatgcggccccagcagcagactgatgggctggaagcccagcgaggccagaggccagagccagagcttccaggccagcggcctgcagcccagaagcctgaaggccgccagaagagccaccggcagacccgacagaagcagagccgccagacccaccatggaccccagcgcccacagaagcagagccgccccccccaacatggaccccgacccccaggccggcgtgcaggtgggcatgagagtggtgagaggcgtggactggaagtggggccagcaggacggcggcgagggcggcgtgggcaccgtggtggagctgggcagacacggcagccccagcacccccgacagaaccgtggtggtgcagtgggaccagggcaccagaaccaactacagagccggctaccagggcgcccacgacctgctgctgtacgacaacgcccagatcggcgtgagacaccccaacatcatctgcgactgctgcaagaagcacggcctgagaggcatgagatggaagtgcagagtgtgcctggactacgacctgtgcacccagtgctacatgcacaacaagcacgagctggcccacgccttcgacagatacgagaccgcccacagcagacccgtgaccctgagccccagacagggcctgcccagaatccccctgagaggcatcttccagggcgccaaggtggtgagaggccccgactgggagtggggcagccaggacggcggcgagggcaagcccggcagagtggtggacatcagaggctgggacgtggagaccggcagaagcgtggccagcgtgacctgggccgacggcaccaccaacgtgtacagagtgggccacaagggcaaggtggacctgaagtgcgtgggcgaggccgccggcggcttctactacaaggaccacctgcccagactgggcaagcccgccgagctgcagagaagagtgagcgccgacagccagcccttccagcacggcgacaaggtgaagtgcctgctggacaccgacgtgctgagagagatgcaggagggccacggcggctggaaccccagaatggccgagaccggcaccgtgcacagaatcaccgacagaggcgacgtgagagtgcagttcaaccacgagaccagatggaccttccaccccggcgccctgaccaagcaccacagcttctgggtgggcgacgtggtgagagtgatcggcgacctggacaccgtgaagagactgcaggccggccacggcgagtggaccgacgacatggcccccgccctgggcagagtgggcaaggtggtgaaggtgttcggcgacggcaacctgagagtggccgtggccggccagagatggaccttcagccccagctgcctggtggcctacagacccgaggaggacgccaacctggacgtggccgagagagccagagagaacaagagcagcctgagcgtggccctggacaagctgagagcccagaagagcgaccccgagcaccccggcagactggtggtggaggtggccctgggcaacgccgccagagccctggacctgctgagaagaagacccgagcaggtggacaccaagaaccagggcagaaccgccctgcaggtggccgcctacctgggccaggtggagctgatcagactgctgctgcaggccagagccggcgtggacctgcccgacgacgagggcaacaccgccctgcactacgccgccctgggcaaccagcccgaggccaccagagtgctgctgagcgccggctgcagagccgacgccatcaacagcacccagagcaccgccctgcacgtggccgtgcagagaggcttcctggaggtggtgagagccctgtgcgagagaggctgcgacgtgaacctgcccgacgcccacagcgacacccccctgcacagcgccatcagcgccggcaccggcgccagcggcatcgtggaggtgctgaccgaggtgcccaacatcgacgtgaccgccaccaacagccagggcttcaccctgctgcaccacgccagcctgaagggccacgccctggccgtgagaaagatcctggccagagccagacagctggtggacgccaagaaggaggacggcttcaccgccctgcacctggccgccctgaacaaccacagagaggtggcccagatcctgatcagagagggcagatgcgacgtgaacgtgagaaacagaaagctgcagagccccctgcacctggccgtgcagcaggcccacgtgggcctggtgcccctgctggtggacgccggctgcagcgtgaacgccgaggacgaggagggcgacaccgccctgcacgtggccctgcagagacaccagctgctgcccctggtggccgacggcgccggcggcgaccccggccccctgcagctgctgagcagactgcaggccagcggcctgcccggcagcgccgagctgaccgtgggcgccgccgtggcctgcttcctggccctggagggcgccgacgtgagctacaccaaccacagaggcagaagccccctggacctggccgccgagggcagagtgctgaaggccctgcagggctgcgcccagagattcagagagagacaggccggcggcggcgccgcccccggccccagacagaccctgggcacccccaacaccgtgaccaacctgcacgtgggcgccgcccccggccccgaggccgccgagtgcctggtgtgcagcgagctggccctgctggtgctgttcagcccctgccagcacagaaccgtgtgcgaggagtgcgccagaagaatgaagaagtgcatcagatgccaggtggtggtgagcaagaagctgagacccgacggcagcgaggtggccagcgccgcccccgcccccggcccccccagacagctggtggaggagctgcagagcagatacagacagatggaggagagaatcacctgccccatctgcatcgacagccacatcagactggtgttccagtgcggccacggcgcctgcgccccctgcggcagcgccctgagcgcctgccccatctgcagacagcccatcagagacagaatccagatcttcgtgtag

SEQ ID NO: 13049 - DNA, 348 bp, synthetic construct
  source 1..348: mol_type = other DNA; note = Synthetic coding sequence
atgatgctgggcaccgagggcggcgagggcttcgtggtgaaggtgagaggcctgccctggagctgcagcgccgacgaggtgcagagattcttcagcgactgcaagatccagaacggcgcccagggcatcagattcatctacaccagagagggcagacccagcggcgaggccttcgtggagctggagagcgaggacgaggtgaagctggccctgaagaaggacagagagaccatgggccacagatacgtggaggtgttcaagagcaacaacgtggagatggactgggtgctgaagcacaccggccccaacagccccgacaccgccaacgacggcttcgtgagactgtag

SEQ ID NO: 13050 - DNA, 375 bp, synthetic construct
  source 1..375: mol_type = other DNA; note = Synthetic coding sequence
atggccagcgtgctgagcagaagactgggcaagagaagcctgctgggcgccagagtgctgggccccagcgccagcgagggccccagcgccgccccccccagcgagcccctgctggagggcgccgccccccagcccttcaccaccagcgacgacaccccctgccaggagcagcccaaggaggtgctgaaggcccccagcaccagcggcctgcagcaggtggccttccagcccggccagaaggtgtacgtgtggtacggcggccaggagtgcaccggcctggtggagcagcacagctggatggagggccaggtgaccgtgtggctgctggagcagaagctgcaggtgtgctgcagagtggaggaggtgtggctgtag

SEQ ID NO: 13051 - DNA, 438 bp, synthetic construct; identical to SEQ ID NO: 9483
  source 1..438: mol_type = other DNA; note = Synthetic coding sequence

SEQ ID NO: 13052 - DNA, 339 bp, synthetic construct
  source 1..339: mol_type = other DNA; note = Synthetic coding sequence
atggacagcgagctgatgcacagcatcgtgggcagctaccacaagccccccgagagagtgttcgtgcccagcttcacccagaacgagcccagccagaactgccaccccgccaacctggaggtgaccagccccaagatcctgcacagccccaacagccaggccctgatcctggccctgaagaccctgcaggagaagatccacagactggagctggagagaacccaggccgaggacaacctgaacatcctgagcagagaggccgcccagtacaagaaggccctggagaacgagaccaacgagagaaacctggcccaccaggagctgatcaagcagaagtag

SEQ ID NO: 13053 - DNA, 345 bp, synthetic construct
  source 1..345: mol_type = other DNA; note = Synthetic coding sequence
atgcccagcgccgaggccaagctgaagaagaacagatgcgccaactgcttcgactgccccggctgcatgcacaccctgagcaccagagccaccagcatcagcacccagctgcccgacgaccccgccaagaccaccatgaagaaggcctactacctggcctgcggcttctgcagatggaccagcagagacgtgggcatggccgacaagagcgtggccagcggcggctggcaggagcccgagaacccccacacccagagaatgaacaagctgatcgagtactaccagcagctggcccagaaggagaaggtggagagagacagaaagaagctggccagaagaagatag

SEQ ID NO: 13054 - DNA, 648 bp, synthetic construct
  source 1..648: mol_type = other DNA; note = Synthetic coding sequence
atgcccggcgaggccaccgagaccgtgcccgccaccgagcaggagctgccccagagccaggccgagaccggcagcggcaccgccagcgacagcggcgagagcgtgcccggcatcgaggagcaggacagcacccagaccaccacccagaaggcctggctggtggccgccgccgagatcgacgaggagcccgtgggcaaggccaagcagagcagaagcgagaagagagccagaaaggccatgagcaagctgggcctgctgcaggtgaccggcgtgaccagagtgaccatctggaagagcaagaacatcctgttcgtgatcaccaagctggacgtgtacaagagccccgccagcgacgcctacatcgtgttcggcgaggccaagatccaggacctgagccagcaggcccagctggccgccgccgagaagttcagagtgcagggcgaggccgtgggcaacatccaggagaacacccagacccccaccgtgcaggaggagagcgaggaggaggaggtggacgagaccggcgtggaggtgaaggacgtgaagctggtgatgagccaggccaacgtgagcagagccaaggccgtgagagccctgaagaacaacagcaacgacatcgtgaacgccatcatggagctgaccgtgtag

SEQ ID NO: 13055 - DNA, 432 bp, synthetic construct
  source 1..432: mol_type = other DNA; note = Synthetic coding sequence
atgagcgccaccgtggtggacgccgtgaacgccgcccccctgagcggcagcaaggagatgagcctggaggagcccaagaagatgaccagagaggactggagaaagaagaaggagctggaggagcagagaaagctgggcaacgcccccgccgaggtggacgaggagggcaaggacatcaacccccacatcccccagtacatcagcagcgtgccctggtacatcgaccccagcaagagacccaccctgaagcaccagagaccccagcccgagaagcagaagcagttcagcagcagcggcgagtggtacaagagaggcgtgaaggagaacagcatcatcaccaagtacagaaagggcgcctgcgagaactgcggcgccatgacccacaagaagaaggactgcttcgagagacccagaagagtgggcgccaagtag

SEQ ID NO: 13056 - DNA, 567 bp, synthetic construct
  source 1..567: mol_type = other DNA; note = Synthetic coding sequence
atggccagcgtgctgagcagaagactgggcaagagaagcctgctgggcgccagagtgctgggccccagcgccagcgagggccccagcgccgccccccccagcgagcccctgctggagggcgccgccccccagcccttcaccaccagcgacgacaccccctgccaggagcagcccaaggaggtgctgaaggcccccagcaccagcggcctgcagcaggtggccttccagcccggccagaaggtgtacgtgtggtacggcggccaggagtgcaccggcctggtggagcagcacagctggatggagggccaggtgaccgtgtggctgctggagcagaagctgcaggtgtgctgcagagtggaggaggtgtggctggccgagctgcagggcccctgcccccaggccccccccctggagcccggcgcccaggccctggcctacagacccgtgagcagaaacatcgacgtgcccaagagaaagagcgacgccgtggagatggacgagatgatggccgccatggtgctgaccagcctgagctgcagccccgtggtgcagagcccccccggctag

SEQ ID NO: 13057 - DNA, 87 bp, synthetic construct
  source 1..87: mol_type = other DNA; note = Synthetic coding sequence
atgatgctgggcaccgagggcggcgagggcttcgtggtgaaggtgagaggcctgccctggagctgcagcgccgacgaggtgcagtag

SEQ ID NO: 13058 - DNA, 87 bp, synthetic construct
  source 1..87: mol_type = other DNA; note = Synthetic coding sequence
atggacagcgagctgatgcacagcatcgtgggcagctaccacaagccccccgagagagtgttcgtgcccagcttcacccagaactag

SEQ ID NO: 13059 - DNA, 1074 bp, synthetic construct; identical to SEQ ID NO: 10529
  source 1..1074: mol_type = other DNA; note = Synthetic coding sequence

SEQ ID NO: 13060 - DNA, 483 bp, synthetic construct
  source 1..483: mol_type = other DNA; note = Synthetic coding sequence
atgcccagcatcaagctgcagagcagcgacggcgagatcttcgaggtggacgtggagatcgccaagcagagcgtgaccatcaagaccatgctggaggacctgggcatggacgacgagggcgacgacgaccccgtgcccctgcccaacgtgaacgccgccatcctgaagaaggtgatccagtggtgcacccaccacaaggacgacccccccccccccgaggacgacgagaacaaggagaagagaaccgacgacatccccgtgtgggaccaggagttcctgaaggtggaccagggcaccctgttcgagctgatcctggccgccaactacctggacatcaagggcctgctggacgtgacctgcaagaccgtggccaacatgatcaagggcaagacccccgaggagatcagaaagaccttcaacatcaagaacgacttcaccgaggaggaggaggcccaggtgggcagcacccagttctgcctgtag

SEQ ID NO: 13061 - DNA, 342 bp, synthetic construct
  source 1..342: mol_type = other DNA; note = Synthetic coding sequence
atggacagcgagctgatgcacagcatcgtgggcagctaccacaagccccccgagagagtgttcgtgcccagcttcacccagaacgagcccagccagaactgccaccccgccaacctggaggtgaccagccccaagatcctgcacagccccaacagccaggccctgatcctggccctgaagaccctgcaggagaagatccacagactggagctggagagaacccaggccgaggacaacctgaacatcctgagcagagaggccgcccagtacaagaaggccctggagaacgagaccaacgagagaaacctggcccaccaggagctgatcaagcagaagaagtag

SEQ ID NO: 13062 - DNA, 309 bp, synthetic construct
  source 1..309: mol_type = other DNA; note = Synthetic coding sequence
atggccagcgtgctgagcagaagactgggcaagagaagcctgctgggcgccagagtgctgggccccagcgccagcgagggccccagcgccgccccccccagcgagcccctgctggagggcgccgccccccagcccttcaccaccagcgacgacaccccctgccaggagcagcccaaggaggtgctgaaggcccccagcaccagcggcctgcagcaggtggccttccagcccggccagaaggtgtacgtgtggtacggcggccaggagtgcaccggcctggtggagcagcacagctggatggagggctag

SEQ ID NO: 13063 - DNA, 492 bp, synthetic construct; identical to SEQ ID NO: 10357
  source 1..492: mol_type = other DNA; note = Synthetic coding sequence

SEQ ID NO: 13064 - DNA, 441 bp, synthetic construct
  source 1..441: mol_type = other DNA; note = Synthetic coding sequence
atgtgccccggcaactggctgtgggccagcatgaccttcatggccagattcagcagaagcagcagcagaagccccgtgagaaccagaggcaccctggaggagatgcccaccgtgcagcaccccttcctgaacgtgttcgagctggagagactgctgtacaccggcaagaccgcctgcaaccacgccgacgaggtgtggcccggcctgtacctgggcgaccaggacatggccaacaacagaagagagctgagaagactgggcatcacccacgtgctgaacgccagccacagcagatggagaggcacccccgaggcctacgagggcctgggcatcagatacctgggcgtggaggcccacgacagccccgccttcgacatgagcatccacttccagaccgccgccgacttcatccacagagccctgagccagcccggcggctag

SEQ ID NO: 13065 - DNA, 1542 bp, synthetic construct; identical to SEQ ID NO: 10287
  source 1..1542: mol_type = other DNA; note = Synthetic coding sequence

SEQ ID NO: 13066 - DNA, 438 bp, synthetic construct
  source 1..438: mol_type = other DNA; note = Synthetic coding sequence
atggccgtgagcaccggcgtgaaggtgcccagaaacttcagactgctggaggagctggaggagggccagaagggcgtgggcgacggcaccgtgagctggggcctggaggacgacgaggacatgaccctgaccagatggaccggcatgatcatcggcccccccagaaccaactacgagaacagaatctacagcctgaaggtggagtgcggccccaagtaccccgaggccccccccagcgtgagattcgtgaccaagatcaacatgaacggcatcaacaacagcagcggcatggtggacgccagaagcatccccgtgctggccaagtggcagaacagctacagcatcaaggtggtgctgcaggagctgagaagactgatgatgagcaaggagaacatgaagctgccccagccccccgagggccagacctacaacaactag

SEQ ID NO: 13067 - DNA, 1542 bp, synthetic construct; identical to SEQ ID NO: 10287
  source 1..1542: mol_type = other DNA; note = Synthetic coding sequence

SEQ ID NO: 13068 - DNA, 57 bp, synthetic construct
  source 1..57: mol_type = other DNA; note = Synthetic coding sequence
atgcccagcatcaagctgcagagcagcgacggcgagatcttcgaggtggacgtgtag

SEQ ID NO: 13069 - DNA, 1935 bp, synthetic construct
  source 1..1935: mol_type = other DNA; note = Synthetic coding sequence
gtggccagcgagggcagcgtgagaagacccagcggccccgtgcccgccccccagccccccgccttcagattcgtgagcagacccggcagagccagaagcgagagcgagaccctggagagaagccccccccagagccccggccccggcaaggccggcgacgcccccaacagaagaagcggccacgtgagaggcgccagagtgctgagcccccccggcagaagagccagactgagcagccccggccccagcagaagcagcgaggccagagaggagctgagaagacacctggtgggcctgatcgagagaagcagagtggtgatcttcagcaagagctactgcccccacagcaccagagtgaaggagctgttcagcagcctgggcgtggagtgcaacgtgctggagctggaccaggtggacgacggcgccagagtgcaggaggtgctgagcgagatcaccaaccagaagaccgtgcccaacatcttcgtgaacaaggtgcacgtgggcggctgcgaccagaccttccaggcctaccagagcggcctgctgcagaagctgctgcaggaggacctggcctacgactacgacctgatcatcatcggcggcggcagcggcggcctgagctgcgccaaggaggccgccatcctgggcaagaaggtgatggtgctggacttcgtggtgcccagcccccagggcaccagctggggcctgggcggcacctgcgtgaacgtgggctgcatccccaagaagctgatgcaccaggccgccctgctgggccaggccctgtgcgacagcagaaagttcggctgggagtacaaccagcaggtgagacacaactgggagaccatgaccaaggccatccagaaccacatcagcagcctgaactggggctacagactgagcctgagagagaaggccgtggcctacgtgaacagctacggcgagttcgtggagcaccacaagatcaaggccaccaacaagaagggccaggagacctactacaccgccgcccagttcgtgatcgccaccggcgagagacccagatacctgggcatccagggcgacaaggagtactgcatcaccagcgacgacctgttcagcctgccctactgccccggcaagaccctggtggtgggcgccagctacgtggccctggagtgcgccggcttcctggccggcttcggcctggacgtgaccgtgatggtgagaagcatcctgctgagaggcttcgaccaggagatggccgagaaggtgggcagctacatggagcagcacggcgtgaagttcctgagaaagttcatccccgtgatggtgcagcagctggagaagggcagccccggcaagctgaaggtgctggccaagagcaccgagggcaccgagaccatcgagggcgtgtacaacaccgtgctgctggccatcggcagagacagctgcaccagaaagatcggcctggagaagatcggcgtgaagatcaacgagaagagcggcaagatccccgtgaacgacgtggagcagaccaacgtgccctacgtgtacgccgtgggcgacatcctggaggacaagcccgagctgacccccgtggccatccagagcggcaagctgctggcccagagactgttcggcgccagcctggagaagatctaccacaccctgttctggcccctggagtggaccgtggccggcagagagaacaacacctgctacgccaagatcatctgcaacaagttcgaccacgacagagtgatcggcttccacatcctgggccccaacgccggcgaggtgacccagggcttcgccgccgccatgaagtgcggcctgaccaagcagctgctggacgacaccatcggcatccaccccacctgcggcgaggtgttcaccaccctggagatcaccaagagcagcggcctggacatcacccagaagggctgctgaggctag

SEQ ID NO: 13070 - DNA, 1338 bp, synthetic construct
  source 1..1338: mol_type = other DNA; note = Synthetic coding sequence
atgaacaagggcatcagcagcatccccatcaacctgagagtgtacagcccccacgtgctgaacctgaccctgatcgacctgcccggcatcaccaaggtgcccgtgggcgaccagccccccgacatcgagtaccagatcagagagatgatcatgcagttcatcaccagagagaactgcctgatcctggccgtgacccccgccaacaccgacctggccaacagcgacgccctgaagctggccaaggaggtggacccccagggcctgagaaccatcggcgtgatcaccaagctggacctgatggacgagggcaccgacgccagagacgtgctggagaacaagctgctgcccctgagaagaggctacgtgggcgtggtgaacagaagccagaaggacatcgacggcaagaaggacatcaaggccgccatgctggccgagagaaagttcttcctgagccaccccgcctacagacacatcgccgacagaatgggcaccccccacctgcagaaggtgctgaaccagcagctgaccaaccacatcagagacaccctgcccaacttcagaaacaagctgcagggccagctgctgagcatcgagcacgaggtggaggcctacaagaacttcaagcccgaggaccccaccagaaagaccaaggccctgctgcagatggtgcagcagttcgccgtggacttcgagaagagaatcgagggcagcggcgaccaggtggacaccctggagctgagcggcggcgccaagatcaacagaatcttccacgagagattccccttcgagatcgtgaagatggagttcaacgagaaggagctgagaagagagatcagctacgccatcaagaacatccacggcatcagaaccggcctgttcacccccgacatggccttcgaggccatcgtgaagaagcagatcgtgaagctgaagggccccagcctgaagagcgtggacctggtgatccaggagctgatcaacaccgtgaagaagtgcaccaagaagctggccaacttccccagactgtgcgaggagaccgagagaatcgtggccaaccacatcagagagagagagggcaagaccaaggaccaggtgctgctgctgatcgacatccaggtgagctacatcaacaccaaccacgaggacttcatcggcttcgccaacgcccagcagagaagcagccaggtgcacaagaagaccaccgtgggcaaccaggtgatcagaaagggctggctgaccatcagcaacatcggcatcatgaagggcggcagcaagggctactggttcgtgctgaccgccgagagcctgagctggtacaaggacgacgaggagaagtag

SEQ ID NO: 13071 - DNA, 1560 bp, synthetic construct
  source 1..1560: mol_type = other DNA; note = Synthetic coding sequence
atgctgcagctgatggacagcggcatcaccatctgcctgagaaacggcgccgccagcgtgttcaagaagaaggagtggagcacccagggcgaggagaacaagcaggacagcaagctgaagaagctgagcgaggacagcctgaccaagcagcccgaggaggtgttcgacgtgctggagaagctgggcgagggcagctacggcagcgtgttcaaggccatccacaaggagagcggccaggtggtggccatcaagcaggtgcccgtggagagcgacctgcaggagatcatcaaggagatcagcatcatgcagcagtgcgacagcccctacgtggtgaagtactacggcagctacttcaagaacaccgacctgtggatcgtgatggagtactgcggcgccggcagcgtgagcgacatcatcagactgagaaacaagaccctgatcgaggacgagatcgccaccatcctgaagagcaccctgaagggcctggagtacctgcacttcatgagaaagatccacagagacatcaaggccggcaacatcctgctgaacaccgagggccacgccaagctggccgacttcggcgtggccggccagctgaccgacaccatggccaagagaaacaccgtgatcggcacccccttctggatggcccccgaggtgatccaggagatcggctacaactgcgtggccgacatctggagcctgggcatcaccagcatcgagatggccgagggcaagcccccctacgccgacatccaccccatgagagccatcttcatgatccccaccaaccccccccccaccttcagaaagcccgagctgtggagcgacgacttcaccgacttcgtgaagaagtgcctggtgaagaaccccgagcagagagccaccgccacccagctgctgcagcaccccttcatcaagaacgccaagcccgtgagcatcctgagagacctgatcaccgaggccatggagatcaaggccaagagacacgaggagcagcagagagagctggaggaggaggaggagaacagcgacgaggacgagctggacagccacaccatggtgaagaccagcgtggagagcgtgggcaccatgagagccaccagcaccatgagcgagggcgcccagaccatgatcgagcacaacagcaccatgctggagagcgacctgggcaccatggtgatcaacagcgaggacgaggaggaggaggacggcaccatgaagagaaacgccaccagcccccaggtgcagagacccagcttcatggactacttcgacaagcaggacttcaagaacaagagccacgagaactgcaaccagaacatgcacgagcccttccccatgagcaagaacgtgttccccgacaactggaaggtgccccaggacggcgacttcgacttcctgaagaacctgagcctggaggagctgcagatgagactgaaggccctggaccccatgatggagagagagatcgaggagctgagacagagatacaccgccaagagacagcccatcctggacgccatggacgccaagaagagaagacagcagaacttctag

SEQ ID NO: 13072 - DNA, 1392 bp, synthetic construct
  source 1..1392: mol_type = other DNA; note = Synthetic coding sequence
atgaagatcatggacagcgagctgatgcacagcatcgtgggcagctaccacaagccccccgagagagtgttcgtgcccagcttcacccagaacgagcccagccagaactgccaccccgccaacctggaggtgaccagccccaagatcctgcacagccccaacagccaggccctgatcctggccctgaagaccctgcaggagaagatccacagactggagctggagagaacccaggccgaggacaacctgaacatcctgagcagagaggccgcccagtacaagaaggccctggagaacgagaccaacgagagaaacctggcccaccaggagctgatcaagcagaagaaggacatcagcatccagctgagcagcgcccagagcagatgcaccctgctggagaagcagctggagtacaccaagagaatggtgctgaacgtggagagagagaagaacatgatcctggagcagcaggcccagctgcagagagagaaggagcaggaccagatgaagctgtacgccaagctggagaagctggacgtgctggagaaggagtgcttcagactgaccaccacccagaagaccgccgaggacaagatcaagcacctggaggagaagctgaaggaggaggagcaccagagaaagctgttccaggacaaggccagcgagctgcagaccggcctggagatcagcaagatcatcatgagcagcgtgagcaacctgaagcacagcaaggagaagaagaagagcagcaagaagaccaagtgcatcaagagaagacccccctggcagatctgcagcaagttcggcgccctgcccttcgtggccgagaagatgagacagcacagagacccccacatcctgcagaagcccttcaacgtgaccgagaccagatgcctgcccaagcccagcagaaccaccagctggtgcaaggccatcccccccgacagcgagaagagcatcagcatctgcgacaacctgagcgagctgctgatggccatgcaggacgagctggaccagatgagcatggagcaccaggagctgctgaagcagatgaaggagaccgagagccacagcgtgtgcgacgacatcgagtgcgagctggagtgcctgctgaagaagatggagatcaagggcgagcagatcagcaagctgaagaagcaccaggacagcgtgtgcaagctgcagcagaaggtgcagaacagcaagatgagcgaggccagcggcatccagcaggaggacagctaccccaagggcagcaagaacatcaagaacagccccagaaagtgcctgaccgacaccaacctgttccagaagaacagcagcttccaccccatcagagtgcacaacctgcagatgaagctgagaagagacgacatcatgtgggagcagtag

SEQ ID NO: 13073 - DNA, 1050 bp, synthetic construct; identical to SEQ ID NO: 9332
  source 1..1050: mol_type = other DNA; note = Synthetic coding sequence

SEQ ID NO: 13074 - DNA, 636 bp, synthetic construct; identical to SEQ ID NO: 9361
  source 1..636: mol_type = other DNA; note = Synthetic coding sequence

SEQ ID NO: 13075 - DNA, 438 bp, synthetic construct
  source 1..438: mol_type = other DNA; note = Synthetic coding sequence
atgatccccatctggaagcagcaggccagacccggcgacggccccgtgatctgggactaccacgtggtgctgctgcacgtgagcagcggcggccagaacttcatctacgacctggacaccgtgctgcccttcccctgcctgttcgacacctacgtggaggacgccttcaagagcgacgacgacatccacccccagttcagaagaaagttcagagtgatcagagccgacagctacctgaagaacttcgccagcgacagaagccacatgaaggacagcagcggcaactggagagagcccccccccccctacccctgcatcgagaccggcgacagcaagatgaacctgaacgacttcatcagcatggaccccaaggtgggctggggcgccgtgtacaccctgagcgagttcacccacagattcggcagcaagaactgctag

SEQ ID NO: 13076 - DNA, 258 bp, synthetic construct
  source 1..258: mol_type = other DNA; note = Synthetic coding sequence
atgagcgacaagagcgacctgaaggccgagctggagagaaagaagcagagactggcccagatcagagaggagaagaagagaaaggaggaggagagaaagaagaaggaggccgacatgcagcagaagaaggagcccgtgcaggacgacagcgacctggacagaaagagaagagagaccgaggccctgctgcagagcatcggcatcagccccgagccccccctggtgcccacccccatgagccccagcagcaagagctag

SEQ ID NO: 13077 - DNA, 588 bp, synthetic construct
  source 1..588: mol_type = other DNA; note = Synthetic coding sequence
atggacagcgagctgatgcacagcatcgtgggcagctaccacaagccccccgagagagtgttcgtgcccagcttcacccagaacgagcccagccagaactgccaccccgccaacctggaggtgaccagccccaagatcctgcacagccccaacagccaggccctgatcctggccctgaagaccctgcaggagaagatccacagactggagctggagagaacccaggccgaggacaacctgaacatcctgagcagagaggccgcccagtacaagaaggccctggagaacgagaccaacgagagaaacctggcccaccaggagctgatcaagcagaagaaggacatcagcatccagctgagcagcgcccagagcagatgcaccctgctggagaagcagctggagtacaccaagagaatggtgctgaacgtggagagagagaagaacatgatcctggagcagcaggcccagctgcagagagagaaggagcaggaccagatgaagctgtacgccaagctggagaagctggacgtgctggagaaggagtgcttcagactgaccaccacccagaagaccgccgaggacaagtag

SEQ ID NO: 13078 - DNA, 1272 bp, synthetic construct; identical to SEQ ID NO: 10767
  source 1..1272: mol_type = other DNA; note = Synthetic coding sequence

SEQ ID NO: 13079 - DNA, 2097 bp, synthetic construct
  source 1..2097: mol_type = other DNA; note = Synthetic coding sequence
ggcgtgggcggcagaggcgagagactgcccagaggcttcgccagagtggtgagagtggccagcgagggcagcgtgagaagacccagcggccccgtgcccgccccccagccccccgccttcagattcgtgagcagacccggcagagccagaagcgagagcgagaccctggagagaagccccccccagagccccggccccggcaaggccggcgacgcccccaacagaagaagcggccacgtgagaggcgccagagtgctgagcccccccggcagaagagccagactgagcagccccggccccagcagaagcagcgaggccagagaggagctgagaagacacctggtgggcctgatcgagagaagcagagtggtgatcttcagcaagagctactgcccccacagcaccagagtgaaggagctgttcagcagcctgggcgtggagtgcaacgtgctggagctggaccaggtggacgacggcgccagagtgcaggaggtgctgagcgagatcaccaaccagaagaccgtgcccaacatcttcgtgaacaaggtgcacgtgggcggctgcgaccagaccttccaggcctaccagagcggcctgctgcagaagctgctgcaggaggacctggcctacgactacgacctgatcatcatcggcggcggcagcggcggcctgagctgcgccaaggaggccgccatcctgggcaagaaggtgatggtgctggacttcgtggtgcccagcccccagggcaccagctggggcctgggcggcacctgcgtgaacgtgggctgcatccccaagaagctgatgcaccaggccgccctgctgggccaggccctgtgcgacagcagaaagttcggctgggagtacaaccagcaggtgagacacaactgggagaccatgaccaaggccatccagaaccacatcagcagcctgaactggggctacagactgagcctgagagagaaggccgtggcctacgtgaacagctacggcgagttcgtggagcaccacaagatcaaggccaccaacaagaagggccaggagacctactacaccgccgcccagttcgtgatcgccaccggcgagagacccagatacctgggcatccagggcgacaaggagtactgcatcaccagcgacgacctgttcagcctgccctactgccccggcaagaccctggtggtgggcgccagctacgtggccctggagtgcgccggcttcctggccggcttcggcctggacgtgaccgtgatggtgagaagcatcctgctgagaggcttcgaccaggagatggccgagaaggtgggcagctacatggagcagcacggcgtgaagttcctgagaaagttcatccccgtgatggtgcagcagctggagaagggcagccccggcaagctgaaggtgctggccaagagcaccgagggcaccgagaccatcgagggcgtgtacaacaccgtgctgctggccatcggcagagacagctgcaccagaaagatcggcctggagaagatcggcgtgaagatcaacgagaagagcggcaagatccccgtgaacgacgtggagcagaccaacgtgccctacgtgtacgccgtgggcgacatcctggaggacaagcccgagctgacccccgtggccatccagagcggcaagctgctggcccagagactgttcggcgccagcctggagaagtgcgactacatcaacgtgcccaccaccgtgttcacccccctggagtacggctgctgcggcctgagcgaggagaaggccatcgaggtgtacaagaaggagaacctggagatctaccacaccctgttctggcccctggagtggaccgtggccggcagagagaacaacacctgctacgccaagatcatctgcaacaagttcgaccacgacagagtgatcggcttccacatcctgggccccaacgccggcgaggtgacccagggcttcgccgccgccatgaagtgcggcctgaccaagcagctgctggacgacaccatcggcatccaccccacctgcggcgaggtgttcaccaccctggagatcaccaagagcagcggcctggacatcacccagaagggctgctgaggctag

SEQ ID NO: 13080 - DNA, 609 bp, synthetic construct
  source 1..609: mol_type = other DNA; note = Synthetic coding sequence
atgaccggcagcaacagccacatcaccatcctgaccctgaaggtgctgccccacttcgagagcctgggcaagcaggagaagatccccaacaagatgagcgccttcagaaaccactgcccccacctggacagcgtgggcgagatcaccaaggaggacctgatccagaagagcctgggcacctgccaggactgcaaggtgcagggccccaacctgtgggcctgcctggagaacagatgcagctacgtgggctgcggcgagagccaggtggaccacagcaccatccacagccaggagaccaagcactacctgaccgtgaacctgaccaccctgagagtgtggtgctacgcctgcagcaaggaggtgttcctggacagaaagctgggcacccagcccagcctgccccacgtgagacagccccaccagatccaggagaacagcgtgcaggacttcaagatccccagcaacaccaccctgaagacccccctggtggccgtgttcgacgacctggacatcgaggccgacgaggaggacgagctgagagccagaggcctgaccggcctgaagaacatcggcaacacctgctacatgaacgccgccctgcaggcctag

SEQ ID NO: 13081 - DNA, 1443 bp, synthetic construct; identical to SEQ ID NO: 12577
  source 1..1443: mol_type = other DNA; note = Synthetic coding sequence

SEQ ID NO: 13082 - DNA, 309 bp, synthetic construct; identical to SEQ ID NO: 11300
  source 1..309: mol_type = other DNA; note = Synthetic coding sequence

SEQ ID NO: 13083 - DNA, 318 bp, synthetic construct
  source 1..318: mol_type = other DNA; note = Synthetic coding sequence
atgagccagagcggcgccgtgagctgctgccccggcgccaccaacggcagcctgggcagaagcgacggcgtggccaagatgagccccaaggacctgttcgagcagagaaagaagtacagcaacagcaacgtgatcatgcacgagaccagccagtaccacgtgcagcacctggccaccttcatcatggacaagagcgaggccatcaccagcgtggacgacgccatcagaaagctggtgcagctgagcagcaaggagaagatctggacccaggagatgctgctgcaggtgaacgaccagagcctgagactgctggactag

SEQ ID NO: 13084 - DNA, 222 bp, synthetic construct
  source 1..222: mol_type = other DNA; note = Synthetic coding sequence
atgagcgccttcagaaaccactgcccccacctggacagcgtgggcgagatcaccaaggaggacctgatccagaagagcctgggcacctgccaggactgcaaggtgcagggccccaacctgtgggcctgcctggagaacagatgcagctacgtgggctgcggcgagagccaggtggaccacagcaccatccacagccaggagaccaagcactacctgacctag

SEQ ID NO: 13085 - DNA, 276 bp, synthetic construct
  source 1..276: mol_type = other DNA; note = Synthetic coding sequence
atggccatgaccgtggtgaccaaggagaagaacaagaaggtgcccaccatcttcctgagcaagaagcccagagagaaggaggtggacagcaagagccaggtgatcgagggcatcagcagactgatctgcagcgccaagcagcagcagaccatgctgagagtgagcatcgacggcgtggagtggagcgacatcaagttcttccagctggccgcccagtggcccacccacgtgaagcacttccccgtgggcctgttcagcggcagcaaggccacctag

SEQ ID NO: 13086 - DNA, 2535 bp, synthetic construct
  source 1..2535: mol_type = other DNA; note = Synthetic coding sequence
atgttctggaagttcgacctgcacagcagcagccacatcgacaccctgctggagagagaggacgtgaccctgaaggagctgatggacgaggaggacgtgctgcaggagtgcaaggcccagaacagaaagctgatcgagttcctgctgaaggccgagtgcctggaggacctggtgagcttcatcatcgaggagcccccccaggacatggacgagaagatcagatacaagtaccccaacatcagctgcgagctgctgaccagcgacgtgagccagatgaacgacagactgggcgaggacgagagcctgctgatgaagctgtacagcttcctgctgaacgacagccccctgaaccccctgctggccagcttcttcagcaaggtgctgagcatcctgatcagcagaaagcccgagcagatcgtggacttcctgaagaagaagcacgacttcgtggacctgatcatcaagcacatcggcaccagcgccatcatggacctgctgctgagactgctgacctgcatcgagcccccccagcccagacaggacgtgctgaactggctgaacgaggagaagatcatccagagactggtggagatcgtgcaccccagccaggaggaggacagacacagcaacgccagccagagcctgtgcgagatcgtgagactgagcagagaccagatgctgcagatccagaacagcaccgagcccgaccccctgctggccaccctggagaagcaggagatcatcgagcagctgctgagcaacatcttccacaaggagaagaacgagagcgccatcgtgagcgccatccagatcctgctgaccctgctggagaccagaagacccaccttcgagggccacatcgagatctgcccccccggcatgagccacagcgcctgcagcgtgaacaagagcgtgctggaggccatcagaggcagactgggcagcttccacgagctgctgctggagccccccaagaagagcgtgatgaagaccacctggggcgtgctggacccccccgtgggcaacaccagactgaacgtgatcagactgatcagcagcctgctgcagaccaacaccagcagcatcaacggcgacctgatggagctgaacagcatcggcgtgatcctgaacatgttcttcaagtacacctggaacaacttcctgcacacccaggtggagatctgcatcgccctgatcctggccagccccttcgagaacaccgagaacgccaccatcaccgaccaggacagcaccggcgacaacctgctgctgaagcacctgttccagaagtgccagctgatcgagagaatcctggaggcctgggagatgaacgagaagaagcaggccgagggcggcagaagacacggctacatgggccacctgaccagaatcgccaactgcatcgtgcacagcaccgacaagggccccaacagcgccctggtgcagcagctgatcaaggacctgcccgacgaggtgagagagagatgggagaccttctgcaccagcagcctgggcgagaccaacaagagaaacaccgtggacctggccttcagcgactaccagatgcagcagatgaccagcaacttcatcgaccagttcggcttcaacgacgagaagttcgccgaccaggacgacatcggcaacgtgagcttcgacagagtgagcgacatcaacttcaccctgaacaccaacgagagcggcaacatcgccctgttcgaggcctgctgcaaggagagaatccagcagttcgacgacggcggcagcgacgaggaggacatctgggaggagaagcacatcgccttcacccccgagagccagagaagaagcagcagcggcagcaccgacagcgaggagagcaccgacagcgaggaggaggacggcgccaagcaggacctgttcgagcccagcagcgccaacaccgaggacaagatggaggtggacctgagcgagccccccaactggagcgccaacttcgacgtgcccatggagaccacccacggcgcccccctggacagcgtgggcagcgacgtgtggagcaccgaggagcccatgcccaccaaggagaccggctgggccagcttcagcgagttcaccagcagcctgagcaccaaggacagcctgagaagcaacagccccgtggagatggagaccagcaccgagcccatggaccccctgacccccagcgccgccgccctggccgtgcagcccgaggccgccggcagcgtggccatggaggccagcagcgacggcgaggaggacgccgagagcaccgacaaggtgaccgagaccgtgatgaacggcggcatgaaggagaccctgagcctgaccgtggacgccaagaccgagaccgccgtgttcaagagcgaggagggcaagctgagcaccagccaggacgccgcctgcaaggacgccgaggagtgccccgagaccgccgaggccaagtgcgccgcccccagaccccccagcagcagccccgagcagagaaccggccagcccagcgcccccggcgacaccagcgtgaacggccccgtgtag

SEQ ID NO: 13087 - DNA, 2604 bp, synthetic construct
  source 1..2604: mol_type = other DNA; note = Synthetic coding sequence
atgttctggaagttcgacctgcacagcagcagccacatcgacaccctgctggagagagaggacgtgaccctgaaggagctgatggacgaggaggacgtgctgcaggagtgcaaggcccagaacagaaagctgatcgagttcctgctgaaggccgagtgcctggaggacctggtgagcttcatcatcgaggagcccccccaggacatggacgagaagatcagatacaagtaccccaacatcagctgcgagctgctgaccagcgacgtgagccagatgaacgacagactgggcgaggacgagagcctgctgatgaagctgtacagcttcctgctgaacgacagccccctgaaccccctgctggccagcttcttcagcaaggtgctgagcatcctgatcagcagaaagcccgagcagatcgtggacttcctgaagaagaagcacgacttcgtggacctgatcatcaagcacatcggcaccagcgccatcatggacctgctgctgagactgctgacctgcatcgagcccccccagcccagacaggacgtgctgaactggctgaacgaggagaagatcatccagagactggtggagatcgtgcaccccagccaggaggaggacagacacagcaacgccagccagagcctgtgcgagatcgtgagactgagcagagaccagatgctgcagatccagaacagcaccgagcccgaccccctgctggccaccctggagaagcaggagatcatcgagcagctgctgagcaacatcttccacaaggagaagaacgagagcgccatcgtgagcgccatccagatcctgctgaccctgctggagaccagaagacccaccttcgagggccacatcgagatctgcccccccggcatgagccacagcgcctgcagcgtgaacaagagcgtgctggaggccatcagaggcagactgggcagcttccacgagctgctgctggagccccccaagaagagcgtgatgaagaccacctggggcgtgctggacccccccgtgggcaacaccagactgaacgtgatcagactgatcagcagcctgctgcagaccaacaccagcagcatcaacggcgacctgatggagctgaacagcatcggcgtgatcctgaacatgttcttcaagtacacctggaacaacttcctgcacacccaggtggagatctgcatcgccctgatcctggccagccccttcgagaacaccgagaacgccaccatcaccgaccaggacagcaccggcgacaacctgctgctgaagcacctgttccagaagtgccagctgatcgagagaatcctggaggcctgggagatgaacgagaagaagcaggccgagggcggcagaagacacggctacatgggccacctgaccagaatcgccaactgcatcgtgcacagcaccgacaagggccccaacagcgccctggtgcagcagctgatcaaggacctgcccgacgaggtgagagagagatgggagaccttctgcaccagcagcctgggcgagaccaacaagagaaacaccgtggacctggtgaccacctgccacatccacagcagcagcgacgacgagatcgacttcaaggagaccggcttcagccaggacagcagcctgcagcagatgcagcagatgaccagcaacttcatcgaccagttcggcttcaacgacgagaagttcgccgaccaggacgacatcggcaacgtgagcttcgacagagtgagcgacatcaacttcaccctgaacaccaacgagagcggcaacatcgccctgttcgaggcctgctgcaaggagagaatccagcagttcgacgacggcggcagcgacgaggaggacatctgggaggagaagcacatcgccttcacccccgagagccagagaagaagcagcagcggcagcaccgacagcgaggagagcaccgacagcgaggaggaggacggcgccaagcaggacctgttcgagcccagcagcgccaacaccgaggacaagatggaggtggacctgagcgagccccccaactggagcgccaacttcgacgtgcccatggagaccacccacggcgcccccctggacagcgtgggcagcgacgtgtggagcaccgaggagcccatgcccaccaaggagaccggctgggccagcttcagcgagttcaccagcagcctgagcaccaaggacagcctgagaagcaacagccccgtggagatggagaccagcaccgagcccatggaccccctgacccccagcgccgccgccctggccgtgcagcccgaggccgccggcagcgtggccatggaggccagcagcgacggcgaggaggacgccgagagcaccgacaaggtgaccgagaccgtgatgaacggcggcatgaaggagaccctgagcctgaccgtggacgccaagaccgagaccgccgtgttcaagagcgaggagggcaagctgagcaccagccaggacgccgcctgcaaggacgccgaggagtgccccgagaccgccgaggccaagtgcgccgcccccagaccccccagcagcagccccgagcagagaaccggccagcccagcgcccccggcgacaccagcgtgaacggccccgtgtag

SEQ ID NO: 13088 - DNA, 174 bp, synthetic construct
  source 1..174: mol_type = other DNA; note = Synthetic coding sequence
atgaccagcaagaagctggtgaacagcgtggccggctgcgccgacgacgccctggccggcctggtggcctgcaaccccaacctgcagctgctgcagggccacagagtggccctgagaagcgacctggacagcctgaagggcagagtggccctgctgagcggcggcggcagctag

SEQ ID NO: 13089 - DNA, 2709 bp, synthetic construct; identical to SEQ ID NO: 9700
  source 1..2709: mol_type = other DNA; note = Synthetic coding sequence

SEQ ID NO: 13090 - DNA, 537 bp, synthetic construct
  source 1..537: mol_type = other DNA; note = Synthetic coding sequence
atgaacagaagaagaaagttcctgctggccagcgtgctggccctgcagaacagcagcttcatctaccccagctgccagaagtgcttcagcagaatcatcctggtgagcaagagaagcaactgccccaagtgcggcagcaccggcgagagcggcaacgccaactacagatacaagctgagcctgaaggtggccgagagcaacaagctgttcgtgatcaccgtgttcggcagctgcctggacaccttcttcggcctgaccgccaccggcctgcacagatacatccaggaccccaacaagatccccgagaccctggacaacgacaccacccagaacctgctgaccaaggccgtggagacctgcttcgtgggccagagcttcatcttcggcgtgaccaacttcgagaaccagcccggccagggcagcgacgccagcaacttcctgcagcagtgcagcgaccacaagagaaaggccaaggccctggtggcctgccagatcgtgctgcccgaccccgccacccaggacgccaagaccaagtag

SEQ ID NO: 13091 - DNA, 441 bp, synthetic construct
  source 1..441: mol_type = other DNA; note = Synthetic coding sequence
atggtggccatggccgaggccgaggccggcgtggccgtggaggtgagaggcctgccccccgccgtgcccgacgagctgctgaccctgtacttcgagaacagaagaagaagcggcggcggccccgtgctgagctggcagagactgggctgcggcggcgtgctgaccttcagagagcccgccgacgccgagagagtgctggcccaggccgaccacgagctgcacggcgcccagctgagcctgagacccgccccccccagagcccccgccagactgctgctgcagggcctgccccccggcaccaccccccagagactggagcagcacgtgcaggccctgctgagagccagcggcctgcccgtgcagccctgctgcgccctggccagccccagacccgacagagccctggtgcagctgcccaagcccctgagcgaggccggctag

SEQ ID NO: 13092 - DNA, 348 bp, synthetic construct
  source 1..348: mol_type = other DNA; note = Synthetic coding sequence
atggccggcagacccctgagaatcggcgaccagctggtgctggaggaggactacgacgagacctacatccccagcgagcaggagatcctggagttcgccagagagatcggcatcgaccccatcaaggagcccgagctgatgtggctggccagagagggcatcgtggcccccctgcccggcgagtggaagccctgccaggacatcaccggcgacatctactacttcaacttcgccaacggccagagcatgtgggaccacccctgcgacgagcactacagaagcctggtgatccaggagagagccaagctgagcaccagcggcgccatcaagaagaagaagaagaagtag

SEQ ID NO: 13093 - DNA, 1191 bp, synthetic construct
  source 1..1191: mol_type = other DNA; note = Synthetic coding sequence
atgagaaccagctacaccgtgaccctgcccgaggacccccccgccgcccccttccccgccctggccaaggagctgagacccagaagccccctgagccccagcctgctgctgagcaccttcgtgggcctgctgctgaacaaggccaagaacagcaagagcgcccagggcctggccggcctgagaaacctgggcaacacctgcttcatgaacagcatcctgcagtgcctgagcaacaccagagagctgagagactactgcctgcagagactgtacatgagagacctgcaccacggcagcaacgcccacaccgccctggtggaggagttcgccaagctgatccagaccatctggaccagcagccccaacgacgtggtgagccccagcgagttcaagacccagatccagagatacgcccccagattcgtgggctacaaccagcaggacgcccaggagttcctgagattcctgctggacggcctgcacaacgaggtgaacagagtgaccctgagacccaagagcaaccccgagaacctggaccacctgcccgacgacgagaagggcagacagatgtggagaaagtacctggagagagaggacagcagaatcggcgacctgttcgtgggccagctgaagagcagcctgacctgcaccgactgcggctactgcagcaccgtgttcgaccccttctgggacctgagcctgcccatcgccaagagaggctaccccgaggtgaccctgatggactgcatgagactgttcaccaaggaggacgtgctggacggcgacgagaagcccacctgctgcagatgcagaggcagaaagagatgcatcaagaagttcagcatccagagattccccaagatcctggtgctgcacctgaagagattcagcgagagcagaatcagaaccagcaagctgaccaccttcgtgaacttccccctgagagacctggacctgagagagttcgccagcgagaacaccaaccacgccgtgtacaacctgtacgccgtgagcaaccacagcggcaccaccatgggcggccactacaccgcctactgcagaagccccggcaccggcgagtggcacaccttcaacgacagcagcgtgacccccatgagcagcagccaggtgagaaccagcgacgcctacctgctgttctacgagctggccagcccccccagcagaatgtag

SEQ ID NO: 13094 - DNA, 633 bp, synthetic construct; identical to SEQ ID NO: 10549
  source 1..633: mol_type = other DNA; note = Synthetic coding sequence

SEQ ID NO: 13095 - DNA, 1428 bp, synthetic construct
  source 1..1428: mol_type = other DNA; note = Synthetic coding sequence
atggagctgtggcaggccgccctgagcaccctgaaccccaaccccaccgacagctgccccctgtacctgaactacgccaccgtggccgccctgccctgcagagtgagcagacacaacagccccagcgccgcccacttcatcaccagactggtgagaacctgcctgccccccggcgcccacagatgcatcgtgatggtgtgcgagcagcccgaggtgttcgccagcgcctgcgccctggccagagccttccccctgttcacccacagaagcggcgccagcagaagactggagaagaagaccgtgaccgtggagttcttcctggtgggccaggacaacggccccgtggaggtgagcaccctgcagtgcctggccaacgccaccgacggcgtgagactggccgccagaatcgtggacaccccctgcaacgagatgaacaccgacaccttcctggaggagatcaacaaggtgggcaaggagctgggcatcatccccaccatcatcagagacgaggagctgaagaccagaggcttcggcggcatctacggcgtgggcaaggccgccctgcacccccccgccctggccgtgctgagccacacccccgacggcgccacccagaccatcgcctgggtgggcaagggcatcgtgtacgacaccggcggcctgagcatcaagggcaagaccaccatgcccggcatgaagagagactgcggcggcgccgccgccgtgctgggcgccttcagagccgccatcaagcagggcttcaaggacaacctgcacgccgtgttctgcctggccgagaacagcgtgggccccaacgccaccagacccgacgacatccacctgctgtacagcggcaagaccgtggagatcaacaacaccgacgccgagggcagactggtgctggccgacggcgtgagctacgcctgcaaggacctgggcgccgacatcatcctggacatggccaccctgaccggcgcccagggcatcgccaccggcaagtaccacgccgccgtgctgaccaacagcgccgagtgggaggccgcctgcgtgaaggccggcagaaagtgcggcgacctggtgcaccccctggtgtactgccccgagctgcacttcagcgagttcaccagcgccgtggccgacatgaagaacagcgtggccgacagagacaacagccccagcagctgcgccggcctgttcatcgccagccacatcggcttcgactggcccggcgtgtgggtgcacctggacatcgccgcccccgtgcacgccggcgagagagccaccggcttcggcgtggccctgctgctggccctgttcggcagagccagcgaggaccccctgctgaacctggtgagccccctgggctgcgaggtggacgtggaggagggcgacctgggcagagacagcaagagaagaagactggtgtag

SEQ ID NO: 13096 - DNA, 537 bp, synthetic construct
  source 1..537: mol_type = other DNA; note = Synthetic coding sequence
atggtggccatggccgaggccgaggccggcgtggccgtggaggtgagaggcctgccccccgccgtgcccgacgagctgctgaccctgtacttcgagaacagaagaagaagcggcggcggccccgtgctgagctggcagagactgggctgcggcggcgtgctgaccttcagagagcccgccgacgccgagagagtgctggcccaggccgaccacgagctgcacggcgcccagctgagcctgagacccgccccccccagagcccccgccagactgctgctgcagggcctgccccccggcaccaccccccagagactggagcagcacgtgcaggccctgctgagagccagcggcctgcccgtgcagccctgctgcgccctggccagccccagacccgacagagccctggtgcagctgcccaagcccctgagcgaggccgacgtgagagtgctggaggagcaggcccagaacctgggcctggagggcaccctggtgagcctggccagagtgccccaggccagagccgtgagagtggtgtag

SEQ ID NO: 13097 - DNA, 1893 bp, synthetic construct
  source 1..1893: mol_type = other DNA; note = Synthetic coding sequence
atggagaaggtgctgggctgcgagctgctgaagggcctgaacgtgctggacctgggcctgaacatggagatcctggaggagcagatgctgcacgagatcctgtgcagagagtaccccgagctggagaccagatggcaggacctgaagatcagagccctggacacctgcaaggccgtggaggccgccgaggagagactgctgaccatgctgctgttccagaaccccaagagacagaagcccgccaagttcctgagaaacatcgtgagagcccagggcaagctgtgccagctgagagcccactgcgaggagctggagggccagaagctgcaggagatggtgctgtgggccccctacagacccgtggtgtggcacggcatggccatggtgaaggccctgagccagctgcagaacctgctgcccctgttctgcatgagccccgagaactggctggccgtgaccaagcaggccctggacagcatgaagcccagagagatcaaccacggcgaggacctggccagccacctgctgcagctgagagcccacctgaccagacagctgctgggcagcaccgtgaccgccctgggcctgacccaggtgcccctggtgggcgccctgggcgccctggccctgctgcaggccaccggcaaggccagcgagctggagagactggccctgtggcccggcctggccgccagccccagcaccgtgcacagcaagcccgtgagcgacgtggccagacccgcctggctgggccccaaggcctggcacgagtgcgagatgctggagctgctgccccccttcgtgggcctgtgcgccagcctggccggccacagcagcgcctggcaggcctacctgagcctgagcagcaccgtgctgggccccgcccccggccccggccccgagcccctgagcctgctgcagaagctgatcctgtggagagtgctgagacccgagtgcctggccggcgccctggccgacttcaccaccagcctgctgggcagacccctggacgagaacacctacgcccccaccatgcccttcaagcacagccaggccacccagcccatgctgatcctgctgcccccccccggccaccccagcgccaccctgcaccccctgaccgtgatccagaagctggccgccaagtaccagcagggccagaagcagctgcaggtgatcgccctgggcagcgaggcctgggaccccgtgagcgtggtggtgagcaccctgagccaggccatgtacgagggccactggctggtgctggacaactgccacctgatgccccactggcccaaggagctgctgcagctgctgctggagctgctgggcagagccaaggtggtggccgacctggagagcgagcagctgctggaccagcccgagagcagaaacgtgagcaccgtgcacagagacttcagactgtggctgatcgtgcccgccgagagcagcgccagcctgcccgccgtgctgacccagcacagcatgcccgtgttctggaaccagagcctggagctgggccacgtgctgatcgacagcgtggagctggcccagcaggtgctgtacatgcagccccccacccaggccctgcccctgctgctgctgcacggcctgctgctgcacagacagctgtacggcaccagactgcaggcccacagaggcagatggagccaggtgaccctgacccaggtgctgcagacccaggaccagctgtgggccagcctgagcaaccccagagccgccatgcaggagctggccggcgagaccctgcccctgcccctgggcgtgatcagcccccaggagagcctggaggagggcggcggcggcatccagttcaccgccctggtgctggccgtggtggagaccgagggcaccggcaccgagagactgtag

SEQ ID NO: 13098 - DNA, 1488 bp, synthetic construct
  source 1..1488: mol_type = other DNA; note = Synthetic coding sequence
atggagctgcacggcggcaacagaggcggctaccagcccaaggccctggagcagagcggctgctggctgtggcaggccgccctgagcaccctgaaccccaaccccaccgacagctgccccctgtacctgaactacgccaccgtggccgccctgccctgcagagtgagcagacacaacagccccagcgccgcccacttcatcaccagactggtgagaacctgcctgccccccggcgcccacagatgcatcgtgatggtgtgcgagcagcccgaggtgttcgccagcgcctgcgccctggccagagccttccccctgttcacccacagaagcggcgccagcagaagactggagaagaagaccgtgaccgtggagttcttcctggtgggccaggacaacggccccgtggaggtgagcaccctgcagtgcctggccaacgccaccgacggcgtgagactggccgccagaatcgtggacaccccctgcaacgagatgaacaccgacaccttcctggaggagatcaacaaggtgggcaaggagctgggcatcatccccaccatcatcagagacgaggagctgaagaccagaggcttcggcggcatctacggcgtgggcaaggccgccctgcacccccccgccctggccgtgctgagccacacccccgacggcgccacccagaccatcgcctgggtgggcaagggcatcgtgtacgacaccggcggcctgagcatcaagggcaagaccaccatgcccggcatgaagagagactgcggcggcgccgccgccgtgctgggcgccttcagagccgccatcaagcagggcttcaaggacaacctgcacgccgtgttctgcctggccgagaacagcgtgggccccaacgccaccagacccgacgacatccacctgctgtacagcggcaagaccgtggagatcaacaacaccgacgccgagggcagactggtgctggccgacggcgtgagctacgcctgcaaggacctgggcgccgacatcatcctggacatggccaccctgaccggcgcccagggcatcgccaccggcaagtaccacgccgccgtgctgaccaacagcgccgagtgggaggccgcctgcgtgaaggccggcagaaagtgcggcgacctggtgcaccccctggtgtactgccccgagctgcacttcagcgagttcaccagcgccgtggccgacatgaagaacagcgtggccgacagagacaacagccccagcagctgcgccggcctgttcatcgccagccacatcggcttcgactggcccggcgtgtgggtgcacctggacatcgccgcccccgtgcacgccggcgagagagccaccggcttcggcgtggccctgctgctggccctgttcggcagagccagcgaggaccccctgctgaacctggtgagccccctgggctgcgaggtggacgtggaggagggcgacctgggcagagacagcaagagaagaagactggtgtag

SEQ ID NO: 13099 - DNA, 618 bp, synthetic construct
  source 1..618: mol_type = other DNA; note = Synthetic coding sequence
atggagaccgacctgaacagccaggacagaaaggacctggacaagttcatcaagttcttcgccctgaagaccgtgcaggtgatcgtgcaggccagactgggcgagaagatctgcaccagaagcagcagcagccccaccggcagcgactggttcaacctggccatcaaggacatccccgaggtgacccacgaggccaagaaggccctggccggccagctgcccgccgtgggcagaagcatgtgcgtggagatcagcctgaagaccagcgagggcgacagcatggagctggagatctggtgcctggagatgaacgagaagtgcgacaaggagatcaaggtgagctacaccgtgtacaacagactgagcctgctgctgaagagcctgctggccatcaccagagtgacccccgcctacagactgagcagaaagcagggccacgagtacgtgatcctgtacagaatctacttcggcgaggtgcagctgagcggcctgggcgagggcttccagaccgtgagagtgggcaccgtgggcacccccgtgggcaccatcaccctgagctgcgcctacagaatcaacctggccttcatgagcaccagacagttcgagagaaccccctag

SEQ ID NO: 13100 - DNA, 117 bp, synthetic construct
  source 1..117: mol_type = other DNA; note = Synthetic coding sequence
atggccgccttcaagctggacttcctgcccgagatgatggtggaccactgcagcctgaacagcagccccgtgagcaagaagatgaacggcaccctggaccaccccgaccagccctag

SEQ ID NO: 13101 - DNA, 1554 bp, synthetic construct; identical to SEQ ID NO: 9849
  source 1..1554: mol_type = other DNA; note = Synthetic coding sequence

SEQ ID NO: 13102 - DNA, 768 bp, synthetic construct
  source 1..768: mol_type = other DNA; note = Synthetic coding sequence
atggagagaagcggccagagagtgaccacctgggactgcgaccagggcaagcacagcgacagcgcccagaagaacgagagagagagcatcagacagaagctggccctgggcagcttcttcgacgacggccccggcatctacaccagctgcagcaagagcggcaagcccagcctgagcagcagactgcagagcggcatgaacctgcagatctgcttcgtgaacgacagcggcagcgacaaggacagcgacgccgacgacagcaagaccgagaccagcctggacacccccctgagccccatgagcaagcagagcagcagctacagcgacagagacaccaccgaggaggagagcgagagcctggacgacatggacttcctgaccagacagaagaagctgcaggccgaggccaagatggccctggccatggccaagcccatggccaagatgcaggtggaggtggagaagcagaacagaaagaagagccccgtggccgacctgctgccccacatgccccacatcagcgagtgcctgatgaagagaagcctgaagcccaccgacctgagagacatgaccatcggccagctgcaggtgatcgtgaacgacctgcacagccagatcgagagcctgaacgaggagctggtgcagctgctgctgatcagagacgagctgcacaccgagcaggacgccatgctggtggacatcgaggacctgaccagacacgccgagagccagcagaagcacatggccgagaagatgcccgccaagtag

SEQ ID NO: 13103 - DNA, 78 bp, synthetic construct
  source 1..78: mol_type = other DNA; note = Synthetic coding sequence
atgagccagagcggcgccgtgagctgctgccccggcgccaccaacggcagcctgggcagaagcgacggcgtggcctag

SEQ ID NO: 13104 - DNA, 360 bp, synthetic construct
  source 1..360: mol_type = other DNA; note = Synthetic coding sequence
atggtgctggagggcaaccccgaggtgggcagccccagaaccagcgacctgcagcacagaggcaacaagggcagctgcgtgctgagcagccccggcgaggacgcccagcccggcgaggagcccatcaagtacggcgagctgatcgtgctgggctgctgcgaggagggcggcgaggagaccgaggcccagagaggcgaggtgaccggccccagagcccacagctgctacaacggctgcctggccagcggcgacaagggcagaagaagaagcagactggccctgagcagaagaagccacgccaacggcgtgaagcccgacgtgatgcaccacatcagcacccccctggtgagcaaggcctag

SEQ ID NO: 13105 - DNA, 348 bp, synthetic construct; identical to SEQ ID NO: 13092
  source 1..348: mol_type = other DNA; note = Synthetic coding sequence

SEQ ID NO: 13106 - DNA, 471 bp, synthetic construct
  source 1..471: mol_type = other DNA; note = Synthetic coding sequence
atgagcagcgtgcagagccagcaggagcagctgagccagagcgaccccagccccagccccaacagctgcagcagcttcgagctgatcgacatggacgccggcagcctgtacgagcccgtgagcccccactggttctactgcaagatcatcgacagcaaggagacctggatccccttcaacagcgaggacagccagcagctggaggaggcctacagcagcggcaagggctgcaacggcagagtggtgcccaccgacggcggcagatacgacgtgcacctgggcgagagaatgagatacgccgtgtactgggacgagctggccagcgaggtgagaagatgcacctggttctacaagggcgacaaggacaacaagtacgtgccctacagcgagagcttcagccaggtgctggaggagacctacatgctggccgtgaccctggacgagtggaagaagaagctggagagcccctag

SEQ ID NO: 13107 - DNA, 14262 bp, synthetic construct; identical to SEQ ID NO: 9351
  source 1..14262: mol_type = other DNA; note = Synthetic coding sequence

SEQ ID NO: 13108 - DNA, 390 bp, synthetic construct
  source 1..390: mol_type = other DNA; note = Synthetic coding sequence
atggtggccatggccgaggccgaggccggcgtggccgtggaggtgagaggcctgccccccgccgtgcccgacgagctgctgaccctgtacttcgagaacagaagaagaagcggcggcggccccgtgctgagctggcagagactgggctgcggcggcgtgctgaccttcagagagcccgccgacgccgagagagtgctggcccaggccgaccacgagctgcacggcgcccagctgagcctgagacccgccccccccagagcccccgccagactgctgctgcagggcctgccccccggcaccaccccccagagactggagcagcacgtgcaggccctgctgagagccagcggcctgcccgtgcagccctgctgcgccctggccagcccctag

SEQ ID NO: 13109 - DNA, 867 bp, synthetic construct
  source 1..867: mol_type = other DNA; note = Synthetic coding sequence
atggagagagagcccagcgccagcgaggccgcccccgccgccgccgccctgttcgcctggggcgccaacagctacggccagctgggcctgggccacaaggaggacgtgctgctgccccagcagctgaacgacttctgcaagcccagaagcgtgagaagaatcaccggcggcggcggccacagcgccgtggtgaccgacggcggcgacctgttcgtgtgcggcctgaacaaggacggccagctgggcctgggccacaccgaggacatcccctacttcaccccctgcaagagcctgttcggctgccccatccagcaggtggcctgcggctgggacttcaccatcatgctgaccgagaacggccaggtgctgagctgcggcagcaacagcttcggccagctgggcgtgccccacggccccagaagatgcgtggtgccccaggccatcgagctgcacaaggagaaggtggtgtgcatcgccgccggcctgagacacgccgtggccgccaccgccagcggcatcgtgttccagtggggcaccggcctggccagctgcggcagaagactgtgccccggccagaccctgcccctgttcttcaccgccaaggagcccagcagagtgaccggcctggagaacagcaaggccatgtgcgtgctggccggcagcgaccacagcgccagcctgaccgacgccggcgaggtgtacgtgtggggcagcaacaagcacggccagctggccaacgaggccgccttcctgcccgtgccccagaagatcgaggcccactgcttccagaacgagaaggtgaccgccatctggagcggctggacccacctggtggcccagaccggcctgctgtggctgagagcctag

SEQ ID NO: 13110 - DNA, 372 bp, synthetic construct
  source 1..372: mol_type = other DNA; note = Synthetic coding sequence
atgaacagaagaagaaagttcctgctggccagcgtgctggccctgcagaacagcagcttcatctaccccagctgccagaagtgcttcagcagaatcatcctggtgagcaagagaagcaactgccccaagtgcggcagcaccggcgagagcggcaacgccaactacagatacaagctgagcctgaaggtggccgagagcaacaagctgttcgtgatcaccgtgttcggcagctgcctggacaccttcttcggcctgaccgccaccggcctgcacagatacatccaggaccccaacaagatccccgagaccctggacaacgacaccacccagaacctgctgaccaaggccgtggagacctgcttcgtgggctag

SEQ ID NO: 13111 - DNA, 324 bp, synthetic construct
  source 1..324: mol_type = other DNA; note = Synthetic coding sequence
atgctgagactgtaccccggccccatggtgaccgaggccgagggcaagggcggccccgagatggccagcctgagcagcagcgtggtgcccgtgagcttcatcagcaccctgagagagagcgtgctggaccccggcgtgggcggcgagggcgccagcgacaagcagagaagcaagctgagcctgagccacagcatgatccccgccgccaagatccacaccgagctgtgcctgcccgccttcttcagccccgccggcacccagagaagattccagcagccccagcaccacctgaccctgagcatcatccacaccgccgccagatag

SEQ ID NO: 13112 - DNA, 1653 bp, synthetic construct
  source 1..1653: mol_type = other DNA; note = Synthetic coding sequence
atggagaccgacctgaacagccaggacagaaaggacctggacaagttcatcaagttcttcgccctgaagaccgtgcaggtgatcgtgcaggccagactgggcgagaagatctgcaccagaagcagcagcagccccaccggcagcgactggttcaacctggccatcaaggacatccccgaggtgacccacgaggccaagaaggccctggccggccagctgcccgccgtgggcagaagcatgtgcgtggagatcagcctgaagaccagcgagggcgacagcatggagctggagatctggtgcctggagatgaacgagaagtgcgacaaggagatcaaggtgagctacaccgtgtacaacagactgagcctgctgctgaagagcctgctggccatcaccagagtgacccccgcctacagactgagcagaaagcagggccacgagtacgtgatcctgtacagaatctacttcggcgaggtgcagctgagcggcctgggcgagggcttccagaccgtgagagtgggcaccgtgggcacccccgtgggcaccatcaccctgagctgcgcctacagaatcaacctggccttcatgagcaccagacagttcgagagaaccccccccatcatgggcatcatcatcgaccacttcgtggacagaccctaccccagcagcagccccatgcacccctgcaactacagaaccgccggcgaggacaccggcgtgatctaccccagcgtggaggacagccaggaggtgtgcaccaccagcttcagcaccagcccccccagccagtgcgtgttcaccgtgaccaaggcccacttccagacccccacccccgtggtgaccgacaccctgagagtgcccatggccggcctggccttcagccaccagctgagcagcagcagactgagctaccagcccgccgccctgggcgtgggcagcgccgacctggcctaccccgtggtgttcgccgccggcctgaacgccacccacccccaccagctgatggtgcccggcaaggagggcggcgtgcccctggcccccaaccagcccgtgcacggcacccaggccgaccaggagagactggccacctgcacccccagcgacagaacccactgcgccgccacccccagcagcagcgaggacaccgagaccgtgagcaacagcagcgagggcagagccagcccccacgacgtgctggagaccatcttcgtgagaaaggtgggcgccttcgtgaacaagcccatcaaccaggtgaccctgaccagcctggacatccccttcgccatgttcgcccccaagaacctggagctggaggacaccgaccccatggtgaacccccccgacagccccgagaccgagagccccctgcagggcagcctgcacagcgacggcagcagcggcggcagcagcggcaacacccacgacgacttcgtgatgatcgacttcaagcccgccttcagcaaggacgacatcctgcccatggacctgggcaccttctacagagagttccagaaccccccccagctgagcagcctgagcatcgacatcggcgcccagagcatggccgaggacctggacagcctgcccgagaagctggccgtgcacgagaagaacgtgagagagttcgacgccttcgtggagaccctgcagtag

SEQ ID NO: 13113 - DNA, 4104 bp, synthetic construct
  source 1..4104: mol_type = other DNA; note = Synthetic coding sequence
atgggcaacagcgacagccagtacaccctgcagggcagcaagaaccacagcaacaccatcaccggcgccaagcagatcccctgcagcctgaagatcagaggcatccacgccaaggaggagaagagcctgcacggctggggccacggcagcaacggcgccggctacaagagcagaagcctggccagaagctgcctgagccacttcaagagcaaccagccctacgccagcagactgggcggccccacctgcaaggtgagcagaggcgtggcctacagcacccacagaaccaacgcccccggcaaggacttccagggcatcagcgccgccttcagcaccgagaacggcttccacagcgtgggccacgagctggccgacaaccacatcaccagcagagactgcaacggccacctgctgaactgctacggcagaaacgagagcatcgccagcaccccccccggcgaggacagaaagagccccagagtgctgatcaagaccctgggcaagctggacggctgcctgagagtggagttccacaacggcggcaaccccagcaaggtgcccgccgaggactgcagcgagcccgtgcagctgctgagatacagccccaccctggccagcgagaccagccccgtgcccgaggccagaagaggcagcagcgccgacagcctgcccagccacagacccagccccaccgacagcagactgagaagcagcaagggcagcagcctgagcagcgagagcagctggtacgacagcccctggggcaacgccggcgagctgagcgaggccgagggcagcttcctggcccccggcatgcccgaccccagcctgcacgccagcttcccccccggcgacgccaagaagcccttcaaccagagcagcagcctgagcagcctgagagagctgtacaaggacgccaacctgggcagcctgagccccagcggcatcagactgagcgacgagtacatgggcacccacgccagcctgagcaacagagtgagcttcgccagcgacatcgacgtgcccagcagagtggcccacggcgaccccatccagtacagcagcttcaccctgccctgcagaaagcccaaggccttcgtggaggacaccgccaagaaggacagcctgaaggccagaatgagaagaatcagcgactggaccggcagcctgagcagaaagaagagaaagctgcaggagcccagaagcaaggagggcagcgactacttcgacagcagaagcgacggcctgaacaccgacgtgcagggcagcagccaggccagcgccttcctgtggagcggcggcagcacccagatcctgagccagagaagcgagagcacccacgccatcggcagcgaccccctgagacagaacatctacgagaacttcatgagagagctggagatgagcagaaccaacaccgagaacatcgagaccagcaccgagaccgccgagagcagcagcgagagcctgagcagcctggagcagctggacctgctgttcgagaaggagcagggcgtggtgagaaaggccggctggctgttcttcaagcccctggtgaccgtgcagaaggagagaaagctggagctggtggccagaagaaagtggaagcagtactgggtgaccctgaagggctgcaccctgctgttctacgagacctacggcaagaacagcatggaccagagcagcgcccccagatgcgccctgttcgccgaggacagcatcgtgcagagcgtgcccgagcaccccaagaaggagaacgtgttctgcctgagcaacagcttcggcgacgtgtacctgttccaggccaccagccagaccgacctggagaactgggtgaccgccgtgcacagcgcctgcgccagcctgttcgccaagaagcacggcaaggaggacaccctgagactgctgaagaaccagaccaagaacctgctgcagaagatcgacatggacagcaagatgaagaagatggccgagctgcagctgagcgtggtgagcgaccccaagaacagaaaggccatcgagaaccagatccagcagtgggagcagaacctggagaagttccacatggacctgttcagaatgagatgctacctggccagcctgcagggcggcgagctgcccaaccccaagagcctgctggccgccgccagcagacccagcaagctggccctgggcagactgggcatcctgagcgtgagcagcttccacgccctggtgtgcagcagagacgacagcgccctgagaaagagaaccctgagcctgacccagagaggcagaaacaagaagggcatcttcagcagcctgaagggcctggacaccctggccagaaagggcaaggagaagagacccagcatcacccaggtggacgagctgctgcacatctacggcagcaccgtggacggcgtgcccagagacaacgcctgggagatccagacctacgtgcacttccaggacaaccacggcgtgaccgtgggcatcaagcccgagcacagagtggaggacatcctgaccctggcctgcaagatgagacagctggagcccagccactacggcctgcagctgagaaagctggtggacgacaacgtggagtactgcatccccgccccctacgagtacatgcagcagcaggtgtacgacgagatcgaggtgttccccctgaacgtgtacgacgtgcagctgaccaagaccggcagcgtgtgcgacttcggcttcgccgtgaccgcccaggtggacgagagacagcacctgagcagaatcttcatcagcgacgtgctgcccgacggcctggcctacggcgagggcctgagaaagggcaacgagatcatgaccctgaacggcgaggccgtgagcgacctggacctgaagcagatggaggccctgttcagcgagaagagcgtgggcctgaccctgatcgccagaccccccgacaccaaggccaccctgtgcaccagctggagcgacagcgacctgttcagcagagaccagaagagcctgctgcccccccccaaccagagccagctgctggaggagttcctggacaacttcaagaagaacaccgccaacgacttcagcaacgtgcccgacatcaccaccggcctgaagagaagccagaccgacggcaccctggaccaggtgagccacagagagaagatggagcagaccttcagaagcgccgagcagatcaccgccctgtgcagaagcttcaacgacagccaggccaacggcatggagggccccagagagaaccaggaccccccccccagaagcctggccagacacctgagcgacgccgacagactgagaaaggtgatccaggagctggtggacaccgagaagagctacgtgaaggacctgagctgcctgttcgagctgtacctggagcccctgcagaacgagaccttcctgacccaggacgagatggagagcctgttcggcagcctgcccgagatgctggagttccagaaggtgttcctggagaccctggaggacggcatcagcgccagcagcgacttcaacaccctggagacccccagccagttcagaaagctgctgttcagcctgggcggcagcttcctgtactacgccgaccacttcaagctgtacagcggcttctgcgccaaccacatcaaggtgcagaaggtgctggagagagccaagaccgacaaggccttcaaggccttcctggacgccagaaaccccaccaagcagcacagcagcaccctggagagctacctgatcaagcccgtgcagagagtgctgaagtaccccctgctgctgaaggagctggtgagcctgaccgaccaggagagcgaggagcactaccacctgaccgaggccctgaaggccatggagaaggtggccagccacatcaacgagatgcagaagatctacgaggactacggcaccgtgttcgaccagctggtggccgagcagagcggcaccgagaaggaggtgaccgagctgagcatgggcgagctgctgatgcacagcaccgtgagctggctgaaccccttcctgagcctgggcaaggccagaaaggacctggagctgaccgtgttcgtgttcaagagagccgtgatcctggtgtacaaggagaactgctag

SEQ ID NO: 13114 - DNA, 45 bp, synthetic construct
  source 1..45: mol_type = other DNA; note = Synthetic coding sequence
atgaacggcaccctggaccaccccgaccagcccgacctggactag

SEQ ID NO: 13115 - DNA, 519 bp, synthetic construct
  source 1..519: mol_type = other DNA; note = Synthetic coding sequence
atggtggccatggccgaggccgaggccggcgtggccgtggaggtgagaggcctgccccccgccgtgcccgacgagctgctgaccctgtacttcgagaacagaagaagaagcggcggcggccccgtgctgagctggcagagactgggctgcggcggcgtgctgaccttcagagagcccgccgacgccgagagagtgctggcccaggccgaccacgagctgcacggcgcccagctgagcctgagacccgccccccccagagcccccgccagactgctgctgcagggcctgccccccggcaccaccccccagagactggagcagcacgtgcaggccctgctgagagccagcggcctgcccgtgcagccctgctgcgccctggccagccccagacccgacagagccctggtgcagctgcccaagcccctgagcgaggccgacgtgagagtgctggaggagcaggcccagaacctgggcctggagggcaccctggtgagcctggccagagtgccccaggcctag

SEQ ID NO: 13116 - DNA, 27 bp, synthetic construct
  source 1..27: mol_type = other DNA; note = Synthetic coding sequence
atgttctggaagttcgacctgcactag

SEQ ID NO: 13117 - DNA, 411 bp, synthetic construct
  source 1..411: mol_type = other DNA; note = Synthetic coding sequence
atggtggccatggccgaggccgaggccggcgtggccgtggaggtgagaggcctgccccccgccgtgcccgacgagctgctgaccctgtacttcgagaacagaagaagaagcggcggcggccccgtgctgagctggcagagactgggctgcggcggcgtgctgaccttcagagagcccgccgacgccgagagagtgctggcccaggccgaccacgagctgcacggcgcccagctgagcctgagacccgccccccccagagcccccgccagactgctgctgcagggcctgccccccggcaccaccccccagagactggagcagcacgtgcaggccctgctgagagccagcggcctgcccgtgcagccctgctgcgccctggccagccccagacccgacagagccctggtgtag

SEQ ID NO: 13118 - DNA, 5844 bp, synthetic construct
  source 1..5844: mol_type = other DNA; note = Synthetic coding sequence
ggcagacccatcgaccccagagagggccccggcagaccccccctggacggcagagaccacttcggcagaccccccgtggacatcagagagaacctggtgagacccggcatcgaccacctgggcagaagagaccacttcggcttcaaccccgagaagccctggggccacagaggcgacttcgacgagagagagcacagagtgctgcccgtgtacggcggccccaagggcctgcacgaggagagaggcagattcagaagcggcaactacagattcgaccccagaagcggcccctggaacagaggcttcggccaggaggtgcacagagacttcgacgacagaagaagaccctgggagagacagagagacagagacgacagagacttcgacttctgcagagagatgaacggcaacagactgggcagagacagaatccagaacacctgggtgccccccccccacgccagagtgttcgactacttcgagggcgccaccagccagagaaagggcgacaacgtgccccaggtgaacggcgagaacaccgagagacacgcccagcccccccccatccccgtgcagaacgaccccgagctgtacgagaagctgaccagcagcaacgagatcaacaaggagaagagcgacaccgtggccgacatcgagagcgagcccgtggtggagagcaccgagaccgagggcacccccctgaccagcctgaccgccgagaccagaagacaggtgaagatgggcaacagcgacagccagtacaccctgcagggcagcaagaaccacagcaacaccatcaccggcgccaagcagatcccctgcagcctgaagatcagaggcatccacgccaaggaggagaagagcctgcacggctggggccacggcagcaacggcgccggctacaagagcagaagcctggccagaagctgcctgagccacttcaagagcaaccagccctacgccagcagactgggcggccccacctgcaaggtgagcagaggcgtggcctacagcacccacagaaccaacgcccccggcaaggacttccagggcatcagcgccgccttcagcaccgagaacggcttccacagcgtgggccacgagctggccgacaaccacatcaccagcagagactgcaacggccacctgctgaactgctacggcagaaacgagagcatcgccagcaccccccccggcgaggacagaaagagccccagagtgctgatcaagaccctgggcaagctggacggctgcctgagagtggagttccacaacggcggcaaccccagcaaggtgcccgccgaggactgcagcgagcccgtgcagctgctgagatacagccccaccctggccagcgagaccagccccgtgcccgaggccagaagaggcagcagcgccgacagcctgcccagccacagacccagccccaccgacagcagactgagaagcagcaagggcagcagcctgagcagcgagagcagctggtacgacagcccctggggcaacgccggcgagctgagcgaggccgagggcagcttcctggcccccggcatgcccgaccccagcctgcacgccagcttcccccccggcgacgccaagaagcccttcaaccagagcagcagcctgagcagcctgagagagctgtacaaggacgccaacctgggcagcctgagccccagcggcatcagactgagcgacgagtacatgggcacccacgccagcctgagcaacagagtgagcttcgccagcgacatcgacgtgcccagcagagtggcccacggcgaccccatccagtacagcagcttcaccctgccctgcagaaagcccaaggccttcgtggaggacaccgccaagaaggacagcctgaaggccagaatgagaagaatcagcgactggaccggcagcctgagcagaaagaagagaaagctgcaggagcccagaagcaaggagggcagcgactacttcgacagcagaagcgacggcctgaacaccgacgtgcagggcagcagccaggccagcgccttcctgtggagcggcggcagcacccagatcctgagccagagaagcgagagcacccacgccatcggcagcgaccccctgagacagaacatctacgagaacttcatgagagagctggagatgagcagaaccaacaccgagaacatcgagaccagcaccgagaccgccgagagcagcagcgagagcctgagcagcctggagcagctggacctgctgttcgagaaggagcagggcgtggtgagaaaggccggctggctgttcttcaagcccctggtgaccgtgcagaaggagagaaagctggagctggtggccagaagaaagtggaagcagtactgggtgaccctgaagggctgcaccctgctgttctacgagacctacggcaagaacagcatggaccagagcagcgcccccagatgcgccctgttcgccgaggacagcatcgtgcagagcgtgcccgagcaccccaagaaggagaacgtgttctgcctgagcaacagcttcggcgacgtgtacctgttccaggccaccagccagaccgacctggagaactgggtgaccgccgtgcacagcgcctgcgccagcctgttcgccaagaagcacggcaaggaggacaccctgagactgctgaagaaccagaccaagaacctgctgcagaagatcgacatggacagcaagatgaagaagatggccgagctgcagctgagcgtggtgagcgaccccaagaacagaaaggccatcgagaaccagatccagcagtgggagcagaacctggagaagttccacatggacctgttcagaatgagatgctacctggccagcctgcagggcggcgagctgcccaaccccaagagcctgctggccgccgccagcagacccagcaagctggccctgggcagactgggcatcctgagcgtgagcagcttccacgccctggtgtgcagcagagacgacagcgccctgagaaagagaaccctgagcctgacccagagaggcagaaacaagaagggcatcttcagcagcctgaagggcctggacaccctggccagaaagggcaaggagaagagacccagcatcacccaggtggacgagctgctgcacatctacggcagcaccgtggacggcgtgcccagagacaacgcctgggagatccagacctacgtgcacttccaggacaaccacggcgtgaccgtgggcatcaagcccgagcacagagtggaggacatcctgaccctggcctgcaagatgagacagctggagcccagccactacggcctgcagctgagaaagctggtggacgacaacgtggagtactgcatccccgccccctacgagtacatgcagcagcaggtgtacgacgagatcgaggtgttccccctgaacgtgtacgacgtgcagctgaccaagaccggcagcgtgtgcgacttcggcttcgccgtgaccgcccaggtggacgagagacagcacctgagcagaatcttcatcagcgacgtgctgcccgacggcctggcctacggcgagggcctgagaaagggcaacgagatcatgaccctgaacggcgaggccgtgagcgacctggacctgaagcagatggaggccctgttcagcgagaagagcgtgggcctgaccctgatcgccagaccccccgacaccaaggccaccctgtgcaccagctggagcgacagcgacctgttcagcagagaccagaagagcctgctgcccccccccaaccagagccagctgctggaggagttcctggacaacttcaagaagaacaccgccaacgacttcagcaacgtgcccgacatcaccaccggcctgaagagaagccagaccgacggcaccctggaccaggtgagccacagagagaagatggagcagaccttcagaagcgccgagcagatcaccgccctgtgcagaagcttcaacgacagccaggccaacggcatggagggccccagagagaaccaggaccccccccccagaagcctggccagacacctgagcgacgccgacagactgagaaaggtgatccaggagctggtggacaccgagaagagctacgtgaaggacctgagctgcctgttcgagctgtacctggagcccctgcagaacgagaccttcctgacccaggacgagatggagagcctgttcggcagcctgcccgagatgctggagttccagaaggtgttcctggagaccctggaggacggcatcagcgccagcagcgacttcaacaccctggagacccccagccagttcagaaagctgctgttcagcctgggcggcagcttcctgtactacgccgaccacttcaagctgtacagcggcttctgcgccaaccacatcaaggtgcagaaggtgctggagagagccaagaccgacaaggccttcaaggccttcctggacgccagaaaccccaccaagcagcacagcagcaccctggagagctacctgatcaagcccgtgcagagagtgctgaagtaccccctgctgctgaaggagctggtgagcctgaccgaccaggagagcgaggagcactaccacctgaccgaggccctgaaggccatggagaaggtggccagccacatcaacgagatgcagaagatctacgaggactacggcaccgtgttcgaccagctggtggccgagcagagcggcaccgagaaggaggtgaccgagctgagcatgggcgagctgctgatgcacagcaccgtgagctggctgaaccccttcctgagcctgggcaaggccagaaaggacctggagctgaccgtgttcgtgttcaagagagccgtgatcctggtgtacaaggagaactgcaagctgaagaagaagctgcccagcaacagcagacccgcccacaacagcaccgacctggaccccttcaagttcagatggctgatccccatcagcgccctgcaggtgagactgggcaaccccgccggcaccgagaacaacagcatctgggagctgatccacaccaagagcgagatcgagggcagacccgagaccatcttccagctgtgctgcagcgacagcgagagcaagaccaacatcgtgaaggtgatcagaagcatcctgagagagaacttcagaagacacatcaagtgcgagctgcccctggagaagacctgcaaggacagactggtgcccctgaagaacagagtgcccgtgagcgccaagctggccagcagcagaagcctgaaggtgctgaagaacagcagcagcaacgagtggaccggcgagaccggcaagggcaccctgctggacagcgacgagggcagcctgagcagcggcacccagagcagcggctgccccaccgccgagggcagacaggacagcaagagcaccagccccggcaagtacccccaccccggcctggccgacttcgccgacaacctgatcaaggagagcgacatcctgagcgacgaggacgacgaccacagacagaccgtgaagcagggcagccccaccaaggacatcgagatccagttccagagactgagaatcagcgaggaccccgacgtgcaccccgaggccgagcagcagcccggccccgagagcggcgagggccagaagggcggcgagcagcccaagctggtgagaggccacttctgccccatcaagagaaaggccaacagcaccaagagagacagaggcaccctgctgaaggcccagatcagacaccagagcctggacagccagagcgagaacgccaccatcgacctgaacagcgtgctggagagagagttcagcgtgcagagcctgaccagcgtggtgagcgaggagtgcttctacgagaccgagagccacggcaagagctag

SEQ ID NO: 13119 - DNA, 294 bp, synthetic construct
  source 1..294: mol_type = other DNA; note = Synthetic coding sequence
atggaggccgccgacgccagcagaagcaacggcagcagccccgaggccagagacgccagaagccccagcggccccagcggcagcctggagaacggcaccaaggccgacggcaaggacgccaagaccaccaacggccacggcggcgaggccgccgagggcaagagcctgggcagcgccctgaagcccggcgagggcagaagcgccctgttcgccggcaacgagtggagaagacccatcatccagttcgtggagagcggcgacgacaagaacagcaactacttcagcatggactag

SEQ ID NO: 13120 - DNA, 117 bp, synthetic construct
  source 1..117: mol_type = other DNA; note = Synthetic coding sequence
atggaggccgccgacgccagcagaagcaacggcagcagccccgaggccagagacgccagaagccccagcggccccagcggcagcctggagaacggcaccaaggccgacggcaagtag

SEQ ID NO: 13121 - DNA, 1455 bp, synthetic construct
  source 1..1455: mol_type = other DNA; note = Synthetic coding sequence
atggccatcggcaagagactggccaccctgcccaccaaggagcagaagacccagagactgatcagcgagctgagcctgctgaaccacaagctgcccgccagagtgtggctgcccaccgccggcttcgaccaccacgtggtgagagtgccccacacccaggccgtggtgctgaacagcaaggacaaggccccctacctgatctacgtggaggtgctggagtgcgagaacttcgacaccaccagcgtgcccgccagaatccccgagaacagaatcagaagcaccagaagcgtggagaacctgcccgagtgcggcatcacccacgagcagagagccggcagcttcagcaccgtgcccaactacgacaacgacgacgaggcctggagcgtggacgacatcggcgagctgcaggtggagctgcccgaggtgcacaccaacagctgcgacaacatcagccagttcagcgtggacagcatcaccagccaggagagcaaggagcccgtgttcatcgccgccggcgacatcagaagaagactgagcgagcagctggcccacacccccaccgccttcaagagagaccccgaggaccccagcgccgtggccctgaaggagccctggcaggagaaggtgagaagaatcagagagggcagcccctacggccacctgcccaactggagactgctgagcgtgatcgtgaagtgcggcgacgacctgagacaggagctgctggccttccaggtgctgaagcagctgcagagcatctgggagcaggagagagtgcccctgtggatcaagccctacaagatcctggtgatcagcgccgacagcggcatgatcgagcccgtggtgaacgccgtgagcatccaccaggtgaagaagcagagccagctgagcctgctggactacttcctgcaggagcacggcagctacaccaccgaggccttcctgagcgcccagagaaacttcgtgcagagctgcgccggctactgcctggtgtgctacctgctgcaggtgaaggacagacacaacggcaacatcctgctggacgccgagggccacatcatccacatcgacttcggcttcatcctgagcagcagccccagaaacctgggcttcgagaccagcgccttcaagctgaccaccgagttcgtggacgtgatgggcggcctggacggcgacatgttcaactactacaagatgctgatgctgcagggcctgatcgccgccagaaagcacatggacaaggtggtgcagatcgtggagatcatgcagcagggcagccagctgccctgcttccacggcagcagcaccatcagaaacctgaaggagagattccacatgagcatgaccgaggagcagctgcagctgctggtggagcagatggtggacggcagcatgagaagcatcaccaccaagctgtacgacggcttccagtacctgaccaacggcatcatgtag

SEQ ID NO: 13122 - DNA, 228 bp, synthetic construct
  source 1..228: mol_type = other DNA; note = Synthetic coding sequence
atggccatccccatcaccgtgctggactgcgacctgctgctgtacggcagaggccacagaaccctggacagattcaagctggacgacgtgaccgacgagtacctgatgagcatgtacggcttccccagacagttcatctactacctggtggagctgctgggcgccaacctgagcagacccacccagagaagcagagccatcagccccgagacccaggtgctggcctag

SEQ ID NO: 13123 - DNA, 2754 bp, synthetic construct
  source 1..2754: mol_type = other DNA; note = Synthetic coding sequence
atggacggcgccgccggccccggcgacggccccgccagagaggccctgcagagcctgagccagagactgagagtgcaggagcaggagatggagctggtgaaggccgccctggccgaggccctgagactgctgagactgcaggtgccccccagcagcctgcagggcagcggcacccccgccccccccggcgacagcctggccgccccccccggcctgccccccacctgcacccccagcctggtgagcagaggcacccagaccgagaccgaggtggagctgaagagcagccccggcccccccggcctgagcaacggcccccccgccccccagggcgccagcgaggagcccagcggcacccagagcgagggcggcggcagcagcagcagcggcgccggcagccccggcccccccggcatcctgagacccctgcagcccccccagagagccgacacccccagaagaaacagcagcagcagcagcagccccagcgagagacccagacagaagctgagcagaaaggccatcagcagcgccaacctgctggtgagaagcggcagcaccgagagcagaggcggcaaggaccccctgagcagccccggcggccccggcagcagaagaagcaactacaacctggagggcatcagcgtgaagatgttcctgagaggcagacccatcaccatgtacatccccagcggcatcagaagcctggaggagctgcccagcggccccccccccgagaccctgagcctggactgggtgtacggctacagaggcagagacagcagaagcaacctgttcgtgctgagaagcggcgaggtggtgtacttcatcgcctgcgtggtggtgctgtacagacccggcggcggccccggcggccccggcggcggcggccagagacactacagaggccacaccgactgcgtgagatgcctggccgtgcaccccgacggcgtgagagtggccagcggccagaccgccggcgtggacaaggacggcaagcccctgcagcccgtggtgcacatctgggacagcgagaccctgctgaagctgcaggagatcggcctgggcgccttcgagagaggcgtgggcgccctggccttcagcgccgccgaccagggcgccttcctgtgcgtggtggacgacagcaacgagcacatgctgagcgtgtgggactgcagcagaggcatgaagctggccgagatcaagagcaccaacgacagcgtgctggccgtgggcttcaaccccagagacagcagctgcatcgtgaccagcggcaagagccacgtgcacttctggaactggagcggcggcgtgggcgtgcccggcaacggcaccctgaccagaaagcagggcgtgttcggcaagtacaagaagcccaagttcatcccctgcttcgtgttcctgcccgacggcgacatcctgaccggcgacagcgagggcaacatcctgacctggggcagaagccccagcgacagcaagacccccggcagaggcggcgccaaggagacctacggcatcgtggcccaggcccacgcccacgagggcagcatcttcgccctgtgcctgagaagagacggcaccgtgctgagcggcggcggcagagacagaagactggtgcagtggggccccggcctggtggccctgcaggaggccgagatccccgagcacttcggcgccgtgagagccatcgccgagggcctgggcagcgagctgctggtgggcaccaccaagaacgccctgctgagaggcgacctggcccagggcttcagccccgtgatccagggccacaccgacgagctgtggggcctgtgcacccaccccagccagaacagattcctgacctgcggccacgacagacagctgtgcctgtgggacggcgagagccacgccctggcctggagcatcgacctgaaggagaccggcctgtgcgccgacttccaccccagcggcgccgtggtggccgtgggcctgaacaccggcagatggctggtgctggacaccgagaccagagagatcgtgagcgacgtgatcgacggcaacgagcagctgagcgtggtgagatacagccccgacggcctgtacctggccatcggcagccacgacaacgtgatctacatctacagcgtgagcagcgacggcgccaagagcagcagattcggcagatgcatgggccacagcagcttcatcacccacctggactggagcaaggacggcaacttcatcatgagcaacagcggcgactacgagatcctgtactgggacgtggccggcggctgcaagcagctgaagaacagatacgagagcagagacagagagtgggccacctacacctgcgtgctgggcttccacgtgtacgtgcccgtgagaagctgccagggcgccgagccccacgtgagaggccccagacagcccagagaccagagacccatccacgccagaagactggcccccagactggccggcagacagggcagacagcacctgcccgtggccagcgccggcagatggggcagaggcgccggcgccagacacgccctgagcaaccccctgcccgtgcccagactgctgcccagaagactgatcgccgcctggagagacagactggccagaagaagaggccccgcccccccctgccccagcctggcccagagccccaccaccagaggcagactgttccccggcctgaccagcagacacagcagaagcagaatcttcctggagggcgccaacggcgcccccgcccacaccgtgtag

SEQ ID NO: 13124 - DNA, 321 bp, synthetic construct
  source 1..321: mol_type = other DNA; note = Synthetic coding sequence
atggtggccatggccgaggccgaggccggcgtggccgtggaggtgagaggcctgccccccgccgtgcccgacgagctgctgaccctgtacttcgagaacagaagaagaagcggcggcggccccgtgctgagctggcagagactgggctgcggcggcgtgctgaccttcagagagcccgccgacgccgagagagtgctggcccaggccgaccacgagctgcacggcgcccagctgagcctgagacccgccccccccagagcccccgccagactgctgctgcagggcctgccccccggcaccaccccccagagactggagtag

SEQ ID NO: 13125 - DNA, 228 bp, synthetic construct
  source 1..228: mol_type = other DNA; note = Synthetic coding sequence
atgttctggaagttcgacctgcacagcagcagccacatcgacaccctgctggagagagaggacgtgaccctgaaggagctgatggacgaggaggacgtgctgcaggagtgcaaggcccagaacagaaagctgatcgagttcctgctgaaggccgagtgcctggaggacctggtgagcttcatcatcgaggagcccccccaggacatggacgagaagatcagatactag

SEQ ID NO: 13126 - DNA, 1275 bp, synthetic construct; identical to SEQ ID NO: 11943
  source 1..1275: mol_type = other DNA; note = Synthetic coding sequence

SEQ ID NO: 13127 - DNA, 288 bp, synthetic construct
  source 1..288: mol_type = other DNA; note = Synthetic coding sequence
atggaggccgccgacgccagcagaagcaacggcagcagccccgaggccagagacgccagaagccccagcggccccagcggcagcctggagaacggcaccaaggccgacggcaaggacgccaagaccaccaacggccacggcggcgaggccgccgagggcaagagcctgggcagcgccctgaagcccggcgagggcagaagcgccctgttcgccggcaacgagtggagaagacccatcatccagttcgtggagagcggcgacgacaagaacagcaactacttcagctag

SEQ ID NO: 13128 - DNA, 3144 bp, synthetic construct
  source 1..3144: mol_type = other DNA; note = Synthetic coding sequence
atggcccccagactgcagctggagaaggccgcctggagatgggccgagaccgtgagacccgaggaggtgagccaggagcacatcgagaccgcctacagaatctggctggagccctgcatcagaggcgtgtgcagaagaaactgcaagggcaaccccaactgcctggtgggcatcggcgagcacatctggctgggcgagatcgacgagaacagcttccacaacatcgacgaccccaactgcgagagaagaaagaagaacagcttcgtgggcctgaccaacctgggcgccacctgctacgtgaacaccttcctgcaggtgtggttcctgaacctggagctgagacaggccctgtacctgtgccccagcacctgcagcgactacatgctgggcgacggcatccaggaggagaaggactacgagccccagaccatctgcgagcacctgcagtacctgttcgccctgctgcagaacagcaacagaagatacatcgaccccagcggcttcgtgaaggccctgggcctggacaccggccagcagcaggacgcccaggagttcagcaagctgttcatgagcctgctggaggacaccctgagcaagcagaagaaccccgacgtgagaaacatcgtgcagcagcagttctgcggcgagtacgcctacgtgaccgtgtgcaaccagtgcggcagagagagcaagctgctgagcaagttctacgagctggagctgaacatccagggccacaagcagctgaccgactgcatcagcgagttcctgaaggaggagaagctggagggcgacaacagatacttctgcgagaactgccagagcaagcagaacgccaccagaaagatcagactgctgagcctgccctgcaccctgaacctgcagctgatgagattcgtgttcgacagacagaccggccacaagaagaagctgaacacctacatcggcttcagcgagatcctggacatggagccctacgtggagcacaagggcggcagctacgtgtacgagctgagcgccgtgctgatccacagaggcgtgagcgcctacagcggccactacatcgcccacgtgaaggacccccagagcggcgagtggtacaagttcaacgacgaggacatcgagaagatggagggcaagaagctgcagctgggcatcgaggaggacctggagcccagcaagagccagaccagaaagcccaagtgcggcaagggcacccactgcagcagaaacgcctacatgctggtgtacagactgcagacccaggagaagcccaacaccaccgtgcaggtgcccgccttcctgcaggagctggtggacagagacaacagcaagttcgaggagtggtgcatcgagatggccgagatgagaaagcagagcgtggacaagggcaaggccaagcacgaggaggtgaaggagctgtaccagagactgcccgccggcgccgagccctacgagttcgtgagcctggagtggctgcagaagtggctggacgagagcacccccaccaagcccatcgacaaccacgcctgcctgtgcagccacgacaagctgcaccccgacaagatcagcatcatgaagagaatcagcgagtacgccgccgacatcttctacagcagatacggcggcggccccagactgaccgtgaaggccctgtgcaaggagtgcgtggtggagagatgcagaatcctgagactgaagaaccagctgaacgaggactacaagaccgtgaacaacctgctgaaggccgccgtgaagggcagcgacggcttctgggtgggcaagagcagcctgagaagctggagacagctggccctggagcagctggacgagcaggacggcgacgccgagcagagcaacggcaagatgaacggcagcaccctgaacaaggacgagagcaaggaggagagaaaggaggaggaggagctgaacttcaacgaggacatcctgtgcccccacgccgtgttcttcttcagcaagtacatcttcctgaacagcggcgagctgtgcatcagcgagaacgagagaagactggtgagcaaggaggcctggagcaagctgcagcagtacttccccaaggcccccgagttccccagctacaaggagtgctgcagccagtgcaagatcctggagagagagggcgaggagaacgaggccctgcacaagatgatcgccaacgagcagaagaccagcctgcccaacctgttccaggacaagaacagaccctgcctgagcaactggcccgaggacaccgacgtgctgtacatcgtgagccagttcttcgtggaggagtggagaaagttcgtgagaaagcccaccagatgcagccccgtgagcagcgtgggcaacagcgccctgctgtgcccccacggcggcctgatgttcaccttcgccagcatgaccaaggaggacagcaagctgatcgccctgatctggcccagcgagtggcagatgatccagaagctgttcgtggtggaccacgtgatcaagatcaccagaatcgaggtgggcgacgtgaaccccagcgagacccagtacatcagcgagcccaagctgtgccccgagtgcagagagggcctgctgtgccagcagcagagagacctgagagagtacacccaggccaccatctacgtgcacaaggtggtggacaacaagaaggtgatgaaggacagcgcccccgagctgaacgtgagcagcagcgagaccgaggaggacaaggaggaggccaagcccgacggcgagaaggaccccgacttcaaccagagcaacggcggcaccaagagacagaagatcagccaccagaactacatcgcctaccagaagcaggtgatcagaagaagcatgagacacagaaaggtgagaggcgagaaggccctgctggtgagcgccaaccagaccctgaaggagctgaagatccagatcatgcacgccttcagcgtggcccccttcgaccagaacctgagcatcgacggcaagatcctgagcgacgactgcgccaccctgggcaccctgggcgtgatccccgagagcgtgatcctgctgaaggccgacgagcccatcgccgactacgccgccatggacgacgtgatgcaggtgtgcatgcccgaggagggcttcaagggcaccggcctgctgggccactag

SEQ ID NO: 13129 - DNA, 1443 bp, synthetic construct; identical to SEQ ID NO: 12577
  source 1..1443: mol_type = other DNA; note = Synthetic coding sequence

SEQ ID NO: 13130 - DNA, 2376 bp, synthetic construct
  source 1..2376: mol_type = other DNA; note = Synthetic coding sequence
atgttctggaagttcgacctgcacagcagcagccacatcgacaccctgctggagagagaggacgtgaccctgaaggagctgatggacgaggaggacgtgctgcaggagtgcaaggcccagaacagaaagctgatcgagttcctgctgaaggccgagtgcctggaggacctggtgagcttcatcatcgaggagcccccccaggacatggacgagaagatcagatacaagtaccccaacatcagctgcgagctgctgaccagcgacgtgagccagatgaacgacagactgggcgaggacgagagcctgctgatgaagctgtacagcttcctgctgaacgacagccccctgaaccccctgctggccagcttcttcagcaaggtgctgagcatcctgatcagcagaaagcccgagcagatcgtggacttcctgaagaagaagcacgacttcgtggacctgatcatcaagcacatcggcaccagcgccatcatggacctgctgctgagactgctgacctgcatcgagcccccccagcccagacaggacgtgctgaactggctgaacgaggagaagatcatccagagactggtggagatcgtgcaccccagccaggaggaggacagacacagcaacgccagccagagcctgtgcgagatcgtgagactgagcagagaccagatgctgcagatccagaacagcaccgagcccgaccccctgctggccaccctggagaagcaggagatcatcgagcagctgctgagcaacatcttccacaaggagaagaacgagagcgccatcgtgagcgccatccagatcctgctgaccctgctggagaccagaagacccaccttcgagggccacatcgagatctgcccccccggcatgagccacagcgcctgcagcgtgaacaagagcgtgctggaggccatcagaggcagactgggcagcttccacgagctgctgctggagccccccaagaacatgttcttcaagtacacctggaacaacttcctgcacacccaggtggagatctgcatcgccctgatcctggccagccccttcgagaacaccgagaacgccaccatcaccgaccaggacagcaccggcgacaacctgctgctgaagcacctgttccagaagtgccagctgatcgagagaatcctggaggcctgggagatgaacgagaagaagcaggccgagggcggcagaagacacggctacatgggccacctgaccagaatcgccaactgcatcgtgcacagcaccgacaagggccccaacagcgccctggtgcagcagctgatcaaggacctgcccgacgaggtgagagagagatgggagaccttctgcaccagcagcctgggcgagaccaacaagagaaacaccgtggacctggccttcagcgactaccagatgcagcagatgaccagcaacttcatcgaccagttcggcttcaacgacgagaagttcgccgaccaggacgacatcggcaacgtgagcttcgacagagtgagcgacatcaacttcaccctgaacaccaacgagagcggcaacatcgccctgttcgaggcctgctgcaaggagagaatccagcagttcgacgacggcggcagcgacgaggaggacatctgggaggagaagcacatcgccttcacccccgagagccagagaagaagcagcagcggcagcaccgacagcgaggagagcaccgacagcgaggaggaggacggcgccaagcaggacctgttcgagcccagcagcgccaacaccgaggacaagatggaggtggacctgagcgagccccccaactggagcgccaacttcgacgtgcccatggagaccacccacggcgcccccctggacagcgtgggcagcgacgtgtggagcaccgaggagcccatgcccaccaaggagaccggctgggccagcttcagcgagttcaccagcagcctgagcaccaaggacagcctgagaagcaacagccccgtggagatggagaccagcaccgagcccatggaccccctgacccccagcgccgccgccctggccgtgcagcccgaggccgccggcagcgtggccatggaggccagcagcgacggcgaggaggacgccgagagcaccgacaaggtgaccgagaccgtgatgaacggcggcatgaaggagaccctgagcctgaccgtggacgccaagaccgagaccgccgtgttcaagagcgaggagggcaagctgagcaccagccaggacgccgcctgcaaggacgccgaggagtgccccgagaccgccgaggccaagtgcgccgcccccagaccccccagcagcagccccgagcagagcggcgtggagatccccgccctgcccggccagtggagccagcagtag

SEQ ID NO: 13131 - DNA, 1500 bp, synthetic construct
  source 1..1500: mol_type = other DNA; note = Synthetic coding sequence
atgttcggcgacgccagcaccagcctggtggtgcccgagaaggtgaagacccccatgaagagcagcaagaccgacctgcagggcagcgccagccccagcaaggtggagggcgtgcacacccccagacagaagagaagcacccccctgaaggagagacagctgagcaagcccctgagcgagagaaccaacagcagcgacagcgagagaagccccgacctgggccacagcacccagatccccagaaaggtggtgtacgaccagctgaaccagatcctggtgagcgacgccgccctgcccgagaacgtgatcctggtgaacaccaccgactggcagggccagtacgtggccgagctgctgcaggaccagagaaagcccgtggtgtgcacctgcagcaccgtggaggtgcaggccgtgctgagcgccctgctgaccagaatccagagatactgcaactgcaacagcagcatgcccagacccgtgaaggtggccgccgtgggcggccagagctacctgagcagcatcctgagattcttcgtgaagagcctggccaacaagaccagcgactggctgggctacatgagattcctgatcatccccctgggcagccaccccgtggccaagtacctgggcagcgtggacagcaagtacagcagcagcttcctggacagcggctggagagacctgttcagcagaagcgagccccccgtgagcgagcagctggacgtggccggcagagtgatgcagtacgtgaacggcgccgccaccacccaccagctgcccgtggccgaggccatgctgacctgcagacacaagttccccgacgaggacagctaccagaagttcatccccttcatcggcgtggtgaaggtgggcctggtggaggacagccccagcaccgccggcgacggcgacgacagccccgtggtgagcctgaccgtgcccagcaccagcccccccagcagcagcggcctgagcagagacgccaccgccaccccccccagcagccccagcatgagcagcgccctggccatcgtgggcagccccaacagcccctacggcgacgtgatcggcctgcaggtggactactggctgggccaccccggcgagagaagaagagagggcgacaagagagacgccagcagcaagaacaccctgaagagcgtgttcagaagcgtgcaggtgagcagactgccccacagcggcgaggcccagctgagcggcaccatggccatgaccgtggtgaccaaggagaagaacaagaaggtgcccaccatcttcctgagcaagaagcccagagagaaggaggtggacagcaagagccaggtgatcgagggcatcagcagactgatctgcagcgccaagcagcagcagaccatgctgagagtgagcatcgacggcgtggagtggagcgacatcaagttcttccagctggccgcccagtggcccacccacgtgaagcacttccccgtgggcctgttcagcggcagcaaggccacctag

SEQ ID NO: 13132 - DNA, 435 bp, synthetic construct
  source 1..435: mol_type = other DNA; note = Synthetic coding sequence
atggtggccatggccgaggccgaggccggcgtggccgtggaggtgagaggcctgccccccgccgtgcccgacgagctgctgaccctgtacttcgagaacagaagaagaagcggcggcggccccgtgctgagctggcagagactgggctgcggcggcgtgctgaccttcagagagcccgccgacgccgagagagtgctggcccaggccgaccacgagctgcacggcgcccagctgagcctgagacccgccccccccagagcccccgccagactgctgctgcagggcctgccccccggcaccaccccccagagactggagcagcacgtgcaggccctgctgagagccagcggcctgcccgtgcagccctgctgcgccctggccagccccagacccgacagagccctggtgcagctgcccaagcccctgagcgagtag

SEQ ID NO: 13133 - DNA, 513 bp, synthetic construct; identical to SEQ ID NO: 9958
  source 1..513: mol_type = other DNA; note = Synthetic coding sequence

SEQ ID NO: 13134 - DNA, 270 bp, synthetic construct
  source 1..270: mol_type = other DNA; note = Synthetic coding sequence
atggtggccatggccgaggccgaggccggcgtggccgtggaggtgagaggcctgccccccgccgtgcccgacgagctgctgaccctgtacttcgagaacagaagaagaagcggcggcggccccgtgctgagctggcagagactgggctgcggcggcgtgctgaccttcagagagcccgccgacgccgagagagtgctggcccaggccgaccacgagctgcacggcgcccagctgagcctgagacccgccccccccagagcccccgcctag

SEQ ID NO: 13135 - DNA, 1206 bp, synthetic construct
  source 1..1206: mol_type = other DNA; note = Synthetic coding sequence
atgtgcgtggagatcagcctgaagaccagcgagggcgacagcatggagctggagatctggtgcctggagatgaacgagaagtgcgacaaggagatcaaggtgagctacaccgtgtacaacagactgagcctgctgctgaagagcctgctggccatcaccagagtgacccccgcctacagactgagcagaaagcagggccacgagtacgtgatcctgtacagaatctacttcggcgaggtgcagctgagcggcctgggcgagggcttccagaccgtgagagtgggcaccgtgggcacccccgtgggcaccatcaccctgagctgcgcctacagaatcaacctggccttcatgagcaccagacagttcgagagaaccccccccatcatgggcatcatcatcgaccacttcgtggacagaccctaccccagcagcagccccatgcacccctgcaactacagaaccgccggcgaggacaccggcgtgatctaccccagcgtggaggacagccaggaggtgtgcaccaccagcttcagcaccagcccccccagccagctgatggtgcccggcaaggagggcggcgtgcccctggcccccaaccagcccgtgcacggcacccaggccgaccaggagagactggccacctgcacccccagcgacagaacccactgcgccgccacccccagcagcagcgaggacaccgagaccgtgagcaacagcagcgagggcagagccagcccccacgacgtgctggagaccatcttcgtgagaaaggtgggcgccttcgtgaacaagcccatcaaccaggtgaccctgaccagcctggacatccccttcgccatgttcgcccccaagaacctggagctggaggacaccgaccccatggtgaacccccccgacagccccgagaccgagagccccctgcagggcagcctgcacagcgacggcagcagcggcggcagcagcggcaacacccacgacgacttcgtgatgatcgacttcaagcccgccttcagcaaggacgacatcctgcccatggacctgggcaccttctacagagagttccagaaccccccccagctgagcagcctgagcatcgacatcggcgcccagagcatggccgaggacctggacagcctgcccgagaagctggccgtgcacgagaagaacgtgagagagttcgacgccttcgtggagaccctgcagtag

SEQ ID NO: 13136 - DNA, 2148 bp, synthetic construct; identical to SEQ ID NO: 9921
  source 1..2148: mol_type = other DNA; note = Synthetic coding sequence

SEQ ID NO: 13137 - DNA, 336 bp, synthetic construct
  source 1..336: mol_type = other DNA; note = Synthetic coding sequence
atgaccggcagcaacagccacatcaccatcctgaccctgaaggtgctgccccacttcgagagcctgggcaagcaggagaagatccccaacaagatgagcgccttcagaaaccactgcccccacctggacagcgtgggcgagatcaccaaggaggacctgatccagaagagcctgggcacctgccaggactgcaaggtgcagggccccaacctgtgggcctgcctggagaacagatgcagctacgtgggctgcggcgagagccaggtggaccacagcaccatccacagccaggagaccaagcactacctgaccgtgaacctgaccaccctgagatag

SEQ ID NO: 13138 - DNA, 228 bp, synthetic construct
  source 1..228: mol_type = other DNA; note = Synthetic coding sequence
atggccggccaggaggaccccgtgcagagagagatccaccaggactgggccaacagagagtacatcgagatcatcaccagcagcatcaagaagatcgccgacttcctgaacagcttcgacatgagctgcagaagcagactggccaccctgaacgagaagctgaccgccctggagagaagaatcgagtacatcgaggccagagtgaccaagggcgagaccctgacctag

SEQ ID NO: 13139 - DNA, 348 bp, synthetic construct; identical to SEQ ID NO: 9946
  source 1..348: mol_type = other DNA; note = Synthetic coding sequence

SEQ ID NO: 13140 - DNA, 1077 bp, synthetic construct; identical to SEQ ID NO: 11551
  source 1..1077: mol_type = other DNA; note = Synthetic coding sequence

SEQ ID NO: 13141 - DNA, 4047 bp, synthetic construct
  source 1..4047: mol_type = other DNA; note = Synthetic coding sequence
atggccgacaccgacctgttcatggagtgcgaggaggaggagctggagccctggcagaagatcagcgacgtgatcgaggacagcgtggtggaggactacaacagcgtggacaagaccaccaccgccggcaaccccctggtgcagcagggcggccagcccctgatcctgacccagaaccccgcccccggcctgggcaccatggtgacccagcccgtgctgagacccgtgcaggtgatgcagaacgccaaccacgtgaccagcagccccgtggccagccagcccatcttcatcaccacccagggcttccccgtgagaaacgtgagacccgtgcagaacgccatgaaccaggtgggcatcgtgctgaacgtgcagcagggccagaccgtgagacccatcaccctggtgcccgcccccggcacccagttcgtgaagcccaccgtgggcgtgccccaggtgttcagccagatgacccccgtgagacccggcagcaccatgcccgtgagacccaccaccaacaccttcaccaccgtgatccccgccaccctgaccatcagaagcaccgtgccccagagccagagccagcagaccaagagcacccccagcaccagcaccacccccaccgccacccagcccaccagcctgggccagctggccgtgcagagccccggccagagcaaccagaccaccaaccccaagctggtgagcatcgccagcttcgtgaccgtgaagagacccggcgtgaccggcgagaacagcaacgaggtggccaagctggtgaacaccctgaacaccatccccagcctgggccagagccccggccccgtggtggtgagcaacaacagcagcgcccacggcagccagagaaccagcggccccgagagcagcatgaaggtgaccagcagcatccccgtgttcgacctgcaggacggcggcagaaagatctgccccagatgcaacgcccagttcagagtgaccgaggccctgagaggccacatgtgctactgctgccccgagatggtggagtaccagaagaagggcaagagcctggacagcgagcccagcgtgcccagcgccgccaagccccccagccccgagaagaccgcccccgtggccagcacccccagcagcacccccatccccgccctgagcccccccaccaaggtgcccgagcccaacgagaacgtgggcgacgccgtgcagaccaagctgatcatgctggtggacgacttctactacggcagagacggcggcaaggtggcccagctgaccaacttccccaaggtggccaccagcttcagatgcccccactgcaccaagagactgaagaacaacatcagattcatgaaccacatgaagcaccacgtggagctggaccagcagaacggcgaggtggacggccacaccatctgccagcactgctacagacagttcagcacccccttccagctgcagtgccacctggagaacgtgcacagcccctacgagagcaccaccaagtgcaagatctgcgagtgggccttcgagagcgagcccctgttcctgcagcacatgaaggacacccacaagcccggcgagatgccctacgtgtgccaggtgtgccagtacagaagcagcctgtacagcgaggtggacgtgcacttcagaatgatccacgaggacaccagacacctgctgtgcccctactgcctgaaggtgttcaagaacggcaacgccttccagcagcactacatgagacaccagaagagaaacgtgtaccactgcaacaagtgcagactgcagttcctgttcgccaaggacaagatcgagcacaagctgcagcaccacaagaccttcagaaagcccaagcagctggagggcctgaagcccggcaccaaggtgaccatcagagccagcagaggccagcccagaaccgtgcccgtgagcagcaacgacaccccccccagcgccctgcaggaggccgcccccctgaccagcagcatggaccccctgcccgtgttcctgtacccccccgtgcagagaagcatccagaagagagccgtgagaaagatgagcgtgatgggcagacagacctgcctggagtgcagcttcgagatccccgacttccccaaccacttccccacctacgtgcactgcagcctgtgcagatacagcacctgctgcagcagagcctacgccaaccacatgatcaacaaccacgtgcccagaaagagccccaagtacctggccctgttcaagaacagcgtgagcggcatcaagctggcctgcaccagctgcaccttcgtgaccagcgtgggcgacgccatggccaagcacctggtgttcaaccccagccacagaagcagcagcatcctgcccagaggcctgacctggatcgcccacagcagacacggccagaccagagacagagtgcacgacagaaacgtgaagaacatgtaccccccccccagcttccccaccaacaaggccgccaccgtgaagagcgccggcgccacccccgccgagcccgaggagctgctgacccccctggcccccgccctgcccagccccgccagcaccgccacccccccccccacccccacccacccccaggccctggccctgccccccctggccaccgagggcgccgagtgcctgaacgtggacgaccaggacgagggcagccccgtgacccaggagcccgagctggccagcggcggcggcggcagcggcggcgtgggcaagaaggagcagctgagcgtgaagaagctgagagtggtgctgttcgccctgtgctgcaacaccgagcaggccgccgagcacttcagaaacccccagagaagaatcagaagatggctgagaagattccaggccagccagggcgagaacctggagggcaagtacctgagcttcgaggccgaggagaagctggccgagtgggtgctgacccagagagagcagcagctgcccgtgaacgaggagaccctgttccagaaggccaccaagatcggcagaagcctggagggcggcttcaagatcagctacgagtgggccgtgagattcatgctgagacaccacctgaccccccacgccagaagagccgtggcccacaccctgcccaaggacgtggccgagaacgccggcctgttcatcgacttcgtgcagagacagatccacaaccaggacctgcccctgagcatgatcgtggccatcgacgagatcagcctgttcctggacaccgaggtgctgagcagcgacgacagaaaggagaacgccctgcagaccgtgggcaccggcgagccctggtgcgacgtggtgctggccatcctggccgacggcaccgtgctgcccaccctggtgttctacagaggccagatggaccagcccgccaacatgcccgacagcatcctgctggaggccaaggagagcggctacagcgacgacgagatcatggagctgtggagcaccagagtgtggcagaagcacaccgcctgccagagaagcaagggcatgctggtgatggactgccacagaacccacctgagcgaggaggtgctggccatgctgagcgccagcagcaccctgcccgccgtggtgcccgccggctgcagcagcaagatccagcccctggacgtgtgcatcaagagaaccgtgaagaacttcctgcacaagaagtggaaggagcaggccagagagatggccgacaccgcctgcgacagcgacgtgctgctgcagctggtgctggtgtggctgggcgaggtgctgggcgtgatcggcgactgccccgagctggtgcagagaagcttcctggtggccagcgtgctgcccggccccgacggcaacatcaacagccccaccagaaacgccgacatgcaggaggagctgatcgccagcctggaggagcagctgaagctgagcggcgagcacagcgagagcagcacccccagacccagaagcagccccgaggagaccatcgagcccgagagcctgcaccagctgttcgagggcgagagcgagaccgagagcttctacggcttcgaggaggccgacctggacctgatggagatctag

SEQ ID NO: 13142 - DNA, 561 bp, synthetic construct
  source 1..561: mol_type = other DNA; note = Synthetic coding sequence
atgttctggaagttcgacctgcacagcagcagccacatcgacaccctgctggagagagaggacgtgaccctgaaggagctgatggacgaggaggacgtgctgcaggagtgcaaggcccagaacagaaagctgatcgagttcctgctgaaggccgagtgcctggaggacctggtgagcttcatcatcgaggagcccccccaggacatggacgagaagatcagatacaagtaccccaacatcagctgcgagctgctgaccagcgacgtgagccagatgaacgacagactgggcgaggacgagagcctgctgatgaagctgtacagcttcctgctgaacgacagccccctgaaccccctgctggccagcttcttcagcaaggtgctgagcatcctgatcagcagaaagcccgagcagatcgtggacttcctgaagaagaagcacgacttcgtggacctgatcatcaagcacatcggcaccagcgccatcatggacctgctgctgagactgctgacctgcatcgagcccccccagcccagacaggacgtgctgaactggctgtag

SEQ ID NO: 13143 - DNA, 288 bp, synthetic construct
  source 1..288: mol_type = other DNA; note = Synthetic coding sequence
atgagccagagcggcgccgtgagctgctgccccggcgccaccaacggcagcctgggcagaagcgacggcgtggccaagatgagccccaaggacctgttcgagcagagaaagaagtacagcaacagcaacgtgatcatgcacgagaccagccagtaccacgtgcagcacctggccaccttcatcatggacaagagcgaggccatcaccagcgtggacgacgccatcagaaagctggtgcagctgagcagcaaggagaagatctggacccaggagatgctgctgcagtag

SEQ ID NO: 13144 - DNA, 1740 bp, synthetic construct
  source 1..1740: mol_type = other DNA; note = Synthetic coding sequence
atggacgacagcaagcaggagagcaccaccagcaaggaggaggagaccaacatcatcagcagcatcgtgcccagcacccaggacatctaccagagacagaacagcagcgacgtgcacaagagcctgctgcccgccgtggacgagaccacctgcggccacacccacttccagcagatgatcgacaagtacatcaacgaggccaacctgatccccgagaagaccgacctgcaggagctggagcacatcttccccaacctgcaccaccagctgttcaagcccctggagccccaccccgacttcgacctgagcagcagcagcagcggcatcagccccgacaacagagacttctaccagagaagcgacagcagcagcgagagccactgcgccaccggcctgagcaagagcaccgtgtacttcaccgccctgagaagaaccagcatgcacagcagcctgaacaccagccccaaccagcagcccgacaccaacctggcccacgtgggcgcccacagcttcgccaccgagaacatcatcggcggcagcgagcagtgcttcgagcagctgcagcccgagtacagcagccaggaggagagccagcacgccgacctgcccagcatcttcagcatcgaggccagagacagcagccagggcatgaagaaccagaactaccccagcgaggagcacaccgagatcctgcagaacaagaagaagatcgtgcacttccagctgagcatcggcaacctgagcagcgtgtacagcagcagcgacgaggccaacgtgttcgaccagctgaacgtgcagcacagcaccccctgcggcagcaacagcagcgagtgcagcaccaagcaccagctggagagcagaaaggagagcatgggcttcgaggagctgagcaagagaggcgtggtgaccatgctgcagagccagggcctgatcgaggacaacaagaacgagacctgcagagtgctggacatcaacccccaggtggaggagaccgacagcagactgtgcgtgagaaccgtggagatgggcaccagcatccaggccccctacagcctgaccacccagaacgagaagtacttcgagaacagcgccgagaccgacatccccaagatcaccaagaagctgagccagctgggcgagagcgagctgttcgccagcagcggcagcttcagcctgcagagcagcatccccgtgtgggagaccgagaccggccacggcatcatggaggagcccgagctgaccctgatcagcaccaccgacaccagcatcgccgagatggacttcgccaacctgaccctggaggagaagagcgagaacgaggccaagtgcttcttccaggtgagcgagttcctgcccctggtgagcgccaccgaggccagcgactaccccgccgtgagcgagctgagcatcgagaagcccagaaccgccagcaccgccgagacccccagaagactgacccccgtgcccggcagcctgcaggaggccttcatcaagagaaagaagagcttcatggagagaagccaccagagacagaaggagatcagaaacaagatccacgtgagcgagaacagccagatcaagaccgtgaaggagaagcccagcatcagcagcagcgtgagcagactgaagggcgtgaacaaggtgagagccagcttccccgaggacagaaagaccacccaggccctgagacaccagagaggcctgagactgtacaaccagctggccgaggtgaagcagtag

SEQ ID NO: 13145 - DNA, 435 bp, synthetic construct; identical to SEQ ID NO: 13132
  source 1..435: mol_type = other DNA; note = Synthetic coding sequence

SEQ ID NO: 13146 - DNA, 246 bp, synthetic construct
  source 1..246: mol_type = other DNA; note = Synthetic coding sequence
atggtggccatggccgaggccgaggccggcgtggccgtggaggtgagaggcctgccccccgccgtgcccgacgagctgctgaccctgtacttcgagaacagaagaagaagcggcggcggccccgtgctgagctggcagagactgggctgcggcggcgtgctgaccttcagagagcccgccgacgccgagagagtgctggcccaggccgaccacgagctgcacggcgcccagctgagcctgagatag

SEQ ID NO: 13147 - DNA, 1539 bp, synthetic construct
  source 1..1539: mol_type = other DNA; note = Synthetic coding sequence
atggccgccttcaagctggacttcctgcccgagatgatggtggaccactgcagcctgaacagcagccccgtgagcaagaagatgaacggcaccctggaccaccccgaccagcccgacctggacgccatcaagatgttcgtgggccaggtgcccagaacctggagcgagaaggacctgagagagctgttcgagcagtacggcgccgtgtacgagatcaacgtgctgagagacagaagccagaaccccccccagagcaagggctgctgcttcgtgaccttctacaccagaaaggccgccctggaggcccagaacgccctgcacaacatgaaggtgctgcccggcatgcaccaccccatccagatgaagcccgccgacagcgagaagaacaacgtggaggacagaaagctgttcatcggcatgatcagcaagaagtgcaccgagaacgacatcagagtgatgttcagcagcttcggccagatcgaggagtgcagaatcctgagaggccccgacggcctgagcagaggctgcgccttcgtgaccttcaccaccagagccatggcccagaccgccatcaaggccatgcaccaggcccagaccatggagggctgcagcagccccatggtggtgaagttcgccgacacccagaaggacaaggagcagaagagaatggcccagcagctgcagcagcagatgcagcagatcagcgccgccagcgtgtggggcaacctggccggcctgaacaccctgggcccccagtacctggccctgtacctgcagctgctgcagcagaccgccagcagcggcaacctgaacaccctgagcagcctgcaccccatgggcggcctgaacgccatgcagctgcagaacctggccgccctggccgccgccgccagcgccgcccagaacacccccagcggcaccaacgccctgaccaccagcagcagccccctgagcgtgctgaccagcagcggcagcagccccagcagcagcagcagcaacagcgtgaaccccatcgccagcctgggcgccctgcagaccctggccggcgccaccgccggcctgaacgtgggcagcctggccggcatggccgccctgaacggcggcctgggcagcagcggcctgagcaacggcaccggcagcaccatggaggccctgacccaggcctacagcggcatccagcagtacgccgccgccgccctgcccaccctgtacaaccagaacctgctgacccagcagagcatcggcgccgccggcagccagaaggagggccccgagggcgccaacctgttcatctaccacctgccccaggagttcggcgaccaggacctgctgcagatgttcatgcccttcggcaacgtggtgagcgccaaggtgttcatcgacaagcagaccaacctgagcaagtgcttcggcttcgtgagctacgacaaccccgtgagcgcccaggccgccatccagagcatgaacggcttccagatcggcatgaagagactgaaggtgcagctgaagagaagcaagaacgacagcaagccctactag

SEQ ID NO: 13148 - DNA, 1131 bp, synthetic construct
  source 1..1131: mol_type = other DNA; note = Synthetic coding sequence
atgaaggacgtgcccggcttcctgcagcagagccagaacagcggccccggccagcccgccgtgtggcacagactggaggagctgtacaccaagaagctgtggcaccagctgaccctgcaggtgctggacttcgtgcaggacccctgcttcgcccagggcgacggcctgatcaagctgtacgagaacttcatcagcgagttcgagcacagagtgaaccccctgagcctggtggagatcatcctgcacgtggtgagacagatgaccgaccccaacgtggccctgaccttcctggagaagaccagagagaaggtgaagagcagcgacgaggccgtgatcctgtgcaagaccgccatcggcgccctgaagctgaacatcggcgacctgcaggtgaccaaggagaccatcgaggacgtggaggagatgctgaacaacctgcccggcgtgaccagcgtgcacagcagattctacgacctgagcagcaagtactaccagaccatcggcaaccacgccagctactacaaggacgccctgagattcctgggctgcgtggacatcaaggacctgcccgtgagcgagcagcaggagagagccttcaccctgggcctggccggcctgctgggcgagggcgtgttcaacttcggcgagctgctgatgcaccccgtgctggagagcctgagaaacaccgacagacagtggctgatcgacaccctgtacgccttcaacagcggcaacgtggagagattccagaccctgaagaccgcctggggccagcagcccgacctggccgccaacgaggcccagctgctgagaaagatccagctgctgtgcctgatggagatgaccttcaccagacccgccaaccacagacagctgaccttcgaggagatcgccaagagcgccaagatcaccgtgaacgaggtggagctgctggtgatgaaggccctgagcgtgggcctggtgaagggcagcatcgacgaggtggacaagagagtgcacatgacctgggtgcagcccagagtgctggacctgcagcagatcaagggcatgaaggacagactggagttctggtgcaccgacgtgaagagcatggagatgctggtggagcaccaggcccacgacatcctgacctag

SEQ ID NO: 13149 - DNA, 489 bp, synthetic construct
  source 1..489: mol_type = other DNA; note = Synthetic coding sequence
atgaccagcaagaagctggtgaacagcgtggccggctgcgccgacgacgccctggccggcctggtggcctgcaaccccaacctgcagctgctgcagggccacagagtggccctgagaagcgacctggacagcctgaagggcagagtggccctgctgagcggcggcggcagcggccacgagcccgcccacgccggcttcatcggcaagggcatgctgaccggcgtgatcgccggcgccgtgttcaccagccccgccgtgggcagcatcctggccgccatcagagccgtggcccaggccggcaccgtgggcaccctgctgatcgtgaagaactacaccggcgacagactgaacttcggcctggccagagagcaggccagagccgagggcatccccgtggagatggtggtgatcggcgacgacagcgccttcaccgtgctgaagaaggccggcagaagaggcctgtgcggcaccgtgctgatccacaagtag

SEQ ID NO: 13150 - DNA, 7854 bp, synthetic construct
  source 1..7854: mol_type = other DNA; note = Synthetic coding sequence
atgctgaccgacagcggcggcggcggcaccagcttcgaggaggacctggacagcgtggcccccagaagcgcccccgccggcgccagcgagccccccccccccggcggcgtgggcctgggcatcagaaccgtgagactgttcggcgaggccggccccgccagcggcgtgggcagcagcggcggcggcggcagcggcagcggcaccggcggcggcgacgccgccctggacttcaagctggccgccgccgtgctgagaaccggcggcggcggcggcgccagcggcagcgacgaggacgaggtgagcgaggtggagagcttcatcctggaccaggaggacctggacaaccccgtgctgaagaccaccagcgagatcttcctgagcagcaccgccgagggcgccgacctgagaaccgtggaccccgagacccaggccagactggaggccctgctggaggccgccggcatcggcaagctgagcaccgccgacggcaaggccttcgccgaccccgaggtgctgagaagactgaccagcagcgtgagctgcgccctggacgaggccgccgccgccctgaccagaatgaaggccgagaacagccacaacgccggccaggtggacaccagaagcctggccgaggcctgcagcgacggcgacgtgaacgccgtgagaaagctgctggacgagggcagaagcgtgaacgagcacaccgaggagggcgagagcctgctgtgcctggcctgcagcgccggctactacgagctggcccaggtgctgctggccatgcacgccaacgtggaggacagaggcaacaagggcgacatcacccccctgatggccgccagcagcggcggctacctggacatcgtgaagctgctgctgctgcacgacgccgacgtgaacagccagagcgccaccggcaacaccgccctgacctacgcctgcgccggcggcttcgtggacatcgtgaaggtgctgctgaacgagggcgccaacatcgaggaccacaacgagaacggccacacccccctgatggaggccgccagcgccggccacgtggaggtggccagagtgctgctggaccacggcgccggcatcaacacccacagcaacgagttcaaggagagcgccctgaccctggcctgctacaagggccacctggacatggtgagattcctgctggaggccggcgccgaccaggagcacaagaccgacgagatgcacaccgccctgatggaggcctgcatggacggccacgtggaggtggccagactgctgctggacagcggcgcccaggtgaacatgcccgccgacagcttcgagagccccctgaccctggccgcctgcggcggccacgtggagctggccgccctgctgatcgagagaggcgccaacctggaggaggtgaacgacgagggctacacccccctgatggaggccgccagagagggccacgaggagatggtggccctgctgctggcccagggcgccaacatcaacgcccagaccgaggagacccaggagaccgccctgaccctggcctgctgcggcggcttcagcgaggtggccgacttcctgatcaaggccggcgccgacatcgagctgggctgcagcacccccctgatggaggccagccaggagggccacctggagctggtgaagtacctgctggccagcggcgccaacgtgcacgccaccaccgccaccggcgacaccgccctgacctacgcctgcgagaacggccacaccgacgtggccgacgtgctgctgcaggccggcgccgacctggagcacgagagcgagggcggcagaacccccctgatgaaggccgccagagccggccacctgtgcaccgtgcagttcctgatcagcaagggcgccaacgtgaacagagccaccgccaacaacgaccacaccgtggtgagcctggcctgcgccggcggccacctggccgtggtggagctgctgctggcccacggcgccgaccccacccacagactgaaggacggcagcaccatgctgatcgaggccgccaagggcggccacaccaacgtggtgagctacctgctggactaccccaacaacgtgctgagcgtgcccaccaccgacgtgagccagctgcccccccccagccaggaccagagccaggtgcccagagtgcccacccacaccctggccatggtggtgcccccccaggagcccgacagaaccagccaggagaacagccccgccctgctgggcgtgcagaagggcaccagcaagcagaagagcagcagcctgcaggtggccgaccaggacctgctgcccagcttccacccctaccagcccctggagtgcatcgtggaggagaccgagggcaagctgaacgagctgggccagagaatcagcgccatcgagaaggcccagctgaagagcctggagctgatccagggcgagcccctgaacaaggacaagatcgaggagctgaagaagaacagagaggagcaggtgcagaagaagaagaagatcctgaaggagctgcagaaggtggagagacagctgcagatgaagacccagcagcagttcaccaaggagtacctggagaccaagggccagaaggacaccgtgagcctgcaccagcagtgcagccacagaggcgtgttccccgagggcgagggcgacggcagcctgcccgaggaccacttcagcgagctgccccaggtggacaccatcctgttcaaggacaacgacgtggacgacgagcagcagagcccccccagcgccgagcagatcgacttcgtgcccgtgcagcccctgagcagcccccagtgcaacttcagcagcgacctgggcagcaacggcaccaacagcctggagctgcagaaggtgagcggcaaccagcagatcgtgggccagccccagatcgccatcaccggccacgaccagggcctgctggtgcaggagcccgacggcctgatggtggccacccccgcccagaccctgaccgacaccctggacgacctgatcgccgccgtgagcaccagagtgcccaccggcagcaacagcagcagccagaccaccgagtgcctgacccccgagagctgcagccagaccaccagcaacgtggccagccagagcatgccccccgtgtaccccagcgtggacatcgacgcccacaccgagagcaaccacgacaccgccctgaccctggcctgcgccggcggccacgaggagctggtgagcgtgctgatcgccagagacgccaagatcgagcacagagacaagaagggcttcacccccctgatcctggccgccaccgccggccacgtgggcgtggtggagatcctgctggacaagggcggcgacatcgaggcccagagcgagagaaccaaggacacccccctgagcctggcctgcagcggcggcagacaggaggtggtggacctgctgctggccagaggcgccaacaaggagcacagaaacgtgagcgactacacccccctgagcctggccgccagcggcggctacgtgaacatcatcaagatcctgctgaacgccggcgccgagatcaacagcagaaccggcagcaagctgggcatcagccccctgatgctggccgccatgaacggccacgtgcccgccgtgaagctgctgctggacatgggcagcgacatcaacgcccagatcgagaccaacagaaacaccgccctgaccctggcctgcttccagggcagagccgaggtggtgagcctgctgctggacagaaaggccaacgtggagcacagagccaagaccggcctgacccccctgatggaggccgccagcggcggctacgccgaggtgggcagagtgctgctggacaagggcgccgacgtgaacgccccccccgtgcccagcagcagagacaccgccctgaccatcgccgccgacaagggccactacaagttctgcgagctgctgatccacagaggcgcccacatcgacgtgagaaacaagaagggcaacacccccctgtggctggccagcaacggcggccacttcgacgtggtgcagctgctggtgcaggccggcgccgacgtggacgccgccgacaacagaaagatcacccccctgatgagcgccttcagaaagggccacgtgaaggtggtgcagtacctggtgaaggaggtgaaccagttccccagcgacatcgagtgcatgagatacatcgccaccatcaccgacaaggagctgctgaagaagtgccaccagtgcgtggagaccatcgtgaaggccaaggaccagcaggccgccgaggccaacaagaacgccagcatcctgctgaaggagctggacctggagaagagcagagaggagagcagaaagcaggccctggccgccaagagagagaagagaaaggagaagagaaagaagaagaaggaggagcagaagagaaagcaggaggaggacgaggagaacaagcccaaggagaacagcgagctgcccgaggacgaggacgaggaggagaacgacgaggacgtggagcaggaggtgcccatcgagccccccagcgccaccaccaccaccaccatcggcatcagcgccaccagcgccaccttcaccaacgtgttcggcaagaagagagccaacgtggtgaccacccccagcaccaacagaaagaacaagaagaacaagaccaaggagaccccccccaccgcccacctgatcctgcccgagcagcacatgagcctggcccagcagaaggccgacaagaacaagatcaacggcgagcccagaggcggcggcgccggcggcaacagcgacagcgacaacctggacagcaccgactgcaacagcgagagcagcagcggcggcaagagccaggagctgaacttcgtgatggacgtgaacagcagcaagtaccccagcctgctgctgcacagccaggaggagaagaccagcaccgccaccagcaagacccagaccagactggagggcgaggtgacccccaacagcctgagcaccagctacaagaccgtgagcctgcccctgagcagccccaacatcaagctgaacctgaccagccccaagagaggccagaagagagaggagggctggaaggaggtggtgagaagaagcaagaagctgagcgtgcccgccagcgtggtgagcagaatcatgggcagaggcggctgcaacatcaccgccatccaggacgtgaccggcgcccacatcgacgtggacaagcagaaggacaagaacggcgagagaatgatcaccatcagaggcggcaccgagagcaccagatacgccgtgcagctgatcaacgccctgatccaggaccccgccaaggagctggaggacctgatccccaagaaccacatcagaacccccgccagcaccaagagcatccacgccaacttcagcagcggcgtgggcaccaccgccgccagcagcaagaacgccttccccctgggcgcccccaccctggtgaccagccaggccaccaccctgagcaccttccagcccgccaacaagctgaacaagaacgtgcccaccaacgtgagaagcagcttccccgtgagcctgcccctggcctacccccacccccacttcgccctgctggccgcccagaccatgcagcagatcagacaccccagactgcccatggcccagttcggcggcaccttcagccccagccccaacacctggggccccttccccgtgagacccgtgaaccccggcaacaccaacagcagccccaagcacaacaacaccagcagactgcccaaccagaacggcaccgtgctgcccagcgagagcgccggcctggccaccgccagctgccccatcaccgtgagcagcgtggtggccgccagccagcagctgtgcgtgaccaacaccagaacccccagcagcgtgagaaagcagctgttcgcctgcgtgcccaagaccagcccccccgccaccgtgatcagcagcgtgaccagcacctgcagcagcctgcccagcgtgagcagcgcccccatcaccagcggccaggcccccaccaccttcctgcccgccagcaccagccaggcccagctgagcagccagaagatggagagcttcagcgccgtgccccccaccaaggagaaggtgagcacccaggaccagcccatggccaacctgtgcacccccagcagcaccgccaacagctgcagcagcagcgccagcaacacccccggcgcccccgagacccaccccagcagcagccccacccccaccagcagcaacacccaggaggaggcccagcccagcagcgtgagcgacctgagccccatgagcatgcccttcgccagcaacagcgagcccgcccccctgaccctgaccagccccagaatggtggccgccgacaaccaggacaccagcaacctgccccagctggccgtgcccgcccccagagtgagccacagaatgcagcccagaggcagcttctacagcatggtgcccaacgccaccatccaccaggacccccagagcatcttcgtgaccaaccccgtgaccctgacccccccccagggcccccccgccgccgtgcagctgagcagcgccgtgaacatcatgaacggcagccagatgcacatcaaccccgccaacaagagcctgccccccaccttcggccccgccaccctgttcaaccacttcagcagcctgttcgacagcagccaggtgcccgccaaccagggctggggcgacggccccctgagcagcagagtggccaccgacgccagcttcaccgtgcagagcgccttcctgggcaacagcgtgctgggccacctggagaacatgcaccccgacaacagcaaggcccccggcttcagaccccccagccagagagtgagcaccagccccgtgggcctgcccagcatcgaccccagcggcagcagccccagcagcagcagcgcccccctggccagcttcagcggcatccccggcaccagagtgttcctgcagggccccgcccccgtgggcacccccagcttcaacagacagcacttcagcccccacccctggaccagcgccagcaacagcagcaccagcgccccccccaccctgggccagcccaagggcgtgagcgccagccaggacagaaagatccccccccccatcggcaccgagagactggccagaatcagacagggcggcagcgtggcccaggcccccgccggcaccagcttcgtggcccccgtgggccacagcggcatctggagcttcggcgtgaacgccgtgagcgagggcctgagcggctggagccagagcgtgatgggcaaccaccccatgcaccagcagctgagcgaccccagcaccttcagccagcaccagcccatggagagagacgacagcggcatggtggcccccagcaacatcttccaccagcccatggccagcggcttcgtggacttcagcaagggcctgcccatcagcatgtacggcggcaccatcatccccagccacccccagctggccgacgtgcccggcggccccctgttcaacggcctgcacaaccccgaccccgcctggaaccccatgatcaaggtgatccagaacagcaccgagtgcaccgacgcccagcaggccagcctgctgcccagcgtgcccgccctgaagggcgagatccccagcccccagctgaccagacccaagaagagaatcggcagacccatggtggccagccccaaccagagacaccaggaccacctgagacccaaggtgcccgccggcgtgcaggagctgacccactgccccgacacccccctgctgccccccagcgacagcagaggccacaacagcagcaacagccccagcctgcaggccggcggcgccgagggcgccggcgacagaggcagagacaccagatag

SEQ ID NO: 13151 - DNA, 753 bp, synthetic construct
  source 1..753: mol_type = other DNA; note = Synthetic coding sequence
atgggcgacatccccgccgtgggcctgagcagctggaaggccagccccggcaaggtgaccgaggccgtgaaggaggccatcgacgccggctacagacacttcgactgcgcctacttctaccacaacgagagagaggtgggcgccggcatcagatgcaagatcaaggagggcgccgtgagaagagaggacctgttcatcgccaccaagctgtggtgcacctgccacaagaagagcctggtggagaccgcctgcagaaagagcctgaaggccctgaagctgaactacctggacctgtacctgatccactggcccatgggcttcaagcccccccaccccgagtggatcatgagctgcagcgagctgagcttctgcctgagccaccccagagtgcaggacctgcccctggacgagagcaacatggtgatccccagcgacaccgacttcctggacacctgggaggccatggaggacctggtgatcaccggcctggtgaagaacatcggcgtgagcaacttcaaccacgagcagctggagagactgctgaacaagcccggcctgagattcaagcccctgaccaaccagatcctgatcagattccagatccagagaaacgtgatcgtgatccccggcagcatcacccccagccacatcaaggagaacatccaggtgttcgacttcgagctgacccagcacgacatggacaacatcctgagcctgaacagaaacctgagactggccatgttccccatgtag

SEQ ID NO: 13152 - DNA, 525 bp, synthetic construct
  source 1..525: mol_type = other DNA; note = Synthetic coding sequence
atgctgaccgagaacggccaggtgctgagctgcggcagcaacagcttcggccagctgggcgtgccccacggccccagaagatgcgtggtgccccaggccatcgagctgcacaaggagaaggtggtgtgcatcgccgccggcctgagacacgccgtggccgccaccgccagcggcatcgtgttccagtggggcaccggcctggccagctgcggcagaagactgtgccccggccagaccctgcccctgttcttcaccgccaaggagcccagcagagtgaccggcctggagaacagcaaggccatgtgcgtgctggccggcagcgaccacagcgccagcctgaccgacgccggcgaggtgtacgtgtggggcagcaacaagcacggccagctggccaacgaggccgccttcctgcccgtgccccagaagatcgaggcccactgcttccagaacgagaaggtgaccgccatctggagcggctggacccacctggtggcccagaccggcctgctgtggctgagagcctag

SEQ ID NO: 13153 - DNA, 228 bp, synthetic construct
  source 1..228: mol_type = other DNA; note = Synthetic coding sequence
atgaacagaagaagaaagttcctgctggccagcgtgctggccctgcagaacagcagcttcatctaccccagctgccagaagtgcttcagcagaatcatcctggtgagcaagagaagcaactgccccaagtgcggcagcaccggcgagagcggcaacgccaactacagatacaagctgagcctgaaggtggccgagagcaacaagctgttcgtgatcaccgtgttctag

SEQ ID NO: 13154 - DNA, 252 bp, synthetic construct
  source 1..252: mol_type = other DNA; note = Synthetic coding sequence
atggtggccatggccgaggccgaggccggcgtggccgtggaggtgagaggcctgccccccgccgtgcccgacgagctgctgaccctgtacttcgagaacagaagaagaagcggcggcggccccgtgctgagctggcagagactgggctgcggcggcgtgctgaccttcagagagcccgccgacgccgagagagtgctggcccaggccgaccacgagctgcacggcgcccagctgagcctgagacccgcctag

SEQ ID NO: 13155 - DNA, 528 bp, synthetic construct
  source 1..528: mol_type = other DNA; note = Synthetic coding sequence
atgctgagcgaggaggagaaggaggagctgaaggccgagctggtgcagctggaggacgagatcaccaccctgagacaggtgctgagcgccaaggagagacacctggtggagatcaagcagaagctgggcatgaacctgatgaacgagctgaagcagaacttcagcaagagctggcacgacatgcagaccaccaccgcctacaagaagacccacgagaccctgagccacgccggccagaaggccaccgccgccttcagcaacgtgggcaccgccatcagcaagaagttcggcgacatgagctacagcatcagacacagcatcagcatgcccgccatgagaaacagccccaccttcaagagcttcgaggagagagtggagaccaccgtgaccagcctgaagaccaaggtgggcggcaccaaccccaacggcggcagcttcgaggaggtgctgagcagcaccgcccacgccagcgcccagagcctggccggcggcagcagaagaaccaaggaggaggagctgcagtgctag

SEQ ID NO: 13156 - DNA, 231 bp, synthetic construct
  source 1..231: mol_type = other DNA; note = Synthetic coding sequence
atgaacagaagaagaaagttcctgctggccagcgtgctggccctgcagaacagcagcttcatctaccccagctgccagaagtgcttcagcagaatcatcctggtgagcaagagaagcaactgccccaagtgcggcagcaccggcgagagcggcaacgccaactacagatacaagctgagcctgaaggtggccgagagcaacaagctgttcgtgatcaccgtgttcggctag

SEQ ID NO: 13157 - DNA, 456 bp, synthetic construct
  source 1..456: mol_type = other DNA; note = Synthetic coding sequence
atgagcatccccttcagcaacacccactacagaatcccccagggcttcggcaacctgctggagggcctgaccagagagatcctgagagagcagcccgacaacatccccgccttcgccgccgcctacttcgagagcctgctggagaagagagagaagaccaacttcgaccccgccgagtggggcagcaaggtggaggacagattctacaacaaccacgccttcgaggagcaggagccccccgagaagagcgaccccaagcaggaggagagccagatcagcggcaaggaggaggagaccagcgtgaccatcctggacagcagcgaggaggacaaggagaaggaggaggtggccgccgtgaagatccaggccgccttcagaggccacatcgccagagaggaggccaagaagatgaagaccaacagcctgcagaacgaggagaaggaggagaacaagtag

SEQ ID NO: 13158 - DNA, 270 bp, synthetic construct
  source 1..270: mol_type = other DNA; note = Synthetic coding sequence
atggaggccgccgacgccagcagaagcaacggcagcagccccgaggccagagacgccagaagccccagcggccccagcggcagcctggagaacggcaccaaggccgacggcaaggacgccaagaccaccaacggccacggcggcgaggccgccgagggcaagagcctgggcagcgccctgaagcccggcgagggcagaagcgccctgttcgccggcaacgagtggagaagacccatcatccagttcgtggagagcggcgacgacaagtag

SEQ ID NO: 13159 - DNA, 1542 bp, synthetic construct
  source 1..1542: mol_type = other DNA; note = Synthetic coding sequence
atggaggtgggcatcaccatccagcacgcctacgagaagcagcacccctggatcgacctgaccagcatcggcttcagctacgtgatcgacttcaacaccatgggccagatcaacagacagacccagagacagagaagagtgagaagaagactggacctgatctaccccatggtgaccggcaccctgcccaaggcccagagctggcccgtgagccccggccccgccaccagcccccccatgagcccctgcagctgcccccagtgcgtgctggtgatgagcgtgaaggccgccgtggtgaacggcagcaccggccccctgcagctgcccgtgaccagaaagaacatgcccccccccggcgtggtgaagctgccccccctgcccggcagcggcgccaagcccctggacagcaccggcaccatcagaggccccctgaagaccgcccccagccaggtgatcagaagacaggccagcagcatgcccaccggcaccaccatgggcagccccgccagcccccccggccccaacagcaagaccggcagagtggccctggccaccctgaacagaaccaacctgcagagactggccatcgcccagagcagagtgctgatcgccagcggcgtgcccaccgtgcccgtgaagaacctgaacggcagcagccccgtgaaccccgccctggccggcatcaccggcatcctgatgagcgccgccggcctgcccgtgtgcctgaccagaccccccaagctggtgctgcaccccccccccgtgagcaagagcgagatcaagagcatccccggcgtgagcaacaccagcagaaagaccaccaagaagcaggccaagaagggcaagacccccgaggaggtgctgaagaagtacctgcagaaggtgagacacccccccgacgaggactgcaccatctgcatggagagactgaccgcccccagcggctacaagggcccccagcccaccgtgaagcccgacctggtgggcaagctgagcagatgcggccacgtgtaccacatctactgcctggtggccatgtacaacaacggcaacaaggacggcagcctgcagtgccccacctgcaagaccatctacggcgtgaagaccggcacccagccccccggcaagatggagtaccacctgatcccccacagcctgcccggccaccccgactgcaagaccatcagaatcatctacagcatcccccccggcatccagggccccgagcaccccaaccccggcaagagcttcagcgccagaggcttccccagacactgctacctgcccgacagcgagaagggcagaaaggtgctgaagctgctgctggtggcctgggacagaagactgatcttcgccatcggcaccagcagcaccaccggcgagagcgacaccgtgatctggaacgaggtgcaccacaagaccgagttcggcagcaacctgaccggccacggctaccccgacgccaactacctggacaacgtgctggccgagctggccgcccagggcatcagcgaggacagcaccgcccaggagaaggactag

SEQ ID NO: 13160 - DNA, 414 bp, synthetic construct
  source 1..414: mol_type = other DNA; note = Synthetic coding sequence
atgagcagcgtgcagagccagcaggagcagctgagccagagcgaccccagccccagccccaacagctgcagcagcttcgagctgatcgacatggacgccggcagcctgtacgagcccgtgagcccccactggttctactgcaagatcatcgacagcaaggagacctggatccccttcaacagcgaggacagccagcagctggaggaggcctacagcagcggcaagggctgcaacggcagagtggtgcccaccgacggcggcagatacgacgtgcacctgggcgagagaatgagatacgccgtgtactgggacgagctggccagcgaggtgagaagatgcacctggttctacaagggcgacaaggacaacaagtacgtgccctacagcgagagcttcagccaggtgctggagtag

SEQ ID NO: 13161 - DNA, 120 bp, synthetic construct
  source 1..120: mol_type = other DNA; note = Synthetic coding sequence
atgttctggaagttcgacctgcacagcagcagccacatcgacaccctgctggagagagaggacgtgaccctgaaggagctgatggacgaggaggacgtgctgcaggagtgcaaggcctag

SEQ ID NO: 13162 - DNA, 2157 bp, synthetic construct
  source 1..2157: mol_type = other DNA; note = Synthetic coding sequence
atgctgatgaccctggagatgaccgagctgaccgacccccaccacaccatgggcgactacaaggtggcccacccccaggacccccaccaccccagcgagaagcccgtgatccactgccacaagtgcggcgagccctgcaagggcgaggtgctgagagtgcagaccaagcacttccacatcaagtgcttcacctgcaaggtgtgcggctgcgacctggcccagggcggcttcttcatcaagaacggcgagtacctgtgcaccctggactaccagagaatgtacggcaccagatgccacggctgcggcgagttcgtggagggcgaggtggtgaccgccctgggcaagacctaccaccccaactgcttcgcctgcaccatctgcaagagacccttcccccccggcgacagagtgaccttcaacggcagagactgcctgtgccagctgtgcgcccagcccatgagcagcagccccaaggagaccaccttcagcagcaactgcgccggctgcggcagagacatcaagaacggccaggccctgctggccctggacaagcagtggcacctgggctgcttcaagtgcaagagctgcggcaaggtgctgaccggcgagtacatcagcaaggacggcgccccctactgcgagaaggactaccagggcctgttcggcgtgaagtgcgaggcctgccaccagttcatcaccggcaaggtgctggaggccggcgacaagcactaccaccccagctgcgccagatgcagcagatgcaaccagatgttcaccgagggcgaggagatgtacctgcagggcagcaccgtgtggcaccccgactgcaagcagagcaccaagaccgaggagaagctgagacccaccagaaccagcagcgagagcatctacagcagacccggcagcagcatccccggcagccccggccacaccatctacgccaaggtggacaacgagatcctggactacaaggacctggccgccatccccaaggtgaaggccatctacgacatcgagagacccgacctgatcacctacgagcccttctacaccagcggctacgacgacaagcaggagagacagagcctgggcgagagccccagaaccctgagccccacccccagcgccgagggctaccaggacgtgagagacagaatgatccacagaagcaccagccagggcagcatcaacagccccgtgtacagcagacacagctacacccccaccaccagcagaagcccccagcacttccacagacccggcaacgagcccagcagcggcagaaacagccccctgccctacagacccgacagcagacccctgacccccacctacgcccaggcccccaagcacttccacgtgcccgaccagggcatcaacatctacagaaagccccccatctacaagcagcacgccgccctggccgcccagagcaagagcagcgaggacatcatcaagttcagcaagttccccgccgcccaggcccccgaccccagcgagacccccaagatcgagaccgaccactggcccggcccccccagcttcgccgtggtgggccccgacatgaagagaagaagcagcggcagagaggaggacgacgaggagctgctgagaagaagacagctgcaggaggagcagctgatgaagctgaacagcggcctgggccagctgatcctgaaggaggagatggagaaggagagcagagagagaagcagcctgctggccagcagatacgacagccccatcaacagcgccagccacatccccagcagcaagaccgccagcctgcccggctacggcagaaacggcctgcacagacccgtgagcaccgacttcgcccagtacaacagctacggcgacgtgagcggcggcgtgagagacttccagaccctgcccgacggccacatgcccgccatgagaatggacagaggcgtgagcatgcccaacatgctggagcccaagatcttcccctacgagatgctgatggtgaccaacagaggcagaaacaagatcctgagagaggtggacagaaccagactggagagacacctggcccccgaggtgttcagagagatcttcggcatgagcatccaggagttcgacagactgcccctgtggagaagaaacgacatgaagaagaaggccaagctgttctag

SEQ ID NO: 13163 - DNA, 2148 bp, synthetic construct; identical to SEQ ID NO: 9921
  source 1..2148: mol_type = other DNA; note = Synthetic coding sequence

SEQ ID NO: 13164 - DNA, 360 bp, synthetic construct
  source 1..360: mol_type = other DNA; note = Synthetic coding sequence
atggagaccgacctgaacagccaggacagaaaggacctggacaagttcatcaagttcttcgccctgaagaccgtgcaggtgatcgtgcaggccagactgggcgagaagatctgcaccagaagcagcagcagccccaccggcagcgactggttcaacctggccatcaaggacatccccgaggtgacccacgaggccaagaaggccctggccggccagctgcccgccgtgggcagaagcatgtgcgtggagatcagcctgaagaccagcgagggcgacagcatggagctggagatctggtgcctggagatgaacgagaagtgcgacaaggagatcaaggtgagctacaccgtgtacaactag

SEQ ID NO: 13165 - DNA, 420 bp, synthetic construct
  source 1..420: mol_type = other DNA; note = Synthetic coding sequence
atggccgacaccgacctgttcatggagtgcgaggaggaggagctggagccctggcagaagatcagcgacgtgatcgaggacagcgtggtggaggactacaacagcgtggacaagaccaccaccgtgagcgtgagccagcagcccgtgagcgcccccgtgcccatcgccgcccacgccagcgtggccggccacctgagcaccagcaccaccgtgagcagcagcggcgcccagaacagcgacagcaccaagaagaccctggtgaccctgatcgccaacaacaacgccggcaaccccctggtgcagcagggcggccagcccctgatcctgacccagaaccccgcccccggcctgggcaccatggtgacccagcccgtgctgagacccgtgcaggtgatgcagaacgccaaccacgtgacctag

SEQ ID NO: 13166 - DNA, 492 bp, synthetic construct
  source 1..492: mol_type = other DNA; note = Synthetic coding sequence
atgcacgacaagggcatcaccaccgccgccgtgtgcgtgtaccccgccagagtgtgcgacgccgtgaaggccctgaaggccgccggctgcaacatccccgtggccagcgtggccgccggcttccccgccggccagacccacctgaagaccagactggaggagatcagactggccgtggaggacggcgccaccgagatcgacgtggtgatcaacagaagcctggtgctgaccggccagtgggaggccctgtacgacgagatcagacagttcagaaaggcctgcggcgaggcccacctgaagaccatcctggccaccggcgagctgggcaccctgaccaacgtgtacaaggccagcatgatcgccatgatggccggcagcgacttcatcaagaccagcaccggcaaggagaccgtgaacgccaccttccccgtggccatcgtgatgctgagagccatcagagacttcttctggaagaccggcaacaaggtgtag

SEQ ID NO: 13167 - DNA, 456 bp, synthetic construct
  source 1..456: mol_type = other DNA; note = Synthetic coding sequence
atggccgacaccgacctgttcatggagtgcgaggaggaggagctggagccctggcagaagatcagcgacgtgatcgaggacagcgtggtggaggactacaacagcgtggacaagaccaccaccgtgagcgtgagccagcagcccgtgagcgcccccgtgcccatcgccgcccacgccagcgtggccggccacctgagcaccagcaccaccgtgagcagcagcggcgcccagaacagcgacagcaccaagaagaccctggtgaccctgatcgccaacaacaacgccggcaaccccctggtgcagcagggcggccagcccctgatcctgacccagaaccccgcccccggcctgggcaccatggtgacccagcccgtgctgagacccgtgcaggtgatgcagaacgccaaccacgtgaccagcagccccgtggccagccagcccatcttcatcacctag

SEQ ID NO: 13168 - DNA, 252 bp, synthetic construct
  source 1..252: mol_type = other DNA; note = Synthetic coding sequence
atgagccagagcggcgccgtgagctgctgccccggcgccaccaacggcagcctgggcagaagcgacggcgtggccaagatgagccccaaggacctgttcgagcagagaaagaagtacagcaacagcaacgtgatcatgcacgagaccagccagtaccacgtgcagcacctggccaccttcatcatggacaagagcgaggccatcaccagcgtggacgacgccatcagaaagctggtgcagctgagcagctag

SEQ ID NO: 13169 - DNA, 366 bp, synthetic construct
  source 1..366: mol_type = other DNA; note = Synthetic coding sequence
atggccggcagacccctgagaatcggcgaccagctggtgctggaggaggactacgacgagacctacatccccagcgagcaggagatcctggagttcgccagagagatcggcatcgaccccatcaaggagcccgagctgatgtggctggccagagagggcatcgtggcccccctgcccggcgagtggaagccctgccaggacatcaccggcgacatctactacttcaacttcgccaacggccagagcatgtgggaccacccctgcgacgagcactacagaagcctggtgatccaggagagagccaagctgagcaccagcggcgccatcaagaagaagaagaagaagaaggagaagaaggacaagtag

SEQ ID NO: 13170 - DNA, 2997 bp, synthetic construct; identical to SEQ ID NO: 12130
  source 1..2997: mol_type = other DNA; note = Synthetic coding sequence

SEQ ID NO: 13171 - DNA, 504 bp, synthetic construct
  source 1..504: mol_type = other DNA; note = Synthetic coding sequence
atgggcaccaccgcccccggccccatccacctgctggagctgtgcgaccagaagctgatggagttcctgtgcaacatggacaacaaggacctggtgtggctggaggagatccaggaggaggccgagagaatgttcaccagagagttcagcaaggagcccgagctgatgcccaagacccccagccagaagaacagaagaaagaagagaagaatcagctacgtgcaggacgagaacagagaccccatcagaagaagactgagcagaagaaagagcagaagcagccagctgagcagcagaagactgagaagcaaggacagcgtggagaagctggccaccgtggtgggcgagaacggcagcgtgctgagaagagtgaccagagccgccgccgccgccgccgccgccaccatggccctggccgcccccagcagccccacccccgagagccccaccatgctgaccaagaagcccgaggacaaccacacccagtgccagctggtgccctag

SEQ ID NO: 13172 - DNA, 615 bp, synthetic construct
  source 1..615: mol_type = other DNA; note = Synthetic coding sequence
atggaggcccaggcccagggcctgctggagaccgagcccctgcagggcaccgacgaggacgccgtggccagcgccgacttcagcagcatgctgagcgaggaggagaaggaggagctgaaggccgagctggtgcagctggaggacgagatcaccaccctgagacaggtgctgagcgccaaggagagacacctggtggagatcaagcagaagctgggcatgaacctgatgaacgagctgaagcagaacttcagcaagagctggcacgacatgcagaccaccaccgcctacaagaagacccacgagaccctgagccacgccggccagaaggccaccgccgccttcagcaacgtgggcaccgccatcagcaagaagttcggcgacatgagctacagcatcagacacagcatcagcatgcccgccatgagaaacagccccaccttcaagagcttcgaggagagagtggagaccaccgtgaccagcctgaagaccaaggtgggcggcaccaaccccaacggcggcagcttcgaggaggtgctgagcagcaccgcccacgccagcgcccagagcctggccggcggcagcagaagaaccaaggaggaggagctgcagtgctag

SEQ ID NO: 13173 - DNA, 1023 bp, synthetic construct
  source 1..1023: mol_type = other DNA; note = Synthetic coding sequence
atggccgccgccagagacccccccgaggtgagcctgagagaggccacccagagaaagctgagaagattcagcgagctgagaggcaagctggtggccagaggcgagttctgggacatcgtggccatcaccgccgccgacgagaagcaggagctggcctacaaccagcagctgagcgagaagctgaagagaaaggagctgcccctgggcgtgcagtaccacgtgttcgtggaccccgccggcgccaagatcggcaacggcggcagcaccctgtgcgccctgcagtgcctggagaagctgtacggcgacaagtggaacagcttcaccatcctgctgatccacagcggcggctacagccagagactgcccaacgccagcgccctgggcaagatcttcaccgccctgcccctggacatccccgagtgcagcggcaagaccagctgcatcatccagagcatcctggacagcagatgcagcgtggcccccggcagcgtggtggagtacagcagactgggccccgacgtgagcgtgggcgagaactgcatcatcagcggcagctacatcctgaccaaggccgccctgcccgcccacagcttcgtgtgcagcctgagcctgaagatgaacagatgcctgaagtacgccaccatggccttcggcgtgcaggacaacctgaagaagagcgtgaagaccctgagcgacatcaagctgctgcagttcttcggcgtgtgcttcctgagctgcctggacgtgtggaacctgaaggtgaccgaggagctgttcagcggcaacaagacctgcctgagcctgtggaccgccagaatcttccccgtgtgcagcagcctgagcgacagcgtgatcaccagcctgaagatgctgaacgccgtgaagaacaagagcgccttcagcctgaacagctacaagctgctgagcatcgaggagatgctgatctacaaggacgtggaggacatgatcacctacagagagcagatcttcctggagatcagcctgaagagcagcctgatgtag

SEQ ID NO: 13174 - DNA, 873 bp, synthetic construct
  source 1..873: mol_type = other DNA; note = Synthetic coding sequence
atggccgagctgaccgccctggagagcctgatcgagatgggcttccccagaggcagagccgagaaggccctggccctgaccggcaaccagggcatcgaggccgccatggactggctgatggagcacgaggacgaccccgacgtggacgagcccctggagacccccctgggccacatcctgggcagagagcccaccagcagcgagcagggcggcctggagggcagcggcagcgccgccggcgagggcaagcccgccctgagcgaggaggagagacaggagcagaccaagagaatgctggagctggtggcccagaagcagagagagagagaggagagagaggagagagaggccctggagagagagagacagagaagaagacagggccaggagctgagcgccgccagacagagactgcaggaggacgagatgagaagagccgccgaggagagaagaagagagaaggccgaggagctggccgccagacagagagtgagagagaagatcgagagagacaaggccgagagagccaagaagtacggcggcagcgtgggcagccagcccccccccgtggcccccgagcccggccccgtgcccagcagccccagccaggagccccccaccaagagagagtacgaccagtgcagaatccaggtgagactgcccgacggcaccagcctgacccagaccttcagagccagagagcagctggccgccgtgagactgtacgtggagctgcacagaggcgaggagctgggcggcggccaggaccccgtgcagctgctgagcggcttccccagaagagccttcagcgaggccgacatggagagacccctgcaggagctgggcctggtgcccagcgccgtgctgatctag

SEQ ID NO: 13175 - DNA, 309 bp, synthetic construct; identical to SEQ ID NO: 11300
  source 1..309: mol_type = other DNA; note = Synthetic coding sequence

SEQ ID NO: 13176 - DNA, 279 bp, synthetic construct
  source 1..279: mol_type = other DNA; note = Synthetic coding sequence
atgctgagcgaggaggagaaggaggagctgaaggccgagctggtgcagctggaggacgagatcaccaccctgagacaggtgctgagcgccaaggagagacacctggtggagatcaagcagaagctgggcatgaacctgatgaacgagctgaagcagaacttcagcaagagctggcacgacatgcagaccaccaccgcctacaagaagacccacgagaccctgagccacgccggccagaaggccaccgccgccttcagcaacgtgggcaccgccatctag

SEQ ID NO: 13177 - DNA, 3735 bp, synthetic construct; identical to SEQ ID NO: 10414
  source 1..3735: mol_type = other DNA; note = Synthetic coding sequence

SEQ ID NO: 13178 - DNA, 2676 bp, synthetic construct
  source 1..2676: mol_type = other DNA; note = Synthetic coding sequence
atggaccagcccgaggccccctgcagcagcaccggccccagactggccgtggccagagagctgctgctggccgccctggaggagctgagccaggagcagctgaagagattcagacacaagctgagagacgtgggccccgacggcagaagcatcccctggggcagactggagagagccgacgccgtggacctggccgagcagctggcccagttctacggccccgagcccgccctggaggtggccagaaagaccctgaagagagccgacgccagagacgtggccgcccagctgcaggagagaagactgcagagactgggcctgggcagcggcaccctgctgagcgtgagcgagtacaagaagaagtacagagagcacgtgctgcagctgcacgccagagtgaaggagagaaacgccagaagcgtgaagatcaccaagagattcaccaagctgctgatcgcccccgagagcgccgcccccgaggaggccatgggccccgccgaggagcccgagcccggcagagccagaagaagcgacacccacaccttcaacagactgttcagaagagacgaggagggcagaagacccctgaccgtggtgctgcagggccccgccggcatcggcaagaccatggccgccaagaagatcctgtacgactgggccgccggcaagctgtaccagggccaggtggacttcgccttcttcatgccctgcggcgagctgctggagagacccggcaccagaagcctggccgacctgatcctggaccagtgccccgacagaggcgcccccgtgccccagatgctggcccagccccagagactgctgttcatcctggacggcgccgacgagctgcccgccctgggcggccccgaggccgccccctgcaccgaccccttcgaggccgccagcggcgccagagtgctgggcggcctgctgagcaaggccctgctgcccaccgccctgctgctggtgaccaccagagccgccgcccccggcagactgcagggcagactgtgcagcccccagtgcgccgaggtgagaggcttcagcgacaaggacaagaagaagtacttctacaagtacttcagagacgagagaagagccgagagagcctacagattcgtgaaggagaacgagaccctgttcgccctgtgcttcgtgcccttcgtgtgctggatcgtgtgcaccgtgctgagacagcagctggagctgggcagagacctgagcagaaccagcaagaccaccaccagcgtgtacctgctgttcatcaccagcgtgctgagcagcgcccccgtggccgacggccccagactgcagggcgacctgagaaacctgtgcagactggccagagagggcgtgctgggcagaagagcccagttcgccgagaaggagctggagcagctggagctgagaggcagcaaggtgcagaccctgttcctgagcaagaaggagctgcccggcgtgctggagaccgaggtgacctaccagttcatcgaccagagcttccaggagttcctggccgccctgagctacctgctggaggacggcggcgtgcccagaaccgccgccggcggcgtgggcaccctgctgagaggcgacgcccagccccacagccacctggtgctgaccaccagattcctgttcggcctgctgagcgccgagagaatgagagacatcgagagacacttcggctgcatggtgagcgagagagtgaagcaggaggccctgagatgggtgcagggccagggccagggctgccccggcgtggcccccgaggtgaccgagggcgccaagggcctggaggacaccgaggagcccgaggaggaggaggagggcgaggagcccaactaccccctggagctgctgtactgcctgtacgagacccaggaggacgccttcgtgagacaggccctgtgcagattccccgagctggccctgcagagagtgagattctgcagaatggacgtggccgtgctgagctactgcgtgagatgctgccccgccggccaggccctgagactgatcagctgcagactggtggccgcccaggagaagaagaagaagagcctgggcaagagactgcaggccagcctgggcggcggcagcagccagggcaccaccaagcagctgcccgccagcctgctgcaccccctgttccaggccatgaccgaccccctgtgccacctgagcagcctgaccctgagccactgcaagctgcccgacgccgtgtgcagagacctgagcgaggccctgagagccgcccccgccctgaccgagctgggcctgctgcacaacagactgagcgaggccggcctgagaatgctgagcgagggcctggcctggccccagtgcagagtgcagaccgtgagagtgcagctgcccgacccccagagaggcctgcagtacctggtgggcatgctgagacagagccccgccctgaccaccctggacctgagcggctgccagctgcccgcccccatggtgacctacctgtgcgccgtgctgcagcaccagggctgcggcctgcagaccctgagcctggccagcgtggagctgagcgagcagagcctgcaggagctgcaggccgtgaagagagccaagcccgacctggtgatcacccaccccgccctggacggccacccccagccccccaaggagctgatcagcaccttctag

SEQ ID NO: 13179 - DNA, 240 bp, synthetic construct
  source 1..240: mol_type = other DNA; note = Synthetic coding sequence
atgagccagagcggcgccgtgagctgctgccccggcgccaccaacggcagcctgggcagaagcgacggcgtggccaagatgagccccaaggacctgttcgagcagagaaagaagtacagcaacagcaacgtgatcatgcacgagaccagccagtaccacgtgcagcacctggccaccttcatcatggacaagagcgaggccatcaccagcgtggacgacgccatcagaaagctggtgtag

SEQ ID NO: 13180 - DNA, 543 bp, synthetic construct
  source 1..543: mol_type = other DNA; note = Synthetic coding sequence
atgggcgacaagaagagccccaccagacccaagagacagcccaagcccagcagcgacgagggctactgggactgcagcgtgtgcaccttcagaaacagcgccgaggccttcaagtgcatgatgtgcgacgtgagaaagggcaccagcaccagaaagcccagacccgtgagccagctggtggcccagcaggtgacccagcagttcgtgccccccacccagagcaagaaggagaagaaggacaaggtggagaaggagaagagcgagaaggagaccaccagcaagaagaacagccacaagaagaccagacccagactgaagaacgtggacagaagcagcgcccagcacctggaggtgaccgtgggcgacctgaccgtgatcatcaccgacttcaaggagaagaccaagagcccccccgccagcagcgccgccagcgccgaccagcacagccagagcggcagcagcagcgacaacaccgagagaggcatgagcagaagcagcagccccagaggcgaggccagcagcctgaacggcgagagccactag

SEQ ID NO: 13181 - DNA, 2196 bp, synthetic construct
  source 1..2196: mol_type = other DNA; note = Synthetic coding sequence
atgggcagcggcgaggagcccggccagagcggcgccagcctgagaaccggccccatggtgcagggcagaggcatcatgaccaccggcagcggccaggagcccggccagagcggcaccagcctgagaaccggccccatgggcagcctgggccaggccgagcaggtgagcagcatgcccatgggcagcctggagcacgagggcctggtgagcctgagacccgtgggcctgcaggagcaggagggccccatgagcctgggccccgtgggcagcgccggccccgtggagaccagcaagggcctgctgggccaggagggcctggtggagatcgccatggacagccccgagcaggagggcctggtgggccccatggagatcaccatgggcagcctggagaaggccggccccgtgagccccggctgcgtgaagctggccggccaggagggcctggtggagatggtgctgctgatggagcccggcgccatgagattcctgcagctgtaccacgaggacctgctggccggcctgggcgacgtggccctgctgcccctggagggccccgacatgaccggcttcagactgtgcggcgcccaggccagctgccaggccgccgaggagttcctgagaagcctgctgggcagcatcagctgccacgtgctgtgcctggagcaccccggcagcgccagattcctgctgggccccgagggccagcacctgctgcagggcctggaggcccagttccagtgcgtgttcggcaccgagagactggccaccgccaccctggacaccggcctggaggaggtggaccccaccgaggccctgcccgtgctgcccggcaacgcccacaccctgtggacccccgacagcaccggcggcgaccaggaggacgtgagcctggaggaggtgagagagctgctggccaccctggagggcctggacctggacggcgaggactggctgcccagagagctggaggaggagggcccccaggagcagcccgaggaggaggtgacccccggccacgaggaggaggagcccgtggcccccagcaccgtggcccccagatggctggaggaggaggccgccctgcagctggccctgcacagaagcctggagccccagggccaggtggccgagcaggaggaggccgccgccctgagacaggccctgaccctgagcctgctggagcagccccccctggaggccgaggagccccccgacggcggcaccgacggcaaggcccagctggtggtgcacagcgccttcgagcaggacgtggaggagctggacagagccctgagagccgccctggaggtgcacgtgcaggaggagaccgtgggcccctggagaagaaccctgcccgccgagctgagagccagactggagagatgccacggcgtgagcgtggccctgagaggcgactgcaccatcctgagaggcttcggcgcccaccccgccagagccgccagacacctggtggccctgctggccggcccctgggaccagagcctggccttccccctggccgccagcggccccaccctggccggccagaccctgaagggcccctggaacaacctggagagactggccgagaacaccggcgagttccaggaggtggtgagagccttctacgacaccctggacgccgccagaagcagcatcagagtggtgagagtggagagagtgagccaccccctgctgcagcagcagtacgagctgtacagagagagactgctgcagagatgcgagagaagacccgtggagcaggtgctgtaccacggcaccaccgcccccgccgtgcccgacatctgcgcccacggcttcaacagaagcttctgcggcagaaacgccaccgtgtacggcaagggcgtgtacttcgccagaagagccagcctgagcgtgcaggacagatacagcccccccaacgccgacggccacaaggccgtgttcgtggccagagtgctgaccggcgactacggccagggcagaagaggcctgagagccccccccctgagaggccccggccacgtgctgctgagatacgacagcgccgtggactgcatctgccagcccagcatcttcgtgatcttccacgacacccaggccctgcccacccacctgatcacctgcgagcacgtgcccagagccagccccgacgaccccagcggcctgcccggcagaagccccgacacctag

SEQ ID NO: 13182 - DNA, 1083 bp, synthetic construct
  source 1..1083: mol_type = other DNA; note = Synthetic coding sequence
atgcaggtgtacgagggcctggacatcatcaccaacaaggtgagcgcccaggagcagagaatctgcagacaccacatgatcagcttcgtggaccccctggtgaccaactacaccgtggtggacttcagaaacagagccaccgccctgatctacctgcccgagaccaagttcctgctgctgtgggaggagcccatcatcaccctgaacctgtgcagcggcaagttcctgagcatccccagaagcctgcaggtgttcgaggagaccggcatcagccacagcgagttcctgcacagacagcacaccgaggagggcggcggccccctgggcggccccctgaagttcagcaacccctgcatcctgtggctgcacgccgaccaggccgtgctggacgagagactggacaagagagtggacgacatgctggccgccggcctgctggaggagctgagagacttccacagaagatacaaccagaagaacgtgagcgagaacagccaggactaccagcacggcatcttccagagcatcggcttcaaggagttccacgagtacctgatcaccgagggcaagtgcaccctggagaccagcaaccagctgctgaagaagggcatcgaggccctgaagcaggtgaccaagagatacgccagaaagcagaacagatgggtgaagaacagattcctgagcagacccggccccatcgtgccccccgtgtacggcctggaggtgagcgacgtgagcaagtgggaggagagcgtgctggagcccgccctggagatcgtgcagagcttcatccagggccacaagcccaccgccacccccatcaagatgccctacaacgaggccgagaacaagagaagctaccacctgtgcgacctgtgcgacagaatcatcatcggcgacagagagtgggccgcccacatcaagagcaagagccacctgaaccagctgaagaagagaagaagactggacagcgacgccgtgaacaccatcgagagccagagcgtgagccccgaccacaacaaggagcccaaggagaagggcagccccggccagaacgaccaggagctgaagtgcagcgtgtag

SEQ ID NO: 13183 - DNA, 828 bp, synthetic construct; identical to SEQ ID NO: 12370
  source 1..828: mol_type = other DNA; note = Synthetic coding sequence

SEQ ID NO: 13184 - DNA, 1692 bp, synthetic construct
  source 1..1692: mol_type = other DNA; note = Synthetic coding sequence
atggagaccgccaagcagaaggccctggaggtggccaacagactgtaccagaaggacctgagagcccccgacgtggtgatcggcgccgacaccatcgtgaccgtgggcggcctgatcctggagaagcccgtggacaagcaggacgcctacagaatgctgagcagactgagcggcagagagcacagcgtgttcaccggcgtggccatcgtgcactgcagcagcaaggaccaccagctggacaccagagtgagcgagttctacgaggagaccaaggtgaagttcagcgagctgagcgaggagctgctgtgggagtacgtgcacagcggcgagcccatggacaaggccggcggctacggcatccaggccctgggcggcatgctggtggagagcgtgcacggcgacttcctgaacgtggtgggcttccccctgaaccacttctgcaagcagctggtgaagctgtactacccccccagacccgaggacctgagaagaagcgtgaagcacgacagcatccccgccgccgacaccttcgaggacctgagcgacgtggagggcggcggcagcgagcccacccagagagacgccggcagcagagacgagaaggccgaggccggcgaggccggccaggccaccgccgaggccgagtgccacagaaccagagagaccctgccccccttccccaccagactgctggagctgatcgagggcttcatgctgagcaagggcctgctgaccgcctgcaagctgaaggtgttcgacctgctgaaggacgaggccccccagaaggccgccgacatcgccagcaaggtggacgccagcgcctgcggcatggagagactgctggacatctgcgccgccatgggcctgctggagaagaccgagcagggctacagcaacaccgagaccgccaacgtgtacctggccagcgacggcgagtacagcctgcacggcttcatcatgcacaacaacgacctgacctggaacctgttcacctacctggagttcgccatcagagagggcaccaaccagcaccacagagccctgggcaagaaggccgaggacctgttccaggacgcctactaccagagccccgagaccagactgagattcatgagagccatgcacggcatgaccaagctgaccgcctgccaggtggccaccgccttcaacctgagcagattcagcagcgcctgcgacgtgggcggctgcaccggcgccctggccagagagctggccagagagtaccccagaatgcaggtgaccgtgttcgacctgcccgacatcatcgagctggccgcccacttccagccccccggcccccaggccgtgcagatccacttcgccgccggcgacttcttcagagaccccctgcccagcgccgagctgtacgtgctgtgcagaatcctgcacgactggcccgacgacaaggtgcacaagctgctgagcagagtggccgagagctgcaagcccggcgccggcctgctgctggtggagaccctgctggacgaggagaagagagtggcccagagagccctgatgcagagcctgaacatgctggtgcagaccgagggcaaggagagaagcctgggcgagtaccagtgcctgctggagctgcacggcttccaccaggtgcaggtggtgcacctgggcggcgtgctggacgccatcctggccaccaaggtggccccctag

SEQ ID NO: 13185 - DNA, 828 bp, synthetic construct; identical to SEQ ID NO: 12370
  source 1..828: mol_type = other DNA; note = Synthetic coding sequence

SEQ ID NO: 13186 - DNA, 999 bp, synthetic construct
  source 1..999: mol_type = other DNA; note = Synthetic coding sequence
atggagtacctgggcggcggcagcgccctggacctgctgaagcccggccccctggaggagacctacatcgccaccatcctgagagagatcctgaagggcctggactacctgcacagcgagagaaagatccacagagacatcaaggccgccaacgtgctgctgagcgagcagggcgacgtgaagctggccgacttcggcgtggccggccagctgaccgacacccagatcaagagaaacaccttcgtgggcacccccttctggatggcccccgaggtgatcaagcagagcgcctacgacttcaaggccgacatctggagcctgggcatcaccgccatcgagctggccaagggcgagccccccaacagcgacctgcaccccatgagagtgctgttcctgatccccaagaacagcccccccaccctggagggccagcacagcaagcccttcaaggagttcgtggaggcctgcctgaacaaggaccccagattcagacccaccgccaaggagctgctgaagcacaagttcatcaccagatacaccaagaagaccagcttcctgaccgagctgatcgacagatacaagagatggaagagcgagggccacggcgaggagagcagcagcgaggacagcgacatcgacggcgaggccgaggacggcgagcagggccccatctggaccttcccccccaccatcagacccagcccccacagcaagctgcacaagggcaccgccctgcacagcagccagaagcccgccgagcccgtgaagagacagcccagaagccagtgcctgagcaccctggtgagacccgtgttcggcgagctgaaggagaagcacaagcagagcggcggcagcgtgggcgccctggaggagctggagaacgccttcagcctggccgaggagagctgccccggcatcagcgacaagctgatggtgcacctggtggagagagtgcagagattcagccacaacagaaaccacctgaccagcaccagatag

SEQ ID NO: 13187 - DNA, 279 bp, synthetic construct
  source 1..279: mol_type = other DNA; note = Synthetic coding sequence
atgaacttcacccccacccacacccccgtgtgcagaaagagaaccgtggtgagcaagagaggcgtggccgtgagcggccccaccaagagaagaggcatggccgacagcctggagagcacccccctgcccagccccgaggacagactggccaagctgcaccccagcaaggagctgctggagtactaccagaagaagatggccgagtgcgaggccgagaacgaggacctgctgaagaagctggagctgtacaaggaggcctgcgagggccagcacaagtag

SEQ ID NO: 13188 - DNA, 429 bp, synthetic construct
  source 1..429: mol_type = other DNA; note = Synthetic coding sequence
atggcccagaaggagaacagctacccctggccctacggcagacagaccgcccccagcggcctgagcaccctgccccagagagtgctgagaaaggagcccgtgacccccagcgccctggtgctgatgagcagaagcaacgtgcagcccaccgccgcccccggccagaaggtgatggagaacagcagcggcacccccgacatcctgaccagaagacacttcaccatcgacgacttcgagatcggcagacccctgggcaagggcaagttcggcaacgtgtacctggccagagagaagaagagccacttcatcgtggccctgaaggtgctgttcaagagccagatcgagaaggagggcgtggagcaccagctgagaagagagatcgagatccaggcccacctgcagagctggagaagctggcagatgctgtag

SEQ ID NO: 13189 - DNA, 501 bp, synthetic construct
  source 1..501: mol_type = other DNA; note = Synthetic coding sequence
atggaccaggaggacagcgagagcaagaccgtgagcgagcacggcgagagagactggatgaccgccaagaagttctggaagcccggcgacagcctggccccccccgaggtggacttcgacagactgctggccagcctgcaggacctgagcgagctggtggtggagggcgacacccaggtgacccccgtgcccggcggcgccagactgagaaccctggagcccatccccctgaagctgtacagaaacggcatcatgatgttcgacggccccttccagcccttctacgaccccagcacccagagatgcctgagagacatcctggacggcttcttccccagcgagctgcagagactgtaccccaacggcgtgcccttcaaggtgatcagctgcagcagcaaccacaccttcggcgacttcgagggcagcggcgacacccagcccccccagaccccccccatcctgagaggcagcagatgcaccccctggggcacccccgtgtag

SEQ ID NO: 13190 - DNA, 1473 bp, synthetic construct
  source 1..1473: mol_type = other DNA; note = Synthetic coding sequence
atgcagagcctggacgacgccaccaagcagctggacttcaccagaaagaccctggccgagaagaagcaggagctggacaagctgagaaacgagtgggccagccacaccgccgccctgaccaacaagcacagccaggagctgaccaacgagaaggagaaggccctgcaggcccaggtgcagtaccagcagcagcacgagcagcagaagaaggacctggagatcctgcaccagcagaacatccaccagctgcagaacagactgagcgagctggaggccgccaacaaggacctgaccgagagaaagtacaagggcgacagcaccatcagagagctgaaggccaagctgagcggcgtggaggaggagctgcagagaaccaagcaggaggtgctgagcctgagaagagagaacagcaccctggacgtggagtgccacgagaaggagaagcacgtgaaccagctgcagaccaaggtggccgtgctggagcaggagatcaaggacaaggaccagctggtgctgagaaccaaggaggccttcgacaccatccaggagcagaaggtggtgctggaggagaacggcgagaagaaccaggtgcagctgggcaagctggaggccaccatcaagagcctgagcgccgagctgctgaaggccaacgagatcatcaagaagctgcagggcgacctgaagaccctgatgggcaagctgaagctgaagaacaccgtgaccatccagcaggagaagctgctggccgagaaggaggagaagctgcagaaggagcagaaggagctgcaggacgtgggccagagcctgagaatcaaggagcaggaggtgtgcaagctgcaggagcagctggaggccaccgtgaagaagctggaggagagcaagcagctgctgaagaacaacgagaagctgatcacctggctgaacaaggagctgaacgagaaccagctggtgagaaagcaggacgtgctgggccccagcaccaccccccccgcccacagcagcagcaacaccatcagaagcggcatcagccccaacctgaacgtggtggacggcagactgacctaccccacctgcggcatcggctaccccgtgagcagcgccttcgccttccagaacaccttcccccacagcatcagcgccaagaacaccagccaccccggcagcggcaccaaggtgcagttcaacctgcagttcaccaagcccaacgccagcctgggcgacgtgcagagcggcgccaccatcagcatgccctgcagcaccgacaaggagaacggcgagaacgtgggcctggagagcaagtacctgaagaagagagaggacagcatccccctgagaggcctgagccagaacctgttcagcaacagcgaccaccagagagacggcaccctgggcgccctgcacaccagcagcaagcccaccgccctgcccagcgccagcagcgcctacttccccggccagctgcccaacagctag

SEQ ID NO: 13191 - DNA, 3015 bp, synthetic construct
  source 1..3015: mol_type = other DNA; note = Synthetic coding sequence
atgctgagaaccgccggcagagacggcctgtgcagactgagcacctacctggaggagctggaggccgtggagctgaagaagttcaagctgtacctgggcaccgccaccgagctgggcgagggcaagatcccctggggcagcatggagaaggccggccccctggagatggcccagctgctgatcacccacttcggccccgaggaggcctggagactggccctgagcaccttcgagagaatcaacagaaaggacctgtgggagagaggccagagagaggacctggtgagagacaccccccccggcggccccagcagcctgggcaaccagagcacctgcctgctggaggtgagcctggtgacccccagaaaggacccccaggagacctacagagactacgtgagaagaaagttcagactgatggaggacagaaacgccagactgggcgagtgcgtgaacctgagccacagatacaccagactgctgctggtgaaggagcacagcaaccccatgcaggtgcagcagcagctgctggacaccggcagaggccacgccagaaccgtgggccaccaggccagccccatcaagatcgagaccctgttcgagcccgacgaggagagacccgagccccccagaaccgtggtgatgcagggcgccgccggcatcggcaagagcatgctggcccacaaggtgatgctggactgggccgacggcaagctgttccagggcagattcgactacctgttctacatcaactgcagagagatgaaccagagcgccaccgagtgcagcatgcaggacctgatcttcagctgctggcccgagcccagcgcccccctgcaggagctgatcagagtgcccgagagactgctgttcatcatcgacggcttcgacgagctgaagcccagcttccacgacccccagggcccctggtgcctgtgctgggaggagaagagacccaccgagctgctgctgaacagcctgatcagaaagaagctgctgcccgagctgagcctgctgatcaccaccagacccaccgccctggagaagctgcacagactgctggagcaccccagacacgtggagatcctgggcttcagcgaggccgagagaaaggagtacttctacaagtacttccacaacgccgagcaggccggccaggtgttcaactacgtgagagacaacgagcccctgttcaccatgtgcttcgtgcccctggtgtgctgggtggtgtgcacctgcctgcagcagcagctggagggcggcggcctgctgagacagaccagcagaaccaccaccgccgtgtacatgctgtacctgctgagcctgatgcagcccaagcccggcgcccccagactgcagcccccccccaaccagagaggcctgtgcagcctggccgccgacggcctgtggaaccagaagatcctgttcgaggagcaggacctgagaaagcacggcctggacggcgaggacgtgagcgccttcctgaacatgaacatcttccagaaggacatcaactgcgagagatactacagcttcatccacctgagcttccaggagttcttcgccgccatgtactacatcctggacgagggcgagggcggcgccggccccgaccaggacgtgaccagactgctgaccgagtacgccttcagcgagagaagcttcctggccctgaccagcagattcctgttcggcctgctgaacgaggagaccagaagccacctggagaagagcctgtgctggaaggtgagcccccacatcaagatggacctgctgcagtggatccagagcaaggcccagagcgacggcagcaccctgcagcagggcagcctggagttcttcagctgcctgtacgagatccaggaggaggagttcatccagcaggccctgagccacttccaggtgatcgtggtgagcaacatcgccagcaagatggagcacatggtgagcagcttctgcctgaagagatgcagaagcgcccaggtgctgcacctgtacggcgccacctacagcgccgacggcgaggacagagccagatgcagcgccggcgcccacaccctgctggtgcagctgcccgagagaaccgtgctgctggacgcctacagcgagcacctggccgccgccctgtgcaccaaccccaacctgatcgagctgagcctgtacagaaacgccctgggcagcagaggcgtgaagctgctgtgccagggcctgagacaccccaactgcaagctgcagaacctgagactgaagagatgcagaatcagcagcagcgcctgcgaggacctgagcgccgccctgatcgccaacaagaacctgaccagaatggacctgagcggcaacggcgtgggcttccccggcatgatgctgctgtgcgagggcctgagacacccccagtgcagactgcagatgatccagctgagaaagtgccagctggagagcggcgcctgccaggagatggccagcgtgctgggcaccaacccccacctggtggagctggacctgaccggcaacgccctggaggacctgggcctgagactgctgtgccagggcctgagacaccccgtgtgcagactgagaaccctgtggctgaagatctgcagactgaccgccgccgcctgcgacgagctggccagcaccctgagcgtgaaccagagcctgagagagctggacctgagcctgaacgagctgggcgacctgggcgtgctgctgctgtgcgagggcctgagacaccccacctgcaagctgcagaccctgagactgggcatctgcagactgggcagcgccgcctgcgagggcctgagcgtggtgctgcaggccaaccacaacctgagagagctggacctgagcttcaacgacctgggcgactggggcctgtggctgctggccgagggcctgcagcaccccgcctgcagactgcagaagctgtggctgttcggcatggacctgaacaagatgacccacagcagactggccgccctgagagtgaccaagccctacctggacatcggctgctag

SEQ ID NO: 13192 - DNA, 2517 bp, synthetic construct; identical to SEQ ID NO: 10075
  source 1..2517: mol_type = other DNA; note = Synthetic coding sequence

SEQ ID NO: 13193 - DNA, 165 bp, synthetic construct
  source 1..165: mol_type = other DNA; note = Synthetic coding sequence
atgggcaacagcgacagccagtacaccctgcagggcagcaagaaccacagcaacaccatcaccggcgccaagcagatcccctgcagcctgaagatcagaggcatccacgccaaggaggagaagagcctgcacggctggggccacggcagcaacggcgccggctag

SEQ ID NO: 13194 - DNA, 1269 bp, synthetic construct
  source 1..1269: mol_type = other DNA; note = Synthetic coding sequence
atggccagcctgagcagagccctgagagtggccgccgcccaccccagacagagccccaccagaggcatgggcccctgcaacctgagcagcgccgccggccccaccgccgagaagagcgtgccctaccagagaaccctgaaggagggccagggcaccagcgtggtggcccagggccccagcagacccctgcccagcaccgccaacgtggtggtgatcggcggcggcagcctgggctgccagaccctgtaccacctggccaagctgggcatgagcggcgccgtgctgctggagagagagagactgaccagcggcaccacctggcacaccgccggcctgctgtggcagctgagacccagcgacgtggaggtggagctgctggcccacaccagaagagtggtgagcagagagctggaggaggagaccggcctgcacaccggctggatccagaacggcggcctgttcatcgccagcaacagacagagactggacgagtacaagagactgatgagcctgggcaaggcctacggcgtggagagccacgtgctgagccccgccgagaccaagaccctgtaccccctgatgaacgtggacgacctgtacggcaccctgtacgtgccccacgacggcaccatggaccccgccggcacctgcaccaccctggccagagccgccagcgccagaggcgcccaggtgatcgagaactgccccgtgaccggcatcagagtgtggaccgacgacttcggcgtgagaagagtggccggcgtggagacccagcacggcagcatccagaccccctgcgtggtgaactgcgccggcgtgtgggccagcgccgtgggcagaatggccggcgtgaaggtgcccctggtggccatgcaccacgcctacgtggtgaccgagagaatcgagggcatccagaacatgcccaacgtgagagaccacgacgccagcgtgtacctgagactgcagggcgacgccctgagcgtgggcggctacgaggccaaccccatcttctgggaggaggtgagcgacaagttcgccttcggcctgttcgacctggactgggaggtgttcacccagcacatcgagggcgccatcaacagagtgcccgtgctggagaagaccggcatcaagagcaccgtgtgcggccccgagagcttcacccccgaccacaagcccctgatgggcgaggcccccgagctgagaggcttcttcctgggctgcggcttcaacagcgccggcgagagcggccaggccctgctggccccctag

SEQ ID NO: 13195 - DNA, 327 bp, synthetic construct
  source 1..327: mol_type = other DNA; note = Synthetic coding sequence
atgagcatgctgaagcccagcggcctgaaggcccccaccaagatcctgaagcccggcagcaccgccctgaagacccccaccgccgtggtggcccccgtggagaagaccatcagcagcgagaaggccagcagcacccccagcagcgagacccaggaggagttcgtggacgacttcagagtgggcgagagagtgtgggtgaacggcaacaagcccggcttcatccagttcctgggcgagacccagttcgcccccggccagtgggccggcatcgtgctggacgagcccatcggcaagaacgacggcagcgtggccggcgtgagatactag

SEQ ID NO: 13196 - DNA, 2148 bp, synthetic construct
  source 1..2148: mol_type = other DNA; note = Synthetic coding sequence
atgaagagaggcagactgcccagcagcagcgaggacagcgacgacaacggcagcctgagcaccacctggagccagaacagcagaagccagcacagaagaagcagctgcagcagacacgaggacagaaagcccagcgaggtgttcagaaccgacctgatcaccgccatgaagctgcacgacagctaccagctgaaccccgacgagtactacgtgctggccgacccctggagacaggagtgggagaagggcgtgcaggtgcccgtgagccccggcaccatcccccagcccgtggccagagtggtgagcgaggagaagagcctgatgttcatcagacccaagaagtacatcgtgagcagcggcagcgagccccccgagctgggctacgtggacatcagaaccctggccgacagcgtgtgcagatacgacctgaacgacatggacgccgcctggctggagctgaccaacgaggagttcaaggagatgggcatgcccgagctggacgagtacaccatggagagagtgctggaggagttcgagcagagatgctacgacaacatgaaccacgccatcgagaccgaggagggcctgggcatcgagtacgacgaggacgtggtgtgcgacgtgtgccagagccccgacggcgaggacggcaacgagatggtgttctgcgacaagtgcaacatctgcgtgcaccaggcctgctacggcatcctgaaggtgcccgagggcagctggctgtgcagaacctgcgccctgggcgtgcagcccaagtgcctgctgtgccccaagaagggcggcgccatgaagcccaccagaagcggcaccaagtgggtgcacgtgagctgcgccctgtggatccccgaggtgagcatcggcagccccgagaagatggagcccatcaccaaggtgagccacatccccagcagcagatgggccctggtgtgcagcctgtgcaacgagaagttcggcgccagcatccagtgcagcgtgaagaactgcagaaccgccttccacgtgacctgcgccttcgacagaggcctggagatgaagaccatcctggccgagaacgacgaggtgaagttcaagagctactgccccaagcacagcagccacagaaagcccgaggagagcctgggcaagggcgccgcccaggagaacggcgcccccgagtgcagccccagaaaccccctggagcccttcgccagcctggagcagaacagagaggaggcccacagagtgagcgtgagaaagcagaagctgcagcagctggaggacgagttctacaccttcgtgaacctgctggacgtggccagagccctgagactgcccgaggaggtggtggacttcctgtaccagtactggaagctgaagagaaaggtgaacttcaacaagcccctgatcacccccaagaaggacgaggaggacaacctggccaagagagagcaggacgtgctgttcagaagactgcagctgttcacccacctgagacaggacctggagagagtgagaaacctgacctacatggtgaccagaagagagaagatcaagagaagcgtgtgcaaggtgcaggagcagatcttcaacctgtacaccaagctgctggagcaggagagagtgagcggcgtgcccagcagctgcagcagcagcagcctggagaacatgctgctgttcaacagccccagcgtgggccccgacgcccccaagatcgaggacctgaagtggcacagcgccttcttcagaaagcagatgggcaccagcctggtgcacagcctgaagaagccccacaagagagaccccctgcagaacagccccggcagcgagggcaagaccctgctgaagcagcccgacctgtgcggcagaagagagggcatggtggtgcccgagagcttcctgggcctggagaagaccttcgccgaggccagactgatcagcgcccagcagaagaacggcgtggtgatgcccgaccacggcaagagaagagacaacagattccactgcgacctgatcaagggcgacctgaaggacaagagcttcaagcagagccacaagcccctgagaagcaccgacgtgagccagagacacctggacaacaccagagccgccgccatctggagattcagagtgatctggcagggccccgccgcctag

SEQ ID NO: 13197 - DNA, 162 bp, synthetic construct
  source 1..162: mol_type = other DNA; note = Synthetic coding sequence
atgggcagaagaagcaccagcagcaccaagagcggcaagttcatgaaccccaccgaccaggccagaaaggaggccagaaagagagagctgaagaagaacaagaagcagagaatgatggtgagagccgccgtgctgaagatgaaggaccccaagcagatctag

SEQ ID NO: 13198 - DNA, 1035 bp, synthetic construct
  source 1..1035: mol_type = other DNA; note = Synthetic coding sequence
atgaccaccagaagcgtgctggacgtggagaccttcgtggccgacatcctgaagggcgagaacctgagcaagaaggccaaggagaagagagagagcctgatcaagaagatcaaggacgtgaagagcatctacctgcaggagttccaggacaagggcgacgccgaggacggcgaggagtacgacgaccccttcgccggcccccccgacaccatcagcctggccagcgagagatacgacaaggacgacgaggcccccagcgacggcgcccagttcccccccatcgccgcccaggacctgcccttcgtgctgaaggccggctacctggagaagagaagaaaggaccacagcttcctgggcttcgagtggcagaagagatggtgcgccctgagcaagaccgtgttctactactacggcagcgacaaggacaagcagcagaagggcgagttcgccatcgacggctacagcgtgagaatgaacaacaccctgagaaaggacggcaagaaggactgctgcttcgagatcagcgcccccgacaagagaatctaccagttcaccgccgccagccccaaggacgccgaggagtgggtgcagcagctgaagttcgtgctgcaggacatggagagcgacatcatccccgaggactacgacgagagaggcgagctgtacgacgacgtggaccaccccctgcccatcagcaaccccctgaccagcagccagcccatcgacgacgagatctacgaggagctgcccgaggaggaggaggacagcgcccccgtgaaggtggaggagcagagaaagatgagccaggacagcgtgcaccacaccagcggcgacaagagcaccgactacgccaacttctaccagggcctgtgggactgcaccggcgccttcagcgacgagctgagcttcaagagaggcgacgtgatctacatcctgagcaaggagtacaacagatacggctggtgggtgggcgagatgaagggcgccatcggcctggtgcccaaggcctacatcatggagatgtacgacatctag

SEQ ID NO: 13199 - DNA, 2868 bp, synthetic construct; identical to SEQ ID NO: 11317
  source 1..2868: mol_type = other DNA; note = Synthetic coding sequence

SEQ ID NO: 13200 - DNA, 834 bp, synthetic construct
  source 1..834: mol_type = other DNA; note = Synthetic coding sequence
atgctgagccagaaggaggtggccgtggccgacgccaagaagagcctggagctgaaccccaacaacagcaccgccatgctgagaaagggcatctgcgagtaccacgagaagaactacgccgccgccctggagaccttcaccgagggccagaagctggacagcgccgacgccaacttcagcgtgtggatcaagagatgccaggaggcccagaacggcagcgagagcgaggtgtggacccaccagagcaagatcaagtacgactggtaccagaccgagagccaggtggtgatcaccctgatgatcaagaacgtgcagaagaacgacgtgaacgtggagttcagcgagaaggagctgagcgccctggtgaagctgcccagcggcgaggactacaacctgaagctggagctgctgcaccccatcatccccgagcagagcaccttcaaggtgctgagcaccaagatcgagatcaagctgaagaagcccgaggccgtgagatgggagaagctggagggccagggcgacgtgcccacccccaagcagttcgtggccgacgtgaagaacctgtaccccagcagcagcccctacaccagaaactgggacaagctggtgggcgagatcaaggaggaggagaagaacgagaagctggagggcgacgccgccctgaacagactgttccagcagatctacagcgacggcagcgacgaggtgaagagagccatgaacaagagcttcatggagagcggcggcaccgtgctgagcaccaactggagcgacgtgggcaagagaaaggtggagatcaacccccccgacgacatggagtggaagaagtactag

SEQ ID NO: 13201 - DNA, 807 bp, synthetic construct
  source 1..807: mol_type = other DNA; note = Synthetic coding sequence
atgggcagcgccaagagcgtgcccgtgacccccgccagaccccccccccacaacaagcacctggccagagtggccgaccccagaagccccagcgccggcatcctgagaacccccatccaggtggagagcagcccccagcccggcctgcccgccggcgagcagctggagggcctgaagcacgcccaggacagcgaccccagaagccccaccctgggcatcgccagaacccccatgaagaccagcagcggcgacccccccagccccctggtgaagcagctgagcgaggtgttcgagaccgaggacagcaagagcaacctgccccccgagcccgtgctgccccccgaggcccccctgagcagcgagctggacctgcccctgggcacccagctgagcgtggaggagcagatgcccccctggaaccagaccgagttccccagcaagcaggtgttcagcaaggaggaggccagacagcccaccgagacccccgtggccagccagagcagcgacaagcccagcagagaccccgagacccccagaagcagcggcagcatgagaaacagatggaagcccaacagcagcaaggtgctgggcagaagccccctgaccatcctgcaggacgacaacagccccggcaccctgaccctgagacagggcaagagacccagccccctgagcgagaacgtgagcgagctgaaggagggcgccatcctgggcaccggcagactgctgaagaccggcggcagagcctgggagcagggccaggaccacgacaaggagaaccagcacttccccctggtggagagctag

SEQ ID NO: 13202 - DNA, 1140 bp, synthetic construct
  source 1..1140: mol_type = other DNA; note = Synthetic coding sequence
atggtgttcaagctgaagaccaaggaggagcagcacagcatgctgggcagcggcttcaaggccgagagactgagagtgaacctgagactggtgatcaacagactgaagctgctggagaagaagaagaccgagctggcccagaaggccagaaaggagatcgccgactacctggccgccggcaaggacgagagagccagaatcagagtggagcacatcatcagagaggactacctggtggaggccatggagatcctggagctgtactgcgacctgctgctggccagattcggcctgatccagagcatgaaggagctggacagcggcctggccgagagcgtgagcaccctgatctgggccgcccccagactgcagagcgaggtggccgagctgaagatcgtggccgaccagctgtgcgccaagtacagcaaggagtacggcaagctgtgcagaaccaaccagatcggcaccgtgaacgacagactgatgcacaagctgagcgtggaggccccccccaagatcctggtggagagatacctgatcgagatcgccaagaactacaacgtgccctacgagcccgacagcgtggtgatggccgaggccccccccggcgtggagaccgacctgatcgacgtgggcttcaccgacgacgtgaagaagggcggccccggcagaggcggcagcggcggcttcaccgcccccgtgggcggccccgacggcaccgtgcccatgcccatgcccatgcccatgcccatgcccagcgccaacacccccttcagctaccccctgcccaagggccccagcgacttcaacggcctgcccatgggcacctaccaggccttccccaacatccaccccccccagatccccgccaccccccccagctacgagagcgtggacgacatcaacgccgacaagaacatcagcagcgcccagatcgtgggccccggccccaagcccgaggccagcgccaagctgcccagcagacccgccgacaactacgacaacttcgtgctgcccgagctgcccagcgtgcccgacaccctgcccaccgccagcgccggcgccagcaccagcgccagcgaggacatcgacttcgacgacctgagcagaagattcgaggagctgaagaagaagacctag

SEQ ID NO: 13203 - DNA, 903 bp, synthetic construct
  source 1..903: mol_type = other DNA; note = Synthetic coding sequence
atggccagacccctgagcacccccagcagcagccagatgcaggccagaaagaagcacagaggcatcatcgagaagagaagaagagacagaatcaacagcagcctgagcgagctgagaagactggtgcccaccgccttcgagaagcagggcagcagcaagctggagaaggccgaggtgctgcagatgaccgtggaccacctgaagatgctgcacgccaccggcggcaccggcttcttcgacgccagagccctggccgtggacttcagaagcatcggcttcagagagtgcctgaccgaggtgatcagatacctgggcgtgctggagggccccagcagcagagccgaccccgtgagaatcagactgctgagccacctgaacagctacgccgccgagatggagcccagccccacccccaccggccccctggccttccccgcctggccctggagcttcttccacagctgccccggcctgcccgccctgagcaaccagctggccatcctgggcagagtgcccagccccgtgctgcccggcgtgagcagccccgcctaccccatccccgccctgagaaccgcccccctgagaagagccaccggcatcatcctgcccgccagaagaaacgtgctgcccagcagaggcgccagcagcaccagaagagccagacccctggagagacccgccacccccgtgcccgtggcccccagcagcagagccgccagaagcagccacatcgcccccctgctgcagagcagcagccccaccccccccggccccaccggcagcgccgcctacgtggccgtgcccacccccaacagcagcagccccggccccgccggcagacccgccggcgccatgctgtaccacagctgggtgagcgagatcaccgagatcggcgccttctag

SEQ ID NO: 13204 - DNA, 318 bp, synthetic construct
  source 1..318: mol_type = other DNA; note = Synthetic coding sequence
atgagcgtggtgccccccaacagaagccagaccggctggcccagaggcgtgacccagttcggcaacaagtacatccagcagaccaagcccctgaccctggagagaaccatcaacctgtaccccctgaccaactacaccttcggcaccaaggagcccctgtacgagaaggacagcagcgtggccgccagattccagagaatgagagaggagttcgacaagatcggcatgagaagaaccgtggagggcgtgctgatcgtgcacgagcacagactgccccacgtgctgctgctgagcagattcaacttcatctacaactag

SEQ ID NO: 13205 - DNA, 588 bp, synthetic construct
  source 1..588: mol_type = other DNA; note = Synthetic coding sequence
atgggcaacagcgacagccagtacaccctgcagggcagcaagaaccacagcaacaccatcaccggcgccaagcagatcccctgcagcctgaagatcagaggcatccacgccaaggaggagaagagcctgcacggctggggccacggcagcaacggcgccggctacaagagcagaagcctggccagaagctgcctgagccacttcaagagcaaccagccctacgccagcagactgggcggccccacctgcaaggtgagcagaggcgtggcctacagcacccacagaaccaacgcccccggcaaggacttccagggcatcagcgccgccttcagcaccgagaacggcttccacagcgtgggccacgagctggccgacaaccacatcaccagcagagactgcaacggccacctgctgaactgctacggcagaaacgagagcatcgccagcaccccccccggcgaggacagaaagagccccagagtgctgatcaagaccctgggcaagctggacggctgcctgagagtggagttccacaacggcggcaaccccagcaaggtgcccgccgaggactgcagcgagcccgtgtag

SEQ ID NO: 13206 - DNA, 1581 bp, synthetic construct
  source 1..1581: mol_type = other DNA; note = Synthetic coding sequence
atggtgcccggcgaggagaaccagctggtgcccaaggaggacgtgttctggagatgcagacagaacatcttcgacgagatgaagaagaagttcctgcagatcgagaacgccgccgaggagcccagagtgctgtgcatcatccaggacaccaccaacagcaagaccgtgaacgagagaatcaccctgaacctgcccgccagcacccccgtgagaaagctgttcgaggacgtggccaacaaggtgggctacatcaacggcaccttcgacctggtgtggggcaacggcatcaacaccgccgacatggcccccctggaccacaccagcgacaagagcctgctggacgccaacttcgagcccggcaagaagaacttcctgcacctgaccgacaaggacggcgagcagccccagatcctgctggaggacagcagcgccggcgaggacagcgtgcacgacagattcatcggccccctgcccagagagggcagcggcggcagcaccagcgactacgtgagccagagctacagctacagcagcatcctgaacaagagcgagaccggctacgtgggcctggtgaaccaggccatgacctgctacctgaacagcctgctgcagaccctgttcatgacccccgagttcagaaacgccctgtacaagtgggagttcgaggagagcgaggaggaccccgtgaccagcatcccctaccagctgcagagactgttcgtgctgctgcagaccagcaagaagagagccatcgagaccaccgacgtgaccagaagcttcggctgggacagcagcgaggcctggcagcagcacgacgtgcaggagctgtgcagagtgatgttcgacgccctggagcagaagtggaagcagaccgagcaggccgacctgatcaacgagctgtaccagggcaagctgaaggactacgtgagatgcctggagtgcggctacgagggctggagaatcgacacctacctggacatccccctggtgatcagaccctacggcagcagccaggccttcgccagcgtggaggaggccctgcacgccttcatccagcccgagatcctggacggccccaaccagtacttctgcgagagatgcaagaagaagtgcgacgccagaaagggcctgagattcctgcacttcccctacctgctgaccctgcagctgaagagattcgacttcgactacaccaccatgcacagaatcaagctgaacgacagaatgaccttccccgaggagctggacatgagcaccttcatcgacgtggaggacgagaagagcccccagaccgagagctgcaccgacagcggcgccgagaacgagggcagctgccacagcgaccagatgagcaacgacttcagcaacgacgacggcgtggacgagggcatctgcctggagaccaacagcggcaccgagaagatcagcaagagcggcctggagaagaacagcctgatctacgagctgttcagcgtgatggtgcacagcggcagcgccgccggcggccactactacgcctgcatcaagagcagcgtgatgagcagcggcaccgccagcatgatcaacatgagcgccggctag

SEQ ID NO: 13207 - DNA, 963 bp, synthetic construct
  source 1..963: mol_type = other DNA; note = Synthetic coding sequence
atgggcaaggagcaggagctgctggaggccgccagaaccggccacctgcccgccgtggagaagctgctgagcggcaagagactgagcagcggcttcggcggcggcggcggcggcggcagcggcggcggcggcggcggcagcggcggcggcggcggcggcctgggcagcagcagccaccccctgagcagcctgctgagcatgtggagaggccccaacgtgaactgcgtggacagcaccggctacacccccctgcaccacgccgccctgaacggccacaaggacgtggtggaggtgctgctgagaaacgacgccctgaccaacgtggccgacagcaagggctgctaccccctgcacctggccgcctggaagggcgacgcccagatcgtgagactgctgatccaccagggccccagccacaccagagtgaacgagcagaacaacgacaacgagaccgccctgcactgcgccgcccagtacggccacaccgaggtggtgaaggtgctgctggaggagctgaccgaccccaccatgagaaacaacaagttcgagacccccctggacctggccgccctgtacggcagactggaggtggtgaagatgctgctgaacgcccaccccaacctgctgagctgcaacaccaagaagcacacccccctgcacctggccgccagaaacggccacaaggccgtggtgcaggtgctgctggacgccggcatggacagcaactaccagaccgagatgggcagcgccctgcacgaggccgccctgttcggcaagaccgacgtggtgcagatcctgctggccgccggcaccgacgtgaacatcaaggacaaccacggcctgaccgccctggacaccgtgagagagctgcccagccagaagagccagcagatcgccgccctgatcgaggacctggacaccctgcagttctacttcatcagctgccccttccagggcctgtag

SEQ ID NO: 13208 - DNA, 660 bp, synthetic construct
  source 1..660: mol_type = other DNA; note = Synthetic coding sequence
atggtgatccacaagaacccccccgacacccccaccgagagccagttcaccagattcctgtgcagcagccccctggaggccgagaccccccccaacggccccgactgcggctacggcagcttccaccagcagtactggctggacggcaagatcatcgccgtgggcgtgatcgacatcctgcccaactgcgtgagcagcgtgtacctgtactacgaccccgactacagcttcctgagcctgggcgtgtacagcgccctgagagagatcgccttcaccagacagctgcacgagaagaccagccagctgagctactactacatgggcttctacatccacagctgccccaagatgaagtacaagggccagtacagacccagcgacctgctgtgccccgagacctacgtgtgggtgcccatcgagcagtgcctgcccagcctggagaacagcaagtactgcagattcaaccaggaccccgaggccgtggacgaggacagaagcaccgagcccgacagactgcaggtgttccacaagagagccatcatgccctacggcgtgtacaagaagcagcagaaggaccccagcgaggaggccgccgtgctgcagtacgccagcctggtgggccagaagtgcagcgagagaatgctgctgttcagaaactag

SEQ ID NO: 13209 - DNA, 1791 bp, synthetic construct
  source 1..1791: mol_type = other DNA; note = Synthetic coding sequence
atgcagcagaaggagctgggcaccttcgcccagagcagcatcgccctgcaccaccagtacaaccccaagttccagaccctgttccagccctgcaacctgatgggcgccatgcagctgatcgaggacttcagcacccacgtgagcatcgactgcagcccccacaagaccgtgaagaagaccgccaacgagttcccctgcctgcccaagcaggtggcctggatcctggccaccagcaaggtgttcatgtaccccgagctgctgcccgtgtgcagcctgaaggccaagaacccccaggacaagatcctgttcaccaaggccgaggacaacaagtacctgctgacctgcaagaccgccagacagctgaccgtgagaatcaagaacctgaacatgaacagagcccccgacaacatcatcaagttctacaagaagaccaagcagctgcccgtgctgggcaagtgctgcgaggagatccagccccaccagtggaagccccccatcgagagagaggagcacagactgcccttctggctgaaggccagcctgcccagcatccaggaggagctgagacacatggccgacggcgccagagaggtgggcaacatgaccggcaccaccgagatcaacagcgaccagggcctggagaaggacaacagcgagctgggcagcgagaccagataccccctgctgctgcccaagggcgtggtgctgaagctgaagcccgtggccgacagattccccaagaaggcctggagacagaagagaagcagcgtgctgaagcccctgctgatccagcccagccccagcctgcagcccagcttcaaccccggcaagacccccgcccagagcacccacagcgaggccccccccagcaagatggtgctgagaatcccccaccccatccagcccgccaccgtgctgcagaccgtgcccggcgtgccccccctgggcgtgagcggcggcgagagcttcgagagccccgccgccctgcccgccatgccccccgaggccagaaccagcttccccctgagcgagagccagaccctgctgagcagcgcccccgtgcccaaggtgatgatgcccagccccgccagcagcatgttcagaaagccctacgtgagaagaagacccagcaagagaagaggcgccagagccttcagatgcatcaagcccgcccccgtgatccaccccgccagcgtgatcttcaccgtgcccgccaccaccgtgaagatcgtgagcctgggcggcggctgcaacatgatccagcccgtgaacgccgccgtggcccagagcccccagaccatccccatcgccaccctgctggtgaaccccaccagcttcccctgccccctgaaccagcccctggtggccagcagcgtgagccccctgatcgtgagcggcaacagcgtgaacctgcccatccccagcacccccgaggacaaggcccacatgaacgtggacatcgcctgcgccgtggccgacggcgagaacgccttccagggcctggagcccaagctggagccccaggagctgagccccctgagcgccaccgtgttccccaaggtggagcacagccccggccccccccccgtggacaagcagtgccaggagggcctgagcgagaacagcgcctacagatggaccgtggtgaagaccgaggagggcagacaggccctggagcccctgccccagggcatccaggagagcctgaacaacagcagccccggcgacctggaggaggtggtgaagatggagcccgaggacgccaccgaggagatcagcggcttcctgtag

SEQ ID NO: 13210 - DNA, 912 bp, synthetic construct
  source 1..912: mol_type = other DNA; note = Synthetic coding sequence
atggccgacaagagcaagttcatcgagtacatcgacgaggccctggagaagagcaaggagaccgccctgagccacctgttcttcacctaccagggcatcccctaccccatcaccatgtgcaccagcgagaccttccaggccctggacaccttcgaggccagacacgacgacatcgtgctggccagctaccccaagtgcggcagcaactggatcctgcacatcgtgagcgagctgatctacgccgtgagcaagaagaagtacaagtaccccgagttccccgtgctggagtgcggcgacagcgagaagtaccagagaatgaagggcttccccagccccagaatcctggccacccacctgcactacgacaagctgcccggcagcatcttcgagaacaaggccaagatcctggtgatcttcagaaaccccaaggacaccgccgtgagcttcctgcacttccacaacgacgtgcccgacatccccagctacggcagctgggacgagttcttcagacagttcatgaagggccaggtgagctggggcagatacttcgacttcgccatcaactggaacaagcacctggacggcgacaacgtgaagttcatcctgtacgaggacctgaaggagaacctggccgccggcatcaagcagatcgccgagttcctgggcttcttcctgaccggcgagcagatccagaccatcagcgtgcagagcaccttccaggccatgagagccaagagccaggacacccacggcgccgtgggccccttcctgttcagaaagggcgaggtgggcgactggaagaacctgttcagcgagatccagaaccaggagatggacgagaagttcaaggagtgcctggccggcaccagcctgggcgccaagctgaagtacgagagctactgccagggctag

SEQ ID NO: 13211 - DNA, 366 bp, synthetic construct
  source 1..366: mol_type = other DNA; note = Synthetic coding sequence
atgggcgtgcccgagatccccggcgagaagctggtgaccgagagaaacaagaagagactggagaaggagaagcacgagaagggcgcccagaagaccgactgccagaagaacctgggcaccgtgggcgccgtggccctggactgcaagggcaacgtggcctacgccaccagcaccggcggcatcgtgaacaagatggtgggcagagtgggcgacagcccctgcctgggcagaaccaagggctgcctgctgcccctgcccctgttcagcagaccccaggccttcctgaccctgtacagcctgcccctgagcgtgagctgctgcgtgcccttcctgctgctggtgcagctgcaggacgtgtgggagtag

SEQ ID NO: 13212 - DNA, 579 bp, synthetic construct
  source 1..579: mol_type = other DNA; note = Synthetic coding sequence
atgaccctgggcagcaagagccagcagccccccgaggacatcaaggccctgagctggaacagacaggcccagcacatcctgagcagcgcccaccccagcggcaaggccgtggtgtgggacctgagaaagaacgagcccatcatcaaggtgagcgaccacagcaacagaatgcactgcagcggcctggcctggcaccccgacatcgccacccagctggtgctgtgcagcgaggacgacagactgcccgtgatccagctgtgggacctgagattcgccagcagccccctgaaggtgctggagagccacagcagaggcatcctgagcgtgagctggagccaggccgacgccgagctgctgctgaccagcgccaaggacagccagatcctgtgcagaaacctgggcagcagcgaggtggtgtacaagctgcccacccagagcagctggtgcttcgacgtgcagtggtgccccagagaccccagcgtgttcagcgccgccagcttcaacggctggatcagcctgtacagcgtgatgggcagaagctgggaggtgcagcacatgagacaggccgacaaggtgtag

SEQ ID NO: 13213 - DNA, 621 bp, synthetic construct
  source 1..621: mol_type = other DNA; note = Synthetic coding sequence
atgaaggacgtggacaacctgaagagcatcaaggaggagtgggtgtgcgagaccggcagcgacaaccagcccctgggcaacaaccagcagagcaactgcgagtacttcgtggacagcctgttcgaggaggcccagaaggtgagcagcaagtgcgtgagccccgccgagcagaagaagcaggtggacgtgaacatcaagctgtggaagaacggcttcaccgtgaacgacgacttcagaagctacagcgacggcgccagccagcagttcctgaacagcatcaagaagggcgagctgcccagcgagctgcagggcatcttcgacaaggaggaggtggacgtgaaggtggaggacaagaagaacgagatctgcctgagcaccaagcccgtgttccagcccttcagcggccagggccacagactgggcagagtgagccacatcaaggacttcatcgagaagtaccagggcagccagagaagcccccccttcagcctggccaccgccctgcccgtgctgagactgctggacgagaccctgaccctggaggaggccgacctgcagaacgccgtgatcatccagagactgcagaagaccgccagcttcagagagctgagcgagcactag

SEQ ID NO: 13214 - DNA, 1359 bp, synthetic construct
  source 1..1359: mol_type = other DNA; note = Synthetic coding sequence
atgagaggctgcagctacggcctgtgcagaagaggcctgctgttctgcgtgatcctggacgaccagagcggcaagaagagcgtgaacgacaagaacctgaagaagaccgtggaggacgaggaccaggacagcgaggaggagaaggacaacgacagctacatcaaggagagaagcgacatccccagcggcaccagcaagcacctgcagaagaaggccaagaagcaggccaagaagcaggccaagaaccagagaagacagcagaagatccagggcaaggtgctgcacctgaacgacatctgcaccatcgaccaccccgaggacagcgagtacgaggccgagatgagcctgcagggcgaggtgaacatcaagagcaaccacatcagccaggagggcgtgatgcacaaggagtactgcgtgaaccagaaggacctgaacggccaggccaagatgatcgagagcgtgaccgacaaccagaagagcaccgaggaggtggacatgaagaacatcaacatggacaacgacctggaggtgctgaccagcagccccaccagaaacctgaacggcgcctacctgaccgagggcagcaacggcgaggtggacatcagcaacggcttcaagaacctgaacctgaacgccgccctgcaccccgacgagatcaacatcgagatcctgaacgacagccacacccccggcaccaaggtgtacgaggtggtgaacgaggaccccgagaccgccttctgcaccctggccaacagagaggtgttcaacaccgacgagtgcagcatccagcactgcctgtaccagttcaccagaaacgagaagctgagagacgccaacaagctgctgtgcgaggtgtgcaccagaagacagtgcaacggccccaaggccaacatcaagggcgagagaaagcacgtgtacaccaacgccaagaagcagatgctgatcagcctggccccccccgtgctgaccctgcacctgaagagattccagcaggccggcttcaacctgagaaaggtgaacaagcacatcaagttccccgagatcctggacctggcccccttctgcaccctgaagtgcaagaacgtggccgaggagaacaccagagtgctgtacagcctgtacggcgtggtggagcacagcggcaccatgagaagcggccactacaccgcctacgccaaggccagaaccgccaacagccacctgagcaacctggtgctgcacggcgacatcccccaggacttcgagatggagagcaagggccagtggttccacatcagcgacacccacgtgcaggccgtgcccaccaccaaggtgctgaacagccaggcctacctgctgttctacgagagaatcctgtag

SEQ ID NO: 13215 - DNA, 450 bp, synthetic construct
  source 1..450: mol_type = other DNA; note = Synthetic coding sequence
atggagagaatcgagggcgccagcgtgggcagatgcgccgccagcccctacctgagacccctgaccctgcactacagacagaacggcgcccagaagagctgggacttcatgaagacccacgacagcgtgaccgtgctgctgttcaacagcagcagaagaagcctggtgctggtgaagcagttcagacccgccgtgtacgccggcgaggtggagagaagattccccggcagcctggccgccgtggaccaggacggccccagagagctgcagcccgccctgcccggcagcgccggcgtgaccgtggagctgtgcgccggcctggtggaccagcccggcctgagcctggaggaggtggcctgcaaggaggcctgggaggagtgcggctaccacctggcccccagcgacctgagaagagtggccacctactgggacgccaccatgggcagctag

SEQ ID NO: 13216 - DNA, 489 bp, synthetic construct
  source 1..489: mol_type = other DNA; note = Synthetic coding sequence
atgaacagcaacgccagcgagcacaccggcatgctgagaacctgctggagccacagccactgggaccccttcagcagcggcagcgtgaccgccatgtgggccacccacagccccaccagcaaggcctgggccggcatccagggcagaggcagatgggccctgggcttcccctggagaggccagggcgtgctgcacgtgatcgccagccagaaggccgccgtgaccgaggccgtggacctgagaaccggcgccgccagccaggccatgagcgaggccttcgtgagaagcggcatgttctacctgagacccgccttcgtgctgctgtgctacaagtggggcaagctgagacacagcgaggtgagcaacctgctgggcgtggcctggcccgtgagcgaggaggcctgcatgggcacctggggcagcctggccgtggccgtgaccctgcccgcccagggcctgggcacctggggcagagacgagggcgagtag

SEQ ID NO: 13217 - DNA, 1320 bp, synthetic construct; identical to SEQ ID NO: 11005
  source 1..1320: mol_type = other DNA; note = Synthetic coding sequence

SEQ ID NO: 13218 - DNA, 867 bp, synthetic construct
  source 1..867: mol_type = other DNA; note = Synthetic coding sequence
atggccaagtggggcgagggcgaccccagatggatcgtggaggagagagccgacgccaccaacgtgaacaactggcactggaccgagagagacgccagcaactggagcaccgacaagctgaagaccctgttcctggccgtgcaggtgcagaacgaggagggcaagtgcgaggtgaccgaggtgagcaagctggacggcgaggccagcatcaacaacagaaagggcaagctgatcttcttctacgagtggagcgtgaagctgaactggaccggcaccagcaagagcggcgtgcagtacaagggccacgtggagatccccaacctgagcgacgagaacagcgtggacgaggtggagatcagcgtgagcctggccaaggacgagcccgacaccaacctggtggccctgatgaaggaggagggcgtgaagctgctgagagaggccatgggcatctacatcagcaccctgaagaccgagttcacccagggcatgatcctgcccaccatgaacggcgagagcgtggaccccgtgggccagcccgccctgaagaccgaggagagaaaggccaagcccgcccccagcaagacccaggccagacccgtgggcgtgaagatccccacctgcaagatcaccctgaaggagaccttcctgaccagccccgaggagctgtacagagtgttcaccacccaggagctggtgcaggccttcacccacgcccccgccaccctggaggccgacagaggcggcaagttccacatggtggacggcaacgtgagcggcgagttcaccgacctggtgcccgagaagcacatcgtgatgaagtggagattcaagagctggcccgagggcagccactgccacagcggctag

SEQ ID NO: 13219 - DNA, 1053 bp, synthetic construct
  source 1..1053: mol_type = other DNA; note = Synthetic coding sequence
atgcccagcttcatcagacacggccccaccatccccagaagaaccgacatctgcctgcccgacagcagccccaacgccttcagcaccagcggcgacgtggtgagcagaaaccagagcttcctgagaacccccatccagagaaccccccacgagatcatgagaagagagagcaacagactgagcgcccccagctacctggccagaagcctggccgacgtgcccagagagtacggcagcagccagagcttcgtgaccgaggtgagcttcgccgtggagaacggcgacagcggcagcagatactactacagcgacaacttcttcgacggccagagaaagagacccctgggcgacagagcccacgaggactacagatactacgagtacaaccacgacctgttccagagaatgccccagaaccagggcagacacgccagcggcatcggcagagtggccgccaccagcctgggcaacctgaccaaccacggcagcgaggacctgcccctgccccccggctggagcgtggactggaccatgagaggcagaaagtactacatcgaccacaacaccaacaccacccactggagccaccccctggagagagagggcctgccccccggctgggagagagtggagagcagcgagttcggcacctactacgtggaccacaccaacaagaaggcccagtacagacacccctgcgcccccagcgtgcccagatacgaccagcccccccccgtgacctaccagccccagcagaccgagagaaaccagagcctgctggtgcccgccaacccctaccacaccgccgagatccccgactggctgcaggtgtacgccagagcccccgtgaagtacgaccacatcctgaagtgggagctgttccagctggccgacctggacacctaccagggcatgctgaagctgctgttcatgaaggagctggagcagatcgtgaagatgtacgaggcctacagacaggccctgctgaccgagctggagaacagaaagcagagacagcagtggtacgcccagcagcacggcaagaacttctag

SEQ ID NO: 13220 - DNA, 537 bp, synthetic construct
  source 1..537: mol_type = other DNA; note = Synthetic coding sequence
atgaccttcagagagggccaccagtgggagaagatccccctgagcggcagcaaccaggagatcagaagacagaaggagagaatcaccgagcagcccctgaaggaggaggaggacgaggacagaaagaacaagggccaccaggccgccgagatcgagtggctgggcttcagaaagcccagccaggccgacatgctgcacagcaagcacgacgaggagcagaaggtgtgggacgaggagatcgacgacgacgacgacgacaactgcaacaacgacgaggacgaggtgagagtgatcgagttcaagaagaagcacgaggaggtgagccagttcaaggaggagggcgacgccagcgaggacagccccctgagcagcgccagcagccaggccgtgacccccgacgagcagcccaccctgggcaagaagagcgacatcagcagaaacgcctacagcagatacaacaccatcagctacagaaagatcagaaagggcaacaccaagcagagaatcgacgagttcgagagcatgatgcacctgtag

SEQ ID NO: 13221 - DNA, 312 bp, synthetic construct
  source 1..312: mol_type = other DNA; note = Synthetic coding sequence
atggccgccttcaagctggacttcctgcccgagatgatggtggaccactgcagcctgaacagcagccccgtgagcaagaagatgaacggcaccctggaccaccccgaccagcccgacctggacgccatcaagatgttcgtgggccaggtgcccagaacctggagcgagaaggacctgagagagctgttcgagcagtacggcgccgtgtacgagatcaacgtgctgagagacagaagccagaaccccccccagagcaagggctgctgcttcgtgaccttctacaccagaaaggccgccctggaggcccagtag

SEQ ID NO: 13222 - DNA, 1917 bp, synthetic construct
  source 1..1917: mol_type = other DNA; note = Synthetic coding sequence
atgccccccatcaacctgcaggagaagcaggtgatctgcctgagcggcgacgacagcagcacctgcatcggcatcctggccaaggaggtggagatcgtggccagcagcgacagcagcatcagcagcaaggccagaggcagcaacaaggtgaagatccagcccgtggccaagtacgactgggagcagaagtactactacggcaacctgatcgccgtgagcaacagcttcctggcctacgccatcagagccgccaacaacggcagcgccatggtgagagtgatcagcgtgagcaccagcgagagaaccctgctgaagggcttcaccggcagcgtggccgacctggccttcgcccacctgaacagcccccagctggcctgcctggacgaggccggcaacctgttcgtgtggagactggccctggtgaacggcaagatccaggaggagatcctggtgcacatcagacagcccgagggcacccccctgaaccacttcagaagaatcatctggtgccccttcatccccgaggagagcgaggactgctgcgaggagagcagccccaccgtggccctgctgcacgaggacagagccgaggtgtgggacctggacatgctgagaagcagccacagcacctggcccgtggacgtgagccagatcaagcagggcttcatcgtggtgaagggccacagcacctgcctgagcgagggcgccctgagccccgacggcaccgtgctggccaccgccagccacgacggctacgtgaagttctggcagatctacatcgagggccaggacgagcccagatgcctgcacgagtggaagccccacgacggcagacccctgagctgcctgctgttctgcgacaaccacaagaagcaggaccccgacgtgcccttctggagattcctgatcaccggcgccgaccagaacagagagctgaagatgtggtgcaccgtgagctggacctgcctgcagaccatcagattcagccccgacatcttcagcagcgtgagcgtgccccccagcctgaaggtgtgcctggacctgagcgccgagtacctgatcctgagcgacgtgcagagaaaggtgctgtacgtgatggagctgctgcagaaccaggaggagggccacgcctgcttcagcagcatcagcgagttcctgctgacccaccccgtgctgagcttcggcatccaggtggtgagcagatgcagactgagacacaccgaggtgctgcccgccgaggaggagaacgacagcctgggcgccgacggcacccacggcgccggcgccatggagagcgccgccggcgtgctgatcaagctgttctgcgtgcacaccaaggccctgcaggacgtgcagatcagattccagccccagctgaaccccgacgtggtggcccccctgcccacccacaccgcccacgaggacttcaccttcggcgagagcagacccgagctgggcagcgagggcctgggcagcgccgcccacggcagccagcccgacctgagaagaatcgtggagctgcccgcccccgccgacttcctgagcctgagcagcgagaccaagcccaagctgatgacccccgacgccttcatgacccccagcgccagcctgcagcagatcaccgccagccccagcagcagcagcagcggcagcagcagcagcagcagcagcagcagcagcagcctgaccgccgtgagcgccatgagcagcaccagcgccgtggaccccagcctgaccagaccccccgaggagctgaccctgagccccaagctgcagctggacggcagcctgaccatgagcagcagcggcagcctgcaggccagccccagaggcctgctgcccggcctgctgcccgcccccgccgacaagctgacccccaagggccccggccaggtgtgcgactgggtgtgcgtgtag

SEQ ID NO: 13223 - DNA, 495 bp, synthetic construct
  source 1..495: mol_type = other DNA; note = Synthetic coding sequence
atgagaatcctgatcctgggcctggacggcgccggcaagaccaccatcctgtacagactgcaggtgggcgaggtggtgaccaccatccccaccatcggcttcaacgtggagaccgtgacctacaagaacctgaagttccaggtgtgggacctgggcggccagaccagcatcagaccctactggagatgctactacagcaacaccgacgccgtgatctacgtggtggacagctgcgacagagacagaatcggcatcagcaagagcgagctggtggccatgctggaggaggaggagctgagaaaggccatcctggtggtgttcgccaacaagcaggacatggagcaggccatgaccagcagcgagatggccaacagcctgggcctgcccgccctgaaggacagaaagtggcagatcttcaagaccagcgccaccaagggcaccggcctggacgaggccatggagtggctggtggagaccctgaagagcagacagtag

SEQ ID NO: 13224 - DNA, 1944 bp, synthetic construct
  source 1..1944: mol_type = other DNA; note = Synthetic coding sequence
atggcccagggcagcgtgagcttcaacgacgtgaccgtggacttcacccaggaggagtggcagcacctggaccacgcccagaagaccctgtacatggacgtgatgctggagaactactgccacctgatcagcgtgggctgccacatgaccaagcccgacgtgatcctgaagctggagagaggcgaggagccctggaccagcttcgccggccacacctgcctggaggagaactggaaggccgaggacttcctggtgaagttcaaggagcaccaggagaagtacagcagaagcgtggtgagcatcaaccacaagaagctggtgaaggagaagagcaagatctacgagaagaccttcaccctgggcaagaaccccgtgaacagcaagaacctgccccccgagtacgacacccacggcagaatcctgaagaacgtgagcgagctgatcatcagcaacctgaaccccgccagaaagagactgagcgagtacaacggctacggcaagagcctgctgagcaccaagcaggagaccacccaccccgaggtgaagagccacaaccagagcgccagagccttcagccacaacgaggtgctgatgcagtaccagaagaccgagacccccgcccagagcttcggctacaacgactgcgagaagagcttcctgcagagaggcggcctgatcacccacagcagaccctacaagggcgagaaccccagcgtgtacaacaagaagagaagagccaccaacatcgagaagaagcacacctgcaacgagtgcggcaagagcttctgcagaaagagcgtgctgatcctgcaccagggcatccacagcgaggagaagccctaccagtgccaccagtgcggcaacgccttcagaagaaagagctacctgatcgaccaccagagaacccacaccggcgagaagcccttcgtgtgcaacgagtgcggcaagagcttcagactgaagaccgccctgaccgaccaccagagaacccacaccggcgagaagagctacgagtgcctgcagtgcagaaacgccttcagactgaagagccacctgatcagacaccagagaacccacaccggcgagaagccctacgagtgcaacgactgcggcaagagcttcagacagaagaccaccctgagcctgcaccagagaatccacaccggcgagaagccctacatctgcaaggagtgcggcaagagcttccaccagaaggccaacctgaccgtgcaccagagaacccacaccggcgagaagccctacatctgcaacgagtgcggcaagagcttcagccagaagaccaccctggccctgcacgagaagacccacaacgaggagaagccctacatctgcagcgagtgcggcaagagcttcagacagaagaccaccctggtggcccaccagagaacccacaccggcgagaagagctacgagtgcccccactgcggcaaggccttcagaatgaagagctacctgatcgaccaccacagaacccacaccggcgagaagccctacgagtgcaacgagtgcggcaagagcttcagccagaagaccaacctgaacctgcaccagagaatccacaccggcgagaagccctacgtgtgcaacgagtgcggcaagagcttcagacagaaggccaccctgaccgtgcaccagaagatccacaccggccagaagagctacgagtgcccccagtgcggcaaggccttcagcagaaagagctacctgatccaccaccagagaacccacaccggcgagaagccctacaagtgcagcgagtgcggcaagtgcttcagacagaagaccaacctgatcgtgcaccagagaacccacaccggcgagaagccctacgtgtgcaacgagtgcggcaagagcttcagctacaagagaaacctgatcgtgcaccagagaacccacaagggcgagaacatcgagatgcagtag

SEQ ID NO: 13225 - DNA, 3570 bp, synthetic construct
  source 1..3570: mol_type = other DNA; note = Synthetic coding sequence
atgaagctggagtgcatccccgcccccatcacccccagcaccgtgcccagcttcccccccaccccccccaccccccccgccagccccccccacacccccgtgatcgtgcccgccgccgccaccaccgtgagcagccccagcgccgccatcaccgtgcagagagtgctggaggaggacgagagcatcagaacctgcctgagcgaggacgccaaggagatccagaacaagatcgaggtggaggccgacggccagaccgaggagatcctggacagccagaacctgaacagcagaagaagccccgtgcccgcccagatcgccatcaccgtgcccaagacctggaagaagcccaaggacagaaccagaaccaccgaggagatgctggaggccgagctggagctgaaggccgaggaggagctgagcatcgacaaggtgctggagagcgagcaggacaagatgagccagggcttccaccccgagagagaccccagcgacctgaagaaggtgaaggccgtggaggagaacggcgaggaggccgagcccgtgagaaacggcgccgagagcgtgagcgagggcgagggcatcgacgccaacagcggcagcaccgacagcagcggcgacggcgtgaccttccccttcaagcccgagagctggaagcccaccgacaccgagggcaagaagcagtacgacagagagttcctgctggacttccagttcatgcccgcctgcatccagaagcccgagggcctgccccccatcagcgacgtggtgctggacaagatcaaccagcccaagctgcccatgagaaccctggaccccagaatcctgcccagaggccccgacttcacccccgccttcgccgacttcggcagacagacccccggcggcagaggcgtgcccctgctgaacgtgggcagcagaagaagccagcccggccagagaagagagcccagaaagatcatcaccgtgagcgtgaaggaggacgtgcacctgaagaaggccgagaacgcctggaagcccagccagaagagagacagccaggccgacgaccccgagaacatcaagacccaggagctgttcagaaaggtgagaagcatcctgaacaagctgaccccccagatgttcaaccagctgatgaagcaggtgagcggcctgaccgtggacaccgaggagagactgaagggcgtgatcgacctggtgttcgagaaggccatcgacgagcccagcttcagcgtggcctacgccaacatgtgcagatgcctggtgaccctgaaggtgcccatggccgacaagcccggcaacaccgtgaacttcagaaagctgctgctgaacagatgccagaaggagttcgagaaggacaaggccgacgacgacgtgttcgagaagaagcagaaggagctggaggccgccagcgcccccgaggagagaaccagactgcacgacgagctggaggaggccaaggacaaggccagaagaagaagcatcggcaacatcaagttcatcggcgagctgttcaagctgaagatgctgaccgaggccatcatgcacgactgcgtggtgaagctgctgaagaaccacgacgaggagagcctggagtgcctgtgcagactgctgaccaccatcggcaaggacctggacttcgagaaggccaagcccagaatggaccagtacttcaaccagatggagaagatcgtgaaggagagaaagaccagcagcagaatcagattcatgctgcaggacgtgatcgacctgagactgtgcaactgggtgagcagaagagccgaccagggccccaagaccatcgagcagatccacaaggaggccaagatcgaggagcaggaggagcagagaaaggtgcagcagctgatgaccaaggagaagagaagacccggcgtgcagagagtggacgagggcggctggaacaccgtgcagggcgccaagaacagcagagtgctggaccccagcaagttcctgaagatcaccaagcccaccatcgacgagaagatccagctggtgcccaaggcccagctgggcagctggggcaagggcagcagcggcggcgccaaggccagcgagaccgacgccctgagaagcagcgccagcagcctgaacagattcagcgccctgcagccccccgcccccagcggcagcacccccagcacccccgtggagttcgacagcagaagaaccctgaccagcagaggcagcatgggcagagagaagaacgacaagcccctgcccagcgccaccgccagacccaacaccttcatgagaggcggcagcagcaaggacctgctggacaaccagagccaggaggagcagagaagagagatgctggagaccgtgaagcagctgaccggcggcgtggacgtggagagaaacagcaccgaggccgagagaaacaagaccagagagagcgccaagcccgagatcagcgccatgagcgcccacgacaaggccgccctgagcgaggaggagctggagagaaagagcaagagcatcatcgacgagttcctgcacatcaacgacttcaaggaggccatgcagtgcgtggaggagctgaacgcccagggcctgctgcacgtgttcgtgagagtgggcgtggagagcaccctggagagaagccagatcaccagagaccacatgggccagctgctgtaccagctggtgcagagcgagaagctgagcaagcaggacttcttcaagggcttcagcgagaccctggagctggccgacgacatggccatcgacatcccccacatctggctgtacctggccgagctggtgacccccatgctgaaggagggcggcatcagcatgagagagctgaccatcgagttcagcaagcccctgctgcccgtgggcagagccggcgtgctgctgagcgagatcctgcacctgctgtgcaagcagatgagccacaagaaggtgggcgccctgtggagagaggccgacctgagctggaaggacttcctgcccgagggcgaggacgtgcacaacttcctgctggagcagaagctggacttcatcgagagcgacagcccctgcagcagcgaggccctgagcaagaaggagctgagcgccgaggagctgtacaagagactggagaagctgatcatcgaggacaaggccaacgacgagcagatcttcgactgggtggaggccaacctggacgagatccagatgagcagccccaccttcctgagagccctgatgaccgccgtgtgcaaggccgccatcatcgccgacagcagcaccttcagagtggacaccgccgtgatcaagcagagagtgcccatcctgctgaagtacctggacagcgacaccgagaaggagctgcaggccctgtacgccctgcaggccagcatcgtgaagctggaccagcccgccaacctgctgagaatgttcttcgactgcctgtacgacgaggaggtgatcagcgaggacgccttctacaagtgggagagcagcaaggaccccgccgagcagaacggcaagggcgtggccctgaagagcgtgaccgccttcttcacctggctgagagaggccgaggaggagagcgaggacaactag

SEQ ID NO: 13226 - DNA, 591 bp, synthetic construct
  source 1..591: mol_type = other DNA; note = Synthetic coding sequence
atgtggagcgtgctgcaggacggccccatcagcagagtgatcgtgttcagcctgagcgccgccaaggagaccaaggacagacccctgcaggacgagtacagcgtgctggtggccagcatgctggagcccgccgtggtgtacagagacctgctgaacagaggcctggaggaccagctgctgctgcccggcagcgaccagttcgacagcgtgctgtgcagcctggtgaccgacgtggacctggacggcagacccgaggtgctggtggccacctacggccaggagctgctgtgctacaagtacagaggccccgagagcggcctgcccgaggcccagcacggcttccacctgctgtggcagagaagcttcagcagccccctgctggccatggcccacgtggacctgaccggcgacggcctgcaggagctggccgtggtgagcctgaagggcgtgcacatcctgcagcacagcctgatccaggccagcgagctggtgctgaccagactgagacaccaggtggagcagagaagaagaagactgcagggcctggaggacggcgccggcgccggccccgccgagaacgccgccagctag

SEQ ID NO: 13227 - DNA, 1056 bp, synthetic construct
  source 1..1056: mol_type = other DNA; note = Synthetic coding sequence
atggtgagccacaccttccacatgagaaccgaggagagcgacgccagccaggagggcgacgacctgcccaagagcagcgccaacaccagccaccccaagcaggacgacagccccaagagcagcgaggagaccatccagcccaaggagggcgacatccccaaggcccccgaggagaccatccagagcaagaaggaggacctgcccaagagcagcgagaaggccatccagcccaaggagagcaacatccccaagagcagcgccaagcccatccagcccaagctgggcaacatccccaagaccagcgtgaagcccagccagcccaaggagagcgacatccccaagagccccgaggaggccatccagcccaaggagggcgacatccccaagagcctggaggaggccatccagcccaaggagggcgacatccccaagagccccgaggagaccatccagcccaagaagggcgacatccccaagagccccgaggaggccatccagcccaaggagggcgacatccccaagagccccaagcaggccatccagcccaaggagggcgacatccccaagagcctggaggaggccatcccccccaaggagatcgacatccccaagagccccgaggagaccatccagcccaaggaggacgacagccccaagagcctggaggaggccacccccagcaaggagggcgacatcctgaagcccgaggaggagaccatggagttccccgagggcgacaaggtgaaggtgatcctgagcaaggaggacttcgaggccagcctgaaggaggccggcgagagactggtggccgtggacttcagcgccacctggtgcggcccctgcagaaccatcagacccttcttccacgccctgagcgtgaagcacgaggacgtggtgttcctggaggtggacgccgacaactgcgaggaggtggtgagagagtgcgccatcatgtgcgtgcccaccttccagttctacaagaaggaggagaaggtggacgagctgtgcggcgccctgaaggagaagctggaggccgtgatcgccgagctgaagtag

SEQ ID NO: 13228 - DNA, 1473 bp, synthetic construct
  source 1..1473: mol_type = other DNA; note = Synthetic coding sequence
atgcccgacggcaagatccagaagctgatcatcaccgaggagaccgccaagatcagacccttcgccgtggccgccgtgctgagaaacatcaagttcaccaaggacagatacgacagcttcatcgagctgcaggagaagctgcaccagaacatctgcagaaagagagccctggtggccatcggcacccacgacctggacaccctgagcggccccttcacctacaccgccaagagacccagcgacatcaagttcaagcccctgaacaagaccaaggagtacaccgcctgcgagctgatgaacatctacaagaccgacaaccacctgaagcactacctgcacatcatcgagaacaagcccctgtaccccgtgatctacgacagcaacggcgtggtgctgagcatgccccccatcatcaacggcgaccacagcagaatcaccgtgaacaccagaaacatcttcatcgagtgcaccggcaccgacttcaccaaggccaagatcgtgctggacatcatcgtgaccatgttcagcgagtactgcgagaaccagttcaccgtggaggccgccgaggtggtgttccccaacggcaagagccacaccttccccgagctggcctacagaaaggagatggtgagagccgacctgatcaacaagaaggtgggcatcagagagacccccgagaacctggccaagctgctgaccagaatgtacctgaagagcgaggtgatcggcgacggcaaccagatcgagatcgagatcccccccaccagagccgacatcatccacgcctgcgacatcgtggaggacgccgccatcgcctacggctacaacaacatccagatgaccctgcccaagacctacaccatcgccaaccagttccccctgaacaagctgaccgagctgctgagacacgacatggccgccgccggcttcaccgaggccctgaccttcgccctgtgcagccaggaggacatcgccgacaagctgggcgtggacatcagcgccaccaaggccgtgcacatcagcaaccccaagaccgccgagttccaggtggccagaaccaccctgctgcccggcctgctgaagaccatcgccgccaacagaaagatgcccctgcccctgaagctgttcgagatcagcgacatcgtgatcaaggacagcaacaccgacgtgggcgccaagaactacagacacctgtgcgccgtgtactacaacaagaaccccggcttcgagatcatccacggcctgctggacagaatcatgcagctgctggacgtgccccccggcgaggacaagggcggctacgtgatcaaggccagcgagggccccgccttcttccccggcagatgcgccgagatcttcgccagaggccagagcgtgggcaagctgggcgtgctgcaccccgacgtgatcaccaagttcgagctgaccatgccctgcagcagcctggagatcaacgtgggccccttcctgtag

SEQ ID NO: 13229 - DNA, 1458 bp, synthetic construct; identical to SEQ ID NO: 11305
  source 1..1458: mol_type = other DNA; note = Synthetic coding sequence

SEQ ID NO: 13230 - DNA, 204 bp, synthetic construct
  source 1..204: mol_type = other DNA; note = Synthetic coding sequence
atggccctgctggccgagcacctgctgaagcccctgcccgccgacaagcagatcgagaccggccccttcctggaggccgtgagccacctgccccccttcttcgactgcctgggcagccccgtgttcacccccatcaaggccgacatcagcggcaacatcaccatgagaaagctgagactgagaggcgtggagggcctggcctag

SEQ ID NO: 13231 - DNA, 816 bp, synthetic construct
  source 1..816: mol_type = other DNA; note = Synthetic coding sequence
atctgcgagagaatcagaagcaccgtggacgagaaggagcagaagcagctgctgatggacctggacgtggtgatgagaagcagcgactgcccctacatcgtgcagttctacggcgccctgttcagagagggcgactgctggatctgcatggagctgatgagcaccagcttcgacaagttctacaagtacgtgtacagcgtgctggacgacgtgatccccgaggagatcctgggcaagatcaccctggccaccgtgaaggccctgaaccacctgaaggagaacctgaagatcatccacagagacatcaagcccagcaacatcctgctggacagaagcggcaacatcaagctgtgcgacttcggcatcagcggccagctggtggacagcatcgccaagaccagagacgccggctgcagaccctacatggcccccgagagaatcgaccccagcgccagcagacagggctacgacgtgagaagcgacgtgtggagcctgggcatcaccctgtacgagctggccaccggcagattcccctaccccaagtggaacagcgtgttcgaccagctgacccaggtggtgaagggcgaccccccccagctgagcaacagcgaggagagagagttcagccccagcttcatcaacttcgtgaacctgtgcctgaccaaggacgagagcaagagacccaagtacaaggagctgctgaagcaccccttcatcctgatgtacgaggagagagccgtggaggtggcctgctacgtgtgcaagatcctggaccagatgcccgccacccccagcagccccatgtacgtggactag

SEQ ID NO: 13232 - DNA, 291 bp, synthetic construct
  source 1..291: mol_type = other DNA; note = Synthetic coding sequence
atgagcgagaaggtggactggctgcagagccagaacggcgtgtgcaaggtggacgtgtacagccccggcgacaaccaggcccaggactggaagatggacaccagcaccgaccccgtgagagtgctgagctggctgagaagagacctggagaagagcaccgccgagttccaggacgtgagattcaagcccggcgagagcttcggcggcgagaccagcaacagcggcgacccccacaagggcttcagcgtggactactacaacaccaccaccaagggcacccccgagagatag

SEQ ID NO: 13233 - DNA, 792 bp, synthetic construct; identical to SEQ ID NO: 9911
  source 1..792: mol_type = other DNA; note = Synthetic coding sequence

SEQ ID NO: 13234 - DNA, 867 bp, synthetic construct; identical to SEQ ID NO: 9909
  source 1..867: mol_type = other DNA; note = Synthetic coding sequence

SEQ ID NO: 13235 - DNA, 549 bp, synthetic construct; identical to SEQ ID NO: 11366
  source 1..549: mol_type = other DNA; note = Synthetic coding sequence

SEQ ID NO: 13236 - DNA, 999 bp, synthetic construct
  source 1..999: mol_type = other DNA; note = Synthetic coding sequence
atggaccagcccgccggcctgcaggtggactacgtgttcagaggcgtggagcacgccgtgagagtgatggtgagcggccaggtgctggagctggaggtggaggacagaatgaccgccgaccagtggagaggcgagttcgacgccggcttcatcgaggacctgacccacaagaccggcaacttcaagcagttcaacatcttctgccacatgctggagagcgccctgacccagagcagcgagagcgtgaccctggacctgctgacctacaccgacctggagagcctgagaaacagaaagatgggcggcagacccggcagcctggcccccagaagcgcccagctgaacagcaagagatacctgatcctgatctacagcgtggagttcgacagaatccactaccccctgcccctgccctaccagggcaagcccgaccccgtggtgctgcagggcatcatcagaagcctgaaggaggagctgggcagactgcagggcctggacggccagaacaccagagacaccagagagaacgagatctggcacctgagagagcagcagcagcagagaaacagactgggcagcggcggcagcggcgacggccccagcgtgagctggagcagacagacccagccccccgccgccctgaccggcagaggcgacgcccccaacagaagcagaaacagaagcagcagcgtggacagcttcagaagcagatgcagcagcgccagcagctgcagcgacctggaggacttcagcgagagcctgagcagaggcggccacagaagaagaggcaagccccccagccccaccccctggagcggcagcaacatgaagagcccccccgtggagagaagccaccaccagaagagcctggccaacagcggcggctgggtgcccatcaaggagtacagcagcgagcaccaggccgccgacatggccgagatcgacgccagactgaaggccctgcaggagtacatgaacagactggacatgagaagctag

SEQ ID NO: 13237 - DNA, 516 bp, synthetic construct
  source 1..516: mol_type = other DNA; note = Synthetic coding sequence
atgagcagcaagagaaccaagaccaagaccaagaagagaccccagagagccaccagcaacgtgttcgccatgttcgaccagagccagatccaggagttcaaggaggccttcaacatgatcgaccagaacagagacggcttcatcgacaaggaggacctgcacgacatgctggccagcctgggcaagaaccccaccgacgagtacctggacgccatgatgaacgaggcccccggccccatcaacttcaccatgttcctgaccatgttcggcgagaagctgaacggcaccgaccccgaggacgtgatcagaaacgccttcgcctgcttcgacgaggaggccaccggcaccatccaggaggactacctgagagagctgctgaccaccatgggcgacagattcaccgacgaggaggtggacgagctgtacagagaggcccccatcgacaagaagggcaacttcaactacatcgagttcaccagaatcctgaagcacggcgccaaggacaaggacgactag

SEQ ID NO: 13238 - DNA, 2391 bp, synthetic construct
  source 1..2391: mol_type = other DNA; note = Synthetic coding sequence
atgagcctggacgacaacctgagcggcaccagcggcatggaggtggacgacagagtgagcgccctggagcagagactgcagctgcaggaggacgagctggccgtgctgaaggccgccctggccgacgccctgagaagactgagagcctgcgaggagcagggcgccgccctgagagccagaggcacccccaagggcagagccccccccagactgggcaccaccgccagcgtgtgccagctgctgaagggcctgcccaccagaacccccctgaacggcagcggcccccccagaagagtgggcggctacgccaccagccccagcagccccaagaaggaggccaccagcggcagaagcagcgtgagaagatacctgagccccgagagactggccagcgtgagaagagaggaccccagaagcagaaccaccagcagcagcagcaactgcagcgccaagaaggagggcaagaccaaggaggtgatcttcagcgtggaggacggcagcgtgaagatgttcctgagaggcagacccgtgcccatgatgatccccgacgagctggcccccacctacagcctggacaccagaagcgagctgcccagctgcagactgaagctggagtgggtgtacggctacagaggcagagactgcagagccaacctgtacctgctgcccaccggcgagatcgtgtacttcgtggccagcgtggccgtgctgtacagcgtggaggagcagagacagagacactacctgggccacaacgacgacatcaagtgcctggccatccaccccgacatggtgaccatcgccaccggccaggtggccggcaccaccaaggagggcaagcccctgcccccccacgtgagaatctgggacagcgtgagcctgagcaccctgcacgtgctgggcctgggcgtgttcgacagagccgtgtgctgcgtgggcttcagcaagagcaacggcggcaacctgctgtgcgccgtggacgagagcaacgaccacatgctgagcgtgtgggactgggccaaggagaccaaggtggtggacgtgaagtgcagcaacgaggccgtgctggtggccaccttccaccccaccgaccccaccgtgctgatcacctgcggcaagagccacatctacttctggaccctggagggcggcagcctgagcaagagacagggcctgttcgagaagcacgagaagcccaagtacgtgctgtgcgtgaccttcctggagggcggcgacgtggtgaccggcgacagcggcggcaacctgtacgtgtggggcaagggcggcaacagaatcacccaggccgtgctgggcgcccacgacggcggcgtgttcggcctgtgcgccctgagagacggcaccctggtgagcggcggcggcagagacagaagagtggtgctgtggggcagcgactacagcaagctgcaggaggtggaggtgcccgaggacttcggccccgtgagaaccgtggccgagggccacggcgacaccctgtacgtgggcaccaccagaaacagcatcctgcagggcagcgtgcacaccggcttcagcctgctggtgcagggccacgtggaggagctgtggggcctggccacccaccccagcagagcccagttcgtgacctgcggccaggacaagctggtgcacctgtggagcagcgacagccaccagcccctgtggagcagaatcatcgaggaccccgccagaagcgccggcttccaccccagcggcagcgtgctggccgtgggcaccgtgaccggcagatggctgctgctggacaccgagacccacgacctggtggccatccacaccgacggcaacgagcagatcagcgtggtgagcttcagccccgacggcgcctacctggccgtgggcagccacgacaacctggtgtacgtgtacaccgtggaccagggcggcagaaaggtgagcagactgggcaagtgcagcggccacagcagcttcatcacccacctggactgggcccaggacagcagctgcttcgtgaccaacagcggcgactacgagatcctgtactgggaccccgccacctgcaagcagatcaccagcgccgacgccgtgagaaacatggagtgggccaccgccacctgcgtgctgggcttcggcgtgttcggcatctggagcgagggcgccgacggcaccgacatcaacgccgtggccagaagccacgacggcaagctgctggccagcgccgacgacttcggcaaggtgcacctgttcagctacccctgctgccagcccagagccctgagccacaagtacggcggccacagcagccacgtgaccaacgtggccttcctgtgggacgacagcatggccctgaccaccggcggcaaggacaccagcgtgctgcagtggagagtggtgtag

SEQ ID NO: 13239 - DNA, 1059 bp, synthetic construct
  source 1..1059: mol_type = other DNA; note = Synthetic coding sequence
atggccctgctgggccaggccctgaagtggcagcagcaccagggcctgctgccccccggcatgaccatcgacctgttcagaggcaaggccgccgtgaaggacgtggaggaggagaagttccccacccagctgagcagacacatcaagttcggccagaagagccacgtggagtgcgccagattcagccccgacggccagtacctggtgaccggcagcgtggacggcttcatcgaggtgtggaacttcaccaccggcaagatcagaaaggacctgaagtaccaggcccaggacaacttcatgatgatggacgacgccgtgctgtgcatgtgcttcagcagagacaccgagatgctggccaccggcgcccaggacggcaagatcaaggtgtggaagatccagagcggccagtgcctgagaagattcgagagagcccacagcaagggcgtgacctgcctgagcttcagcaaggacagcagccagatcctgagcgccagcttcgaccagaccatcagaatccacggcctgaagagcggcaagaccctgaaggagttcagaggccacagcagcttcgtgaacgaggccaccttcacccaggacggccactacatcatcagcgccagcagcgacggcaccgtgaagatctggaacatgaagaccaccgagtgcagcaacaccttcaagagcctgggcagcaccgccggcaccgacatcaccgtgaacagcgtgatcctgctgcccaagaaccccgagcacttcgtggtgtgcaacagaagcaacaccgtggtgatcatgaacatgcagggccagatcgtgagaagcttcagcagcggcaagagagagggcggcgacttcgtgtgctgcgccctgagccccagaggcgagtggatctactgcgtgggcgaggacttcgtgctgtactgcttcagcaccgtgaccggcaagctggagagaaccctgaccgtgcacgagaaggacgtgatcggcatcgcccaccacccccaccagaacctgatcgccacctacagcgaggacggcctgctgaagctgtggaagccctag

SEQ ID NO: 13240 - DNA, 951 bp, synthetic construct
  source 1..951: mol_type = other DNA; note = Synthetic coding sequence
atgcagagctgggtgctgatcagcaaggagctgatcagcctgctgcacctgagcctgctgcacctggaggaggacaagaccaccgtgagccaggagagcagaagagccgagaccctggtgtgctgctgcttcgacctgctgaagaagctgagagccaagctgcagagcctgaaggccgagagagaggaggccagacacagagaggagatggccctgagaggcaaggacgccgccgagatcgtgctggaggccttctgcgcccacgccagccagagaatcagccagctggagcaggacctggccagcatgagagagttcagaggcctgctgaaggacgcccagacccagctggtgggcctgcacgccaagcaggaggagctggtgcagcagaccgtgagcctgaccagcaccctgcagcaggactggagaagcatgcagctggactacaccacctggaccgccctgctgagcagaagcagacagctgaccgagaagctgaccgtgaagagccagcaggccctgcaggagagagacgtggccatcgaggagaagcaggaggtgagcagagtgctggagcaggtgagcgcccagctggaggagtgcaagggccagaccgagcagctggagctggagaacagcagactggccaccgacctgagagcccagctgcagatcctggccaacatggacagccagctgaaggagctgcagagccagcacacccactgcgcccaggacctggccatgaaggacgagctgctgtgccagctgacccagagcaacgaggagcaggccgcccagtggcagaaggaggagatggccctgaagcacatgcaggccgagctgcagcagcagcaggccgtgctggccaaggaggtgagagacctgaaggagaccctggagttcgccgaccaggagaaccaggtggcccacctggagctggcctggtag

SEQ ID NO: 13241 - DNA, 597 bp, synthetic construct; identical to SEQ ID NO: 10225
  source 1..597: mol_type = other DNA; note = Synthetic coding sequence

SEQ ID NO: 13242 - DNA, 591 bp, synthetic construct
  source 1..591: mol_type = other DNA; note = Synthetic coding sequence
atggtgcccagaccctggagcggcagccccggccccggcgagtgcctgcacagcctgctgagcgagagactgtggatctgcagagacatcagcgcccagagaagaagcgcccccggcagccccagacccagcgactgccagcagctgagcttcctgcccggcaaccagcccaccttcctgtgcctgcaggccctggccgccctggtgcccggcgtgacccaggtggacaacaagagcggcttcctgcagaagagaccccacagacagcaccccggcatcctgaagctgccccacgtgagactgccccaggccctggccaacggcgcccagctgctgctgctgggcagcgccggccccaccatggagaaccaggtgcagaccctgaccagctacctgtggagcagacacctgcccgtggagcccgaggagctgcagagaagagccagacacctggagaagaagttcctggagaaccccggccccgacttccagagcctgttcagcccccagacctacctgagacagagaagaaacttcgtggagcagtgctacacccactacgtgaagctgcccaccatcggcaagaactag

SEQ ID NO: 13243 - DNA, 1131 bp, synthetic construct
  source 1..1131: mol_type = other DNA; note = Synthetic coding sequence
atgcccgacgtggtgcagaccagacagcaggcctacagagacaagctggcccagcagcaggccgccgccgccgccgccgccgccgccgccgccagccagcagggcagcgccaagaacggcgagaacaccgccaacggcgaggagaacggcgcccacaccatcgccagaatctggaacctgagcgagaacagcaccagcggcagcacccagctggtgctgagacactgcatcagagagggcggccaggacgtgcccagcaacaaggacgtgaccagcctggactggaacagcgagggcaccctgctggccaccggcagctacgacggcttcgccagaatctggaccaaggacggcaacctggccagcaccctgggccagcacaagggccccatcttcgccctgaagtggaacaagaagggcaacttcatcctgagcgccggcgtggacaagaccaccatcatctgggacgcccacaccggcgaggccaagcagcagttccccttccacagcgcccccgccctggacgtggactggcagagcaacaacaccttcgccagctgcagcaccgacatgtgcatccacgtgtgcaagctgggccaggacagacccatcaagaccttccagggccacaccaacgaggtgaacgccatcaagtgggaccccaccggcaacctgctggccagctgcagcgacgacatgaccctgaagatctggagcatgaagcaggacaactgcgtgcacgacctgcaggcccacaacaaggagatctacaccatcaagtggagccccaccggccccggcaccaacaaccccaacgccaacctgatgctggccagcgccagcttcgacagcaccgtgagactgtgggacgtggacagaggcatctgcatccacaccctgaccaagcaccaggagcccgtgtacagcgtggccttcagccccgacggcagatacctggccagcggcagcttcgacaagtgcgtgcacatctggaacacccagaccggcgccctggtgcacagctacagaggcaccggcggcatcttcgaggtgtgctggaacgccgccggcgacaaggtgggcgccagcgccagcgacggcagcgtgtgcgtgctggacctgagaaagtag

SEQ ID NO: 13244 - DNA, 1116 bp, synthetic construct
  source 1..1116: mol_type = other DNA; note = Synthetic coding sequence
atgcacatcaagagcatcatcctggagggcttcaagagctacgcccagagaaccgaggtgaacggcttcgaccccctgttcaacgccatcaccggcctgaacggcagcggcaagagcaacatcctggacagcatctgcttcctgctgggcatcagcaacctgagccaggtgagagccagcaacctgcaggacctggtgtacaagaacggccaggccggcatcaccaaggccagcgtgagcatcaccttcgacaacagcgacaagaagcagagccccctgggcttcgaggtgcacgacgagatcaccgtgaccagacaggtggtgatcggcggcagaaacaagtacctgatcaacggcgtgaacgccaacaacaccagagtgcaggacctgttctgcagcgtgggcctgaacgtgaacaacccccacttcctgatcatgcagggcagaatcaccaaggtgctgaacatgaagccccccgagatcctgagcatgatcgaggaggccgccggcaccagaatgtacgagtacaagaagatcgccgcccagaagaccatcgagaagaaggaggccaagctgaaggagatcaagaccatcctggaggaggagatcacccccaccatccagaagctgaaggaggagagaagcagctacctggagtaccagaaggtgatgagagagatcgagcacctgagcagactgtacatcgcctaccagttcctgctggccgaggacaccaaggtgagaagcgccgaggagctgaaggagatgcaggacaaggtgatcaagctgcaggaggagctgagcgagaacgacaagaagatcaaggccctgaaccacgagatcgaggagctggagaagagaaaggacaaggagaccggcggcatcctgagaagcctggaggacgccctggccgaggcccagagagtgaacaccaagagccagagcgccttcgacctgaagaagaagaacctggcctgcgaggagagcaagagaaaggagctggagaagaacatggtggaggacagcaagaccctggccgccaaggagaaggagaagatcaagagaaaggccttctggaagagcgccggcagctgcctggtgatcctggtggactag

SEQ ID NO: 13245 - DNA, 507 bp, synthetic construct
  source 1..507: mol_type = other DNA; note = Synthetic coding sequence
cacaagctgcagagcggcatcggcagactgatcctgaaggaggagatgaaggccagaagcagcagctacgccgacccctggaccccccccagaagcagcaccagcagcagagaggccctgcacaccgccggctacgagatgagcctgaacggcagccccagaagccactacctggccgacagcgaccccctgatcagcaagagcgccagcctgcccgcctacagaagaaacggcctgcacagaacccccagcgccgacctgttccactacgacagcatgaacgccgtgaactggggcatgagagagtacaagatctacccctacgagctgctgctggtgaccaccagaggcagaaacagactgcccaaggacgtggacagaaccagactggagagacacctgagccaggaggagttctaccaggtgttcggcatgaccatcagcgagttcgacagactggccctgtggaagagaaacgagctgaagaagcaggccagactgttctag

SEQ ID NO: 13246 - DNA, 1770 bp, synthetic construct; identical to SEQ ID NO: 10185
  source 1..1770: mol_type = other DNA; note = Synthetic coding sequence

SEQ ID NO: 13247 - DNA, 1287 bp, synthetic construct
  source 1..1287: mol_type = other DNA; note = Synthetic coding sequence
atgagcatgctgaagcccagcggcctgaaggcccccaccaagatcctgaagcccggcagcaccgccctgaagacccccaccgccgtggtggcccccgtggagaagaccatcagcagcgagaaggccagcagcacccccagcagcgagacccaggaggagttcgtggacgacttcagagtgggcgagagagtgtgggtgaacggcaacaagcccggcttcatccagttcctgggcgagacccagttcgcccccggccagtgggccggcatcgtgctggacgagcccatcggcaagaacgacggcagcgtggccggcgtgagatacttccagtgcgagcccctgaagggcatcttcaccagacccagcaagctgaccagaaaggtgcaggccgaggacgaggccaacggcctgcagaccacccccgccagcagagccaccagccccctgtgcaccagcaccgccagcatggtgagcagcagccccagcacccccagcaacatcccccagaagcccagccagcccgccgccaaggagcccagcgccaccccccccatcagcaacctgaccaagaccgccagcgagagcatcagcaacctgagcgaggccggcagcatcaagaagggcgagagagagctgaagatcggcgacagagtgctggtgggcggcaccaaggccggcgtggtgagattcctgggcgagaccgacttcgccaagggcgagtggtgcggcgtggagctggacgagcccctgggcaagaacgacggcgccgtggccggcaccagatacttccagtgccagcccaagtacggcctgttcgcccccgtgcacaaggtgaccaagatcggcttccccagcaccacccccgccaaggccaaggccaacgccgtgagaagagtgatggccaccaccagcgccagcctgaagagaagccccagcgccagcagcctgagcagcatgagcagcgtggccagcagcgtgagcagcagacccagcagaaccggcctgcacgtgctggagctggaggccaagatggaccagctgagaaccatggtggaggccgccgacagagagaaggtggagctgctgaaccagctggaggaggagaagagaaaggtggaggacctgcagttcagagtggaggaggagagcatcaccaagggcgacctggagcagaagagccagatcagcgaggaccccgagaacgtgagaggccacctgaccgtgtggatcttccccctgctgaccaagatcgaccacagactgaagtgcctgctgatctacagctag

SEQ ID NO: 13248 - DNA, 3483 bp, synthetic construct
  source 1..3483: mol_type = other DNA; note = Synthetic coding sequence
atggtggtgaccctgggccccggccccgactgcctgatcctggaggccagcagacagccccagctggtgcccaagcccgagagaatggccagcgacggcgccagcgccctgcccggccccgacatgagcatgaagcccagcgccgcccccagccccagccccgccctgcccttcctgccccccaccagcgacccccccgaccacccccccagagagccccccccccagcccatcatgcccagcgtgttcagccccgacaaccccctgatgctgagcgccttccccagcagcctgctggtgaccggcgacggcggcccctgcctgagcggcgccggcgccggcaaggtgatcgtgaaggtgaagaccgagggcggcagcgccgagcccagccagacccagaacttcatcctgacccagaccgccctgaacagcaccgcccccggcaccccctgcggcggcctggagggccccgccccccccttcgtgaccgccagcaacgtgaagaccatcctgcccagcaaggccgtgggcgtgagccaggagggcccccccggcctgcccccccagccccccccccccgtggcccagctggtgcccatcgtgcccctggagaaggcctggcccggcccccacggcaccaccggcgagggcggccccgtggccaccctgagcaagcccagcctgggcgacagaagcaagatcagcaaggacgtgtacgagaacttcagacagtggcagagatacaaggccctggccagaagacacctgagccagagccccgacaccgaggccctgagctgcttcctgatccccgtgctgagaagcctggccagactgaagcccaccatgaccctggaggagggcctgcccctggccgtgcaggagtgggagcacaccagcaacttcgacagaatgatcttctacgagatggccgagagattcatggagttcgaggccgaggagatgcagatccagaacacccagctgatgaacggcagccagggcctgagccccgccacccccctgaagctggaccccctgggccccctggccagcgaggtgtgccagcagcccgtgtacatccccaagaaggccgccagcaagaccagagcccccagaagaagacagagaaaggcccagagaccccccgcccccgaggcccccaaggagatcccccccgaggccgtgaaggagtacgtggacatcatggagtggctggtgggcacccacctggccaccggcgagagcgacggcaagcaggaggaggagggccagcagcaggaggaggagggcatgtaccccgaccccggcctgctgagctacatcaacgagctgtgcagccagaaggtgttcgtgagcaaggtggaggccgtgatccacccccagttcctggccgacctgctgagccccgagaagcagagagaccccctggccctgatcgaggagctggagcaggaggagggcctgaccctggcccagctggtgcagaagagactgatggccctggaggaggaggaggacgccgaggccccccccagcttcagcggcgcccagctggacagcagccccagcggcagcgtggaggacgaggacggcgacggcagactgagacccagccccggcctgcagggcgccggcggcgccgcctgcctgggcaaggtgagcagcagcggcaagagagccagagaggtgcacggcggccaggagcaggccctggacagccccagaggcatgcacagagacggcaacaccctgcccagccccagcagctgggacctgcagcccgagctggccgccccccagggcacccccggccccctgggcgtggagagaagaggcagcggcaaggtgatcaaccaggtgagcctgcaccaggacggccacctgggcggcgccggcccccccggccactgcctggtggccgacagaaccagcgaggccctgcccctgtgctggcagggcggcttccagcccgagagcacccccagcctggacgccggcctggccgagctggcccccctgcagggccagggcctggagaagcaggtgctgggcctgcagaagggccagcagaccggcggcagaggcgtgctgccccagggcaaggagcccctggccgtgccctgggagggcagcagcggcgccatgtggggcgacgacagaggcacccccatggcccagagctacgaccagaaccccagccccagagccgccggcgagagagacgacgtgtgcctgagccccggcgtgtggctgagcagcgagatggacgccgtgggcctggagctgcccgtgcagatcgaggaggtgatcgagagcttccaggtggagaagtgcgtgaccgagtaccaggagggctgccagggcctgggcagcagaggcaacatcagcctgggccccggcgagaccctggtgcccggcgacaccgagagcagcgtgatcccctgcggcggcaccgtggccgccgccgccctggagaagagaaactactgcagcctgcccggccccctgagagccaacagcccccccctgagaagcaaggagaaccaggagcagagctgcgagaccgtgggccaccccagcgacctgtgggccgagggctgcttccccctgctggagagcggcgacagcaccctgggcagcagcaaggagaccctgccccccacctgccagggcaacctgctgatcatgggcaccgaggacgccagcagcctgcccgaggccagccaggaggccggcagcagaggcaacagcttcagccccctgctggagaccatcgagcccgtgaacatcctggacgtgaaggacgactgcggcctgcagctgagagtgagcgaggacacctgccccctgaacgtgcacagctacgacccccagggcgagggcagagtggaccccgacctgagcaagcccaagaacctggcccccctgcaggagagccaggagagctacaccaccggcacccccaaggccaccagcagccaccagggcctgggcagcaccctgcccagaagaggcaccagaaacgccatcgtgcccagagagaccagcgtgagcaagacccacagaagcgccgacagagccaagggcaaggagaagaagaagaaggaggccgaggaggaggacgaggagctgagcaacttcgcctacctgctggccagcaagctgagcctgagccccagagagcaccccctgagcccccaccacgccagcggcggccagggcagccagagagccagccacctgctgcccgccggcgccaagggccccagcaagctgccctaccccgtggccaagagcggcaagagagccctggccggcggccccgcccccaccgagaagaccccccacagcggcgcccagctgggcgtgcccagagagaagcccctggccctgggcgtggtgagacccagccagcccagaaagagaagatgcgacagcttcgtgaccggcagaagaaagaagagaagaagaagccagtag

SEQ ID NO: 13249 - DNA, 1548 bp, synthetic construct
  source 1..1548: mol_type = other DNA; note = Synthetic coding sequence
ctgaacagccagtgcagaaacaagaaccccttcgccgccggccccagacccccccaccaccagttcttccagagaccccagatccagccccccagagccaccatccccaacagcagccccagcatcagacccggcgcccagacccccaccgccgtgtaccaggccaaccagcacatcatgatggtgaaccacctgcccatgccctaccccgtgccccagggcccccagtactgcatcccccagtacagacacagcggccccccctacgtgggccccccccagcagtaccccgtgcagccccccggccccggccccttctaccccggccccggccccggcgacttccccaacgcctacggcacccccttctaccccagccagcccgtgtaccagagcgcccccatcatcgtgcccacccagcagcagcccccccccgccaagagagagaagaagaccatcagaatcagagaccccaaccagggcggcaaggacatcaccgaggagatcatgagcggcggcggcagcagaaaccccaccccccccatcggcagacccaccagcacccccacccccccccagcagctgcccagccaggtgcccgagcacagccccgtggtgtacggcaccgtggagagcgcccacctggccgccagcacccccgtgaccgccgccagcgaccagaagcaggaggagaagcccaagcccgaccccgtgctgaagagccccagccccgtgctgagactggtgctgagcggcgagaagaaggagcaggagggccagaccagcgagaccaccgccatcgtgagcatcgccgagctgcccctgccccccagccccaccaccgtgagcagcgtggccagaagcaccatcgccgcccccaccagcagcgccctgagcagccagcccatcttcaccaccgccatcgacgacagatgcgagctgagcagccccagagaggacaccatccccatccccagcctgaccagctgcaccgagaccagcgaccccctgcccaccaacgagaacgacgacgacatctgcaagaagccctgcagcgtggcccccaacgacatccccctggtgagcagcaccaacctgatcaacgagatcaacggcgtgagcgagaagctgagcgccaccgagagcatcgtggagatcgtgaagcaggaggtgctgcccctgaccctggagctggagatcctggagaacccccccgaggagatgaagctggagtgcatccccgcccccatcacccccagcaccgtgcccagcttcccccccaccccccccaccccccccgccagccccccccacacccccgtgatcgtgcccgccgccgccaccaccgtgagcagccccagcgccgccatcaccgtgcagagagtgctggaggaggacgagagcatcagaacctgcctgagcgaggacgccaaggagatccagaacaagatcgaggtggaggccgacggccagaccgaggagatcctggacagccagaacctgaacagcagaagaagccccgtgcccgagaccagcaacgagtgctag

SEQ ID NO: 13250 - DNA, 204 bp, synthetic construct; identical to SEQ ID NO: 13230
  source 1..204: mol_type = other DNA; note = Synthetic coding sequence

SEQ ID NO: 13251 - DNA, 2418 bp, synthetic construct
  source 1..2418: mol_type = other DNA; note = Synthetic coding sequence
atgatgcagaacgtgcacctggcccccgagaccgacgaggacgacctgtacagcggctacaacgactacaaccccatctacgacatcgaggagctggagaacgacgccgccttccagcaggccgtgagaaccagccacggcagaagaccccccagcaagaccagcctggccagcagcatcggcagacccatgaccggcgccatccaggacggcgtgaccagacccatgaccgccgtgagagccgccggcttcaccaaggccgccctgagaggcagcgccttcgaccccctgagccagagcagaggccccgccagccccctggaggccaagaagaaggacagccccgaggagaagatcaagcagctggagaaggaggtgaacgagctggtggaggagagctgcatcgccaacagctgcggcgacctgaagctggccctggagaaggccaaggacgccggcagaaaggagagagtgctggtgagacagagagagcaggtgaccacccccgagaacatcaacctggacctgacctacagcgtgctgttcaacctggccagccagtacagcgtgaacgagatgtacgccgaggccctgaacacctaccaggtgatcgtgaagaacaagatgttcagcaacgccggcatcctgaagatgaacatgggcaacatctacctgaagcagagaaactacagcaaggccatcaagttctacagaatggccctggaccaggtgcccagcgtgaacaagcagatgagaatcaagatcatgcagaacatcggcgtgaccttcatccaggccggccagtacagcgacgccatcaacagctacgagcacatcatgagcatggcccccaacctgaaggccggctacaacctgaccatctgctacttcgccatcggcgacagagagaagatgaagaaggccttccagaagctgatcaccgtgcccctggagatcgacgaggacaagtacatcagccccagcgacgacccccacaccaacctggtgaccgaggccatcaagaacgaccacctgagacagatggagagagagagaaaggccatggccgagaagtacatcatgaccagcgccaagctgatcgcccccgtgatcgagaccagcttcgccgccggctacgactggtgcgtggaggtggtgaaggccagccagtacgtggagctggccaacgacctggagatcaacaaggccgtgacctacctgagacagaaggactacaaccaggccgtggagatcctgaaggtgctggagaagaaggacagcagagtgaagagcgccgccgccaccaacctgagcgccctgtactacatgggcaaggacttcgcccaggccagcagctacgccgacatcgccgtgaacagcgacagatacaaccccgccgccctgaccaacaagggcaacaccgtgttcgccaacggcgactacgagaaggccgccgagttctacaaggaggccctgagaaacgacagcagctgcaccgaggccctgtacaacatcggcctgacctacgagaagctgaacagactggacgaggccctggactgcttcctgaagctgcacgccatcctgagaaacagcgccgaggtgctgtaccagatcgccaacatctacgagctgatggagaaccccagccaggccatcgagtggctgatgcaggtggtgagcgtgatccccaccgacccccaggtgctgagcaagctgggcgagctgtacgacagagagggcgacaagagccaggccttccagtactactacgagagctacagatacttcccctgcaacatcgaggtgatcgagtggctgggcgcctactacatcgacacccagttctgggagaaggccatccagtacttcgagagagccagcctgatccagcccacccaggtgaagtggcagctgatggtggccagctgcttcagaagaagcggcaactaccagaaggccctggacacctacaaggacacccacagaaagttccccgagaacgtggagtgcctgagattcctggtgagactgtgcaccgacctgggcctgaaggacgcccaggagtacgccagaaagctgaagagactggagaagatgaaggagatcagagagcagagaatcaagagcggcagagacggcagcggcggcagcagaggcaagagagagggcagcgccagcggcgacagcggccagaactacagcgccagcagcaagggcgagagactgagcgccagactgagagccctgcccggcaccaacgagccctacgagagcagcagcaacaaggagatcgacgccagctacgtggaccccctgggcccccagatcgagagacccaagaccgccgccaagaagagaatcgacgaggacgacttcgccgacgaggagctgggcgacgacctgctgcccgagtag

SEQ ID NO: 13252 - DNA, 765 bp, synthetic construct
  source 1..765: mol_type = other DNA; note = Synthetic coding sequence
atggcccccggcagcttcgccgagtacaccgtggtgcccgccagcatcgccacccccgtgcccagcgtgaagcccgagtacctgaccctgctggtgagcggcaccaccgcctacatcagcctgaaggagctgggcggcctgagcgagggcaagaaggtgctggtgaccgccgccgccggcggcaccggccagttcgccatgcagctgagcaagaaggccaagtgccacgtgatcggcacctgcagcagcgacgagaagagcgccttcctgaagagcctgggctgcgacagacccatcaactacaagaccgagcccgtgggcaccgtgctgaagcaggagtaccccgagggcgtggacgtggtgtacgagagcgtgggcggcgccatgttcgacctggccgtggacgccctggccaccaagggcagactgatcgtgatcggcttcatcagcggctaccagacccccaccggcctgagccccgtgaaggccggcaccctgcccgccaagctgctgaagaagagcgccagcgtgcagggcttcttcctgaaccactacctgagcaagtaccaggccgccatgagccacctgctggagatgtgcgtgagcggcgacctggtgtgcgaggtggacctgggcgacctgagccccgagggcagattcaccggcctggagagcatcttcagagccgtgaactacatgtacatgggcaagaacaccggcaagatcgtggtggagctgccccacagcgtgaacagcaagctgtag

SEQ ID NO: 13253 - DNA, 1212 bp, synthetic construct
  source 1..1212: mol_type = other DNA; note = Synthetic coding sequence
atgcaccaccccatccagatgaagcccgccgacagcgagaagagcaacgccgtggaggacagaaagctgttcatcggcatggtgagcaagaagtgcaacgagaacgacatcagagtgatgttcagccccttcggccagatcgaggagtgcagaatcctgagaggccccgacggcctgagcagaggctgcgccttcgtgaccttcagcaccagagccatggcccagaacgccatcaaggccatgcaccagagccagaccatggagggctgcagcagccccatcgtggtgaagttcgccgacacccagaaggacaaggagcagagaagactgcagcagcagctggcccagcagatgcagcagctgaacaccgccacctggggcaacctgaccggcctgggcggcctgaccccccagtacctggccctgctgcagcaggccaccagcagcagcaacctgggcgccttcagcggcatccagcagatggccggcatgaacgccctgcagctgcagaacctggccaccctggccgccgccgccgccgccgcccagaccagcgccaccagcaccaacgccaaccccctgagcaccaccagcagcgccctgggcgccctgaccagccccgtggccgccagcacccccaacagcaccgccggcgccgccatgaacagcctgaccagcctgggcaccctgcagggcctggccggcgccaccgtgggcctgaacaacatcaacgccctggccgtggcccagatgctgagcggcatggccgccctgaacggcggcctgggcgccaccggcctgaccaacggcaccgccggcaccatggacgccctgacccaggcctacagcggcatccagcagtacgccgccgccgccctgcccaccctgtacagccagagcctgctgcagcagcagagcgccgccggcagccagaaggagggccccgagggcgccaacctgttcatctaccacctgccccaggagttcggcgaccaggacatcctgcagatgttcatgcccttcggcaacgtgatcagcgccaaggtgttcatcgacaagcagaccaacctgagcaagtgcttcggcttcgtgagctacgacaaccccgtgagcgcccaggccgccatccaggccatgaacggcttccagatcggcatgaagagactgaaggtgcagctgaagagaagcaagaacgacagcaagccctactag

SEQ ID NO: 13254 - DNA, 1332 bp, synthetic construct
  source 1..1332: mol_type = other DNA; note = Synthetic coding sequence
atggccgagttcctgaagcaggtgaagccctacgtggaggagggcctgcacccccagatcatcatcagagccttcagaaccgccacccagctggccgtgaacaagatcaaggagatcgccgtgaccgtgaagaaggccgacaaggtggagcagagaaagctgctggagaagtgcgccatgaccgccctgagcagcaagctgatcagccagcagaaggccttcttcgccaagatggtggtggacgccgtgatgatgctggacgacctgctgcagctgaagatgatcggcatcaagaaggtgcagggcggcgccctggaggacagccagctggtggccggcgtggccttcaagaagaccttcagctacgccggcttcgagatgcagcccaagaagtaccacaaccccaagatcgccctgctgaacgtggagctggagctgaaggccgagaaggacaacgccgagatcagagtgcacaccgtggaggactaccaggccatcgtggacgccgagtggaacatcctgtacgacaagctggagaagatccaccacagcggcgccaaggtggtgctgagcaagctgcccatcggcgacgtggccacccagtacttcgccgacagagacatgttctgcgccggcagagtgcccgaggaggacctgaagagaaccatgatggcctgcggcggcagcatccagaccagcgtgaacgccctgagcgccgacgtgctgggcagatgccaggtgttcgaggagacccagatcggcggcgagagatacaacttcttcaccggctgccccaaggccaagacctgcaccttcatcctgagaggcggcgccgagcagttcatggaggagaccgagagaagcctgcacgacgccatcatgatcgtgagaagagccatcaagaacgacagcgtggtggccggcggcggcgccatcgagatggagctgagcaagtacctgagagactacagcagaaccatccccggcaagcagcagctgctgatcggcgcctacgccaaggccctggagatcatccccagacagctgtgcgacaacgccggcttcgacgccaccaacatcctgaacaagctgagagccagacacgcccagggcggcacctggtacggcgtggacatcaacaacgaggacatcgccgacaacttcgaggccttcgtgtgggagcccgccatggtgagaatcaacgccctgaccgccgccagcgaggccgcctgcctgatcgtgagcgtggacgagaccatcaagaaccccagaagcaccgtggacgcccccaccgccgccggcagaggcagaggcagaggcagaccccactag

SEQ ID NO: 13255 - DNA, 2193 bp, synthetic construct
  source 1..2193: mol_type = other DNA; note = Synthetic coding sequence
atgcagctgttcgagcagccctgccccggcgaggaccccagacccggcggccagatcggcgaggtggagctgagcagctacaccccccccgccggcgtgcccggcaagcccgccgccccccacttcctgcccgtgctgtgcagcgtgagccccagcggcagcagagtgccccacgacctgctgggcggcagcggcggcttcaccctggaggacgccctgttcggcctgctgttcggcgccgacgccaccctgctgcagagccccgtggtgctgtgcggcctgcccgacggccagctgtgctgcgtgatcctgaaggccctggtgaccagcagaagcgcccccggcgaccccaacgccctggtgaagatcctgcaccacctggaggagcccgtgatcttcatcggcgccctgaagaccgagccccaggccgccgaggccgccgagaacttcctgcccgacgaggacgtgcactgcgactgcctggtggccttcggccaccacggcagaatgctggccatcaaggccagctgggacgagagcggcaagctggtgcccgagctgagagagtactgcctgcccggccccgtgctgtgcgccgcctgcggcggcggcggcagagtgtaccacagcacccccagcgacctgtgcgtggtggacctgagcagaggcagcacccccctgggccccgagcagcccgaggagggccccggcggcctgccccccatgctgtgccccgccagcctgaacatctgcagcgtggtgagcctgagcgccagccccagaacccacgagggcggcaccaagctgctggccctgagcgccaagggcagactgatgacctgcagcctggacctggacagcgagatgcccggccccgccagaatgaccaccgagagcgccggccagaagatcaaggagctgctgagcggcatcggcaacatcagcgagagagtgagcttcctgaagaaggccgtggaccagagaaacaaggccctgaccagcctgaacgaggccatgaacgtgagctgcgccctgctgagcagcggcaccggccccagacccatcagctgcaccaccagcaccacctggagcagactgcagacccaggacgtgctgatggccacctgcgtgctggagaacagcagcagcttcagcctggaccagggctggaccctgtgcatccaggtgctgaccagcagctgcgccctggacctggacagcgcctgcagcgccatcacctacaccatccccgtggaccagctgggccccggcgccagaagagaggtgaccctgcccctgggccccggcgagaacggcggcctggacctgcccgtgaccgtgagctgcaccctgttctacagcctgagagaggtggtgggcggcgccctggcccccagcgacagcgaggaccccttcctggacgagtgccccagcgacgtgctgcccgagcaggagggcgtgtgcctgcccctgagcagacacaccgtggacatgctgcagtgcctgagattccccggcctggcccccccccacaccagagcccccagccccctgggccccaccagagaccccgtggccaccttcctggagacctgcagagagcccggcagccagcccgccggccccgccagcctgagagccgagtacctgccccccagcgtggccagcatcaaggtgagcgccgagctgctgagagccgccctgaaggacggccacagcggcgtgcccctgtgctgcgccaccctgcagtggctgctggccgagaacgccgccgtggacgtggtgagagccagagccctgagcagcatccagggcgtggcccccgacggcgccaacgtgcacctgatcgtgagagaggtggccatgaccgacctgtgccccgccggccccatccaggccgtggagatccaggtggagagcagcagcctggccgacatctgcagagcccaccacgccgtggtgggcagaatgcagaccatggtgaccgagcaggccacccagggcagcagcgcccccgacctgagagtgcagtacctgagacagatccacgccaaccacgagaccctgctgagagaggtgcagaccctgagagacagactgtgcaccgaggacgaggccagcagctgcgccaccgcccagagactgctgcaggtgtacagacagctgagacaccccagcctgatcctgctgtag

SEQ ID NO: 13256 - DNA, 4179 bp, synthetic construct
  source 1..4179: mol_type = other DNA; note = Synthetic coding sequence
atgagcatgctgaagcccagcggcctgaaggcccccaccaagatcctgaagcccggcagcaccgccctgaagacccccaccgccgtggtggcccccgtggagaagaccatcagcagcgagaaggccagcagcacccccagcagcgagacccaggaggagttcgtggacgacttcagagtgggcgagagagtgtgggtgaacggcaacaagcccggcttcatccagttcctgggcgagacccagttcgcccccggccagtgggccggcatcgtgctggacgagcccatcggcaagaacgacggcagcgtggccggcgtgagatacttccagtgcgagcccctgaagggcatcttcaccagacccagcaagctgaccagaaaggtgcaggccgaggacgaggccaacggcctgcagaccacccccgccagcagagccaccagccccctgtgcaccagcaccgccagcatggtgagcagcagccccagcacccccagcaacatcccccagaagcccagccagcccgccgccaaggagcccagcgccaccccccccatcagcaacctgaccaagaccgccagcgagagcatcagcaacctgagcgaggccggcagcatcaagaagggcgagagagagctgaagatcggcgacagagtgctggtgggcggcaccaaggccggcgtggtgagattcctgggcgagaccgacttcgccaagggcgagtggtgcggcgtggagctggacgagcccctgggcaagaacgacggcgccgtggccggcaccagatacttccagtgccagcccaagtacggcctgttcgcccccgtgcacaaggtgaccaagatcggcttccccagcaccacccccgccaaggccaaggccaacgccgtgagaagagtgatggccaccaccagcgccagcctgaagagaagccccagcgccagcagcctgagcagcatgagcagcgtggccagcagcgtgagcagcagacccagcagaaccggcctgctgaccgagaccagcagcagatacgccagaaagatcagcggcaccaccgccctgcaggaggccctgaaggagaagcagcagcacatcgagcagctgctggccgagagagacctggagagagccgaggtggccaaggccaccagccacgtgggcgagatcgagcaggagctggccctggccagagacggccacgaccagcacgtgctggagctggaggccaagatggaccagctgagaaccatggtggaggccgccgacagagagaaggtggagctgctgaaccagctggaggaggagaagagaaaggtggaggacctgcagttcagagtggaggaggagagcatcaccaagggcgacctggaggtggccaccgtgagcgagaagagcagaatcatggagctggagaaggacctggccctgagagtgcaggaggtggccgagctgagaagaagactggagagcaacaagcccgccggcgacgtggacatgagcctgagcctgctgcaggagatcagcagcctgcaggagaagctggaggtgaccagaaccgaccaccagagagagatcaccagcctgaaggagcacttcggcgccagagaggagacccaccagaaggagatcaaggccctgtacaccgccaccgagaagctgagcaaggagaacgagagcctgaagagcaagctggagcacgccaacaaggagaacagcgacgtgatcgccctgtggaagagcaagctggagaccgccatcgccagccaccagcaggccatggaggagctgaaggtgagcttcagcaagggcctgggcaccgagaccgccgagttcgccgagctgaagacccagatcgagaagatgagactggactaccagcacgagatcgagaacctgcagaaccagcaggacagcgagagagccgcccacgccaaggagatggaggccctgagagccaagctgatgaaggtgatcaaggagaaggagaacagcctggaggccatcagaagcaagctggacaaggccgaggaccagcacctggtggagatggaggacaccctgaacaagctgcaggaggccgagatcaaggtgaaggagctggaggtgctgcaggccaagtgcaacgagcagaccaaggtgatcgacaacttcaccagccagctgaaggccaccgaggagaagctgctggacctggacgccctgagaaaggccagcagcgagggcaagagcgagatgaagaagctgagacagcagctggaggccgccgagaagcagatcaagcacctggagatcgagaagaacgccgagagcagcaaggccagcagcatcaccagagagctgcagggcagagagctgaagctgaccaacctgcaggagaacctgagcgaggtgagccaggtgaaggagaccctggagaaggagctgcagatcctgaaggagaagttcgccgaggccagcgaggaggccgtgagcgtgcagagaagcatgcaggagaccgtgaacaagctgcaccagaaggaggagcagttcaacatgctgagcagcgacctggagaagctgagagagaacctggccgacatggaggccaagttcagagagaaggacgagagagaggagcagctgatcaaggccaaggagaagctggagaacgacatcgccgagatcatgaagatgagcggcgacaacagcagccagctgaccaagatgaacgacgagctgagactgaaggagagagacgtggaggagctgcagctgaagctgaccaaggccaacgagaacgccagcttcctgcagaagagcatcgaggacatgaccgtgaaggccgagcagagccagcaggaggccgccaagaagcacgaggaggagaagaaggagctggagagaaagctgagcgacctggagaagaagatggagaccagccacaaccagtgccaggagctgaaggccagatacgagagagccaccagcgagaccaagaccaagcacgaggagatcctgcagaacctgcagaagaccctgctggacaccgaggacaagctgaagggcgccagagaggagaacagcggcctgctgcaggagctggaggagctgagaaagcaggccgacaaggccaaggccgcccagaccgccgaggacgccatgcagatcatggagcagatgaccaaggagaagaccgagaccctggccagcctggaggacaccaagcagaccaacgccaagctgcagaacgagctggacaccctgaaggagaacaacctgaagaacgtggaggagctgaacaagagcaaggagctgctgaccgtggagaaccagaagatggaggagttcagaaaggagatcgagaccctgaagcaggccgccgcccagaagagccagcagctgagcgccctgcaggaggagaacgtgaagctggccgaggagctgggcagaagcagagacgaggtgaccagccaccagaagctggaggaggagagaagcgtgctgaacaaccagctgctggagatgaagaagagagagagcaagttcatcaaggacgccgacgaggagaaggccagcctgcagaagagcatcagcatcaccagcgccctgctgaccgagaaggacgccgagctggagaagctgagaaacgaggtgaccgtgctgagaggcgagaacgccagcgccaagagcctgcacagcgtggtgcagaccctggagagcgacaaggtgaagctggagctgaaggtgaagaacctggagctgcagctgaaggagaacaagagacagctgagcagcagcagcggcaacaccgacacccaggccgacgaggacgagagagcccaggagagccagatcgacttcctgaacagcgtgatcgtggacctgcagagaaagaaccaggacctgaagatgaaggtggagatgatgagcgaggccgccctgaacggcaacggcgacgacctgaacaactacgacagcgacgaccaggagaagcagagcaagaagaagcccagactgttctgcgacatctgcgactgcttcgacctgcacgacaccgaggactgccccacccaggcccagatgagcgaggaccccccccacagcacccaccacggcagcagaggcgaggagagaccctactgcgagatctgcgagatgttcggccactgggccaccaactgcaacgacgacgagaccttctag

SEQ ID NO: 13257 - DNA, 492 bp, synthetic construct
  source 1..492: mol_type = other DNA; note = Synthetic coding sequence
atgttcagaaagatcggcatcgaggccctgaagcaggtgaccaagagatacgccagaaagcagaacagatgggtgaagaacagattcctgagcagacccggccccatcgtgccccccgtgtacggcctggaggtgagcgacgtgagcaagtgggaggagagcgtgctggagcccgccctggagatcgtgcagagcttcatccagggccacaagcccaccgccacccccatcaagatgccctacaacgaggccgagaacaagagaagctaccacctgtgcgacctgtgcgacagaatcatcatcggcgacagagagtgggccgcccacatcaagagcaagagccacctgaaccagctgaagaagagaagaagactggacagcgacgccgtgaacaccatcgagagccagagcgtgagccccgaccacaacaaggagcccaaggagaagggcagccccggccagaacgaccaggagctgaagtgcagcgtgtag

SEQ ID NO: 13258 - DNA, 1602 bp, synthetic construct
  source 1..1602: mol_type = other DNA; note = Synthetic coding sequence
atggccagccccggcaaggacaactacagaatgaagagctacaagaacaacgccctgaaccccgaggagatgagaagaagaagagaggaggagggcatccagctgagaaagcagaagagagagcagcagctgttcaagagaagaaacgtggagctgatcaacgaggaggccgccatgttcgacagcctgctgatggacagctacgtgagcagcaccaccggcgagagcgtgatcaccagagagatggtggagatgctgttcagcgacgacagcgacctgcagctggccaccacccagaagttcagaaagctgctgagcaaggagcccagcccccccatcgacgaggtgatcaacacccccagagtggtggacagattcgtggagttcctgaagagaaacgagaactgcaccctgcagttcgaggccgcctgggccctgaccaacatcgccagcggcaccagccagcagaccaagatcgtgatcgaggccggcgccgtgcccatcttcatcgagctgctgaacagcgacttcgaggacgtgcaggagcaggccgtgtgggccctgggcaacatcgccggcgacagcagcgtgtgcagagactacgtgctgaactgcagcatcctgaaccccctgctgaccctgctgaccaagagcaccagactgaccatgaccagaaacgccgtgtgggccctgagcaacctgtgcagaggcaagaaccccccccccgagttcgccaaggtgagcccctgcctgcccgtgctgagcagactgctgttcagcagcgacagcgacctgctggccgacgcctgctgggccctgagctacctgagcgacggccccaacgagaagatccaggccgtgatcgacagcggcgtgtgcagaagactggtggagctgctgatgcacaacgactacaaggtggccagccccgccctgagagccgtgggcaacatcgtgaccggcgacgacatccagacccaggtgatcctgaactgcagcgccctgccctgcctgctgcacctgctgagcagccccaaggagagcatcagaaaggaggcctgctggaccatcagcaacatcaccgccggcaacagagcccagatccaggccgtgatcgacgccaacatcttccccgtgctgatcgagatcctgcagaaggccgagttcagaaccagaaaggaggccgcctgggccatcaccaacgccaccagcggcggcacccccgagcagatcagatacctggtgagcctgggctgcatcaagcccctgtgcgacctgctgaccgtgatggacagcaagatcgtgcaggtggccctgaacggcctggagaacatcctgagactgggcgagcaggagggcaagagaagcggcagcggcgtgaacccctactgcggcctgatcgaggaggcctacggcctggacaagatcgagttcctgcagagccacgagaaccaggagatctaccagaaggccttcgacctgatcgagcactacttcggcgtggaggacgacgacagcagcctggccccccaggtggacgagacccagcagcagttcatcttccagcagcccgaggcccccatggagggcttccagctgtag

SEQ ID NO: 13259 - DNA, 993 bp, synthetic construct; identical to SEQ ID NO: 11499
  source 1..993: mol_type = other DNA; note = Synthetic coding sequence

SEQ ID NO: 13260 - DNA, 576 bp, synthetic construct
  source 1..576: mol_type = other DNA; note = Synthetic coding sequence
atgagcagagagagaggcagcagaagcgaggagcccggcgccggcaacagagagagcggcagcagagagcccggcctggccgccgccgccatgagcaccgtggacctggccagagtgggcgcctgcatcctgaagcacgccgtgaccggcgaggccgtggagctgagaagcctgtggagagagcacgcctgcgtggtggccggcctgagaagattcggctgcgtggtgtgcagatggatcgcccaggacctgagcagcctggccggcctgctggaccagcacggcgtgagactggtgggcgtgggccccgaggccctgggcctgcaggagttcctggacggcgactacttcgccggcgagctgtacctggacgagagcaagcagctgtacaaggagctgggcttcaagagatacaacagcctgagcatcctgcccgccgccctgggcaagcccgtgagagacgtggccgccaagagccccggcgactacgtgcccaaggagcacatcctgcaggtgctgggcatcagcgccgaggtgtgcgccagcgaccccccccagtgcgacagagaggtgtag

SEQ ID NO: 13261 - DNA, 1050 bp, synthetic construct
  source 1..1050: mol_type = other DNA; note = Synthetic coding sequence
aacaccatccacgacgtgctggacgtggaggccgccgtggtgaacctggacaacagcgtggtggacctggagaccctgcaggccctgtacgagaacagagcccagagcgacgagctggagaagatcgagaagcacggcagaagcagcaaggacaaggagaacgccaagagcctggacaagcccgagcagttcctgtacgagctgagcctgatccccaacttcagcgagagagtgttctgcatcctgttccagagcaccttcagcgagagcatctgcagcatcagaagaaagctggagctgctgcagaagctgtgcgagaccctgaagaacggccccggcgtgatgcaggtgctgggcctggtgctggccttcggcaactacatgaacggcggcaacaagaccagaggccaggccgacggcttcggcctggacatcctgcccaagctgaaggacgtgaagagcagcgacaacagcagaagcctgctgagctacatcgtgagctactacctgagaaacttcgacgaggacgccggcaaggagcagtgcctgttccccctgcccgagccccaggacctgttccaggccagccagatgaagttcgaggacttccagaaggacctgagaaagctgaagaaggacctgaaggcctgcgaggtggaggccggcaaggtgtaccaggtgagcagcaaggagcacatgcagcccttcaaggagaacatggagcagttcatcatccaggccaagatcgaccaggaggccgaggagaacagcctgaccgagacccacaagtgcttcctggagaccaccgcctacttcttcatgaagcccaagctgggcgagaaggaggtgagccccaacgccttcttcagcatctggcacgagttcagcagcgacttcaaggacttctggaagaaggagaacaagctgctgctgcaggagagagtgaaggaggccgaggaggtgtgcagacagaagaagggcaagagcctgtacaagatcaagcccagacacgacagcggcatcaagaacaacaacagcatgcacacctag

SEQ ID NO: 13262 - DNA, 570 bp, synthetic construct
  source 1..570: mol_type = other DNA; note = Synthetic coding sequence
atgaccgccagcgccagcagcttcagcagcagccagggcgtgcagcagcccagcatctacagcttcagccagatcaccagaagcctgttcctgagcaacggcgtggccgccaacgacaagctgctgctgagcagcaacagaatcaccgccatcgtgaacgccagcgtggagggccagagaatcctgagaggcatccagtacatcaaggtgcccgtgaccgacgccagagacagcagactgtacgacttcttcgaccccatcgccgacctgatccacaccatcgacatgagacagggcagaaccctgctgcactgcatggccggcgtgagcagaagcgccagcctgtgcctggcctacctgatgaagtaccacagcatgagcctgctggacgcccacacctggaccaagagcagaagacccatcatcagacccaacaacggcttctgggagcagctgatcaactacgagttcaagctgttcaacaacaacaccgtgagaatgatcaacagccccgtgggcaacatccccgacatctacgagaaggacctgagaatgatgatcagcatgtag

SEQ ID NO: 13263 - DNA, 549 bp, synthetic construct; identical to SEQ ID NO: 9755
  source 1..549: mol_type = other DNA; note = Synthetic coding sequence

SEQ ID NO: 13264 - DNA, 387 bp, synthetic construct
  source 1..387: mol_type = other DNA; note = Synthetic coding sequence
atggtgttcagaagattcgtggaggtgggcagagtggcctacgtgagcttcggcccccacgccggcaagctggtggccatcgtggacgtgatcgaccagaacagagccctggtggacggcccctgcacccaggtgagaagacaggccatgcccttcaagtgcatgcagctgaccgacttcatcctgaagttcccccacagcgcccaccagaagtacgtgagacaggcctggcagaaggccgacatcaacaccaagtgggccgccaccagatgggccaagaagatcgaggccagagagagaaaggccaagatgaccgacttcgacagattcaaggtgatgaaggccaagaagatgagaaacagaatcatcaagaacgacaccagatag

SEQ ID NO: 13265 - DNA, 492 bp, synthetic construct; identical to SEQ ID NO: 13257
  source 1..492: mol_type = other DNA; note = Synthetic coding sequence

SEQ ID NO: 13266 - DNA, 1224 bp, synthetic construct
  source 1..1224: mol_type = other DNA; note = Synthetic coding sequence
atggccgccgagctgtacgcccccgccagcgccgccgccgccgacctggccaacagcaacgccggcgccgccgtgggcagaaaggccggccccagaagcccccccagcgcccccgcccccgccccccccccccccgcccccgccccccccaccctgggcaacaaccaccaggagagccccggctggagatgctgcagacccaccctgagagagagaaacgccctgatgttcaacaacgagctgatggccgacgtgcacttcgtggtgggcccccccggcgccaccagaaccgtgcccgcccacaagtacgtgctggccgtgggcagcagcgtgttctacgccatgttctacggcgacctggccgaggtgaagagcgagatccacatccccgacgtggagcccgccgccttcctgatcctgctgaagtacatgtacagcgacgagatcgacctggaggccgacaccgtgctggccaccctgtacgccgccaagaagtacatcgtgcccgccctggccaaggcctgcgtgaacttcctggagaccagcctggaggccaagaacgcctgcgtgctgctgagccagagcagactgttcgaggagcccgagctgacccagagatgctgggaggtgatcgacgcccaggccgagatggccctgagaagcgagggcttctgcgagatcgacagacagaccctggagatcatcgtgaccagagaggccctgaacaccaaggaggccgtggtgttcgaggccgtgctgaactgggccgaggccgagtgcaagagacagggcctgcccatcacccccagaaacaagagacacgtgctgggcagagccctgtacctggtgagaatccccaccatgaccctggaggagttcgccaacggcgccgcccagagcgacatcctgaccctggaggagacccacagcatcttcctgtggtacaccgccaccaacaagcccagactggacttccccctgaccaagagaaagggcctggccccccagagatgccacagattccagagcagcgcctacagaagcaaccagtggagatacagaggcagatgcgacagcatccagttcgccgtggacagaagagtgttcatcgccggcctgggcctgtacggcagcagcagcggcaaggccgagtacagcgtgaagatcgagctgaagagactgggcgtggtgctggcccagaacctgaccaagttcatgagctag

SEQ ID NO: 13267 - DNA, 603 bp, synthetic construct
  source 1..603: mol_type = other DNA; note = Synthetic coding sequence
atgctggagctggtggcccagaagcagagagagagagaggagagagaggagagagaggccctggagagagagagacagagaagaagacagggccaggagctgagcgccgccagacagagactgcaggaggacgagatgagaagagccgccgaggagagaagaagagagaaggccgaggagctggccgccagacagagagtgagagagaagatcgagagagacaaggccgagagagccaagaagtacggcggcagcgtgggcagccagcccccccccgtggcccccgagcccggccccgtgcccagcagccccagccaggagccccccaccaagagagagtacgaccagtgcagaatccaggtgagactgcccgacggcaccagcctgacccagaccttcagagccagagagcagctggccgccgtgagactgtacgtggagctgcacagaggcgaggagctgggcggcggccaggaccccgtgcagctgctgagcggcttccccagaagagccttcagcgaggccgacatggagagacccctgcaggagctgggcctggtgcccagcgccgtgctgatcgtggccaagaagtgccccagctag

SEQ ID NO: 13268 - DNA, 885 bp, synthetic construct
  source 1..885: mol_type = other DNA; note = Synthetic coding sequence
atgggcctggccagctggagccagctggccagcacccccagagcccccggcagcagagacgccagatgggagagaagagagcccgccctgagaggcgccaaggacagactgaccatcggcaagcacctggacatgggcagcccccagctgagaaccagagacagaggctggcccagccccagacccgagagagagaagagaaccagccagagcgccagaagacccacctgcaccgagagcagatggaagagcgaggaggaggtggagagcgacgacgagtacctggccctgcccgccagactgacccaggtgagcagcctggtgagctacctgggcagcatcagcaccctggtgaccctgcccaccggcgacatcaagggccagagccccctggaggtgagcgacagcgacggccccgccagcttccccagcagcagcagccagagccagctgccccccggcgccgccctgcagggcagcggcgaccccgagggccagaacccctgcttcctgagaagcttcgtgagagcccacgacagcgccggcgagggcagcctgggcagcagccaggccctgggcgtgagcagcggcctgctgaagaccagacccagcctgcccgccagactggacagatggcccttcagcgaccccgacgtggagggccagctgcccagaaagggcggcgagcagggcaaggagagcctggtgcagtgcgtgaaggtgatgaccctgaacgtgagaaagctgtgcgtgcaggtgagctgcctgttcccccagagcaccaacatcatcatcaagcacgtgcacgtggaccaggccctgttcatgtgccaggccctgtgctgcaccctgagctacagcgtgctgaccaccttcaccagatag

SEQ ID NO: 13269 - DNA, 354 bp, synthetic construct
  source 1..354: mol_type = other DNA; note = Synthetic coding sequence
atggtgagaaagatcaccctggtgagcgccgcccccggcaaggtgatctgcgagatgaaggtggaggaggagcacaccaacgccatcggcaccctgcacggcggcctgaccgccaccctggtggacaacatcagcaccatggccctgctgtgcaccgagagaggcgcccccggcgtgagcgtggacatgaacatcacctacatgagccccgccaagctgggcgaggacatcgtgatcaccgcccacgtgctgaagcagggcaagaccctggccttcaccagcgtggacctgaccaacaaggccaccggcaagctgatcgcccagggcagacacaccaagcacctgggcaactag

SEQ ID NO: 13270 - DNA, 840 bp, synthetic construct
  source 1..840: mol_type = other DNA; note = Synthetic coding sequence
atgaccagcggcaagatcaagaagttcatccaggagaacatcttcggcatctgcccccacatgaccgaggacaacaaggacctgatccagggcaaggacctgctgatcgcctactacgacgtggactacgagaagaacgccaagggcagcaactactggagaaacagagtgatgatggtggccaagaagttcctggacgccggccacaagctgaacttcgccgtggccagcagaaagaccttcagccacgagctgagcgacttcggcctggagagcaccgccggcgagatccccgtggtggccatcagaaccgccaagggcgagaagttcgtgatgcaggaggagttcagcagagacggcaaggccctggagagattcctgcaggactacttcgacggcaacctgaagagatacctgaagagcgagcccatccccgagagcaacgacggccccgtgaaggtggtggtggccgagaacttcgacgagatcgtgaacaacgagaacaaggacgtgctgatcgagttctacgccccctggtgcggccactgcaagaacctggagcccaagtacaaggagctgggcgagaagctgagcaaggaccccaacatcgtgatcgccaagatggacgccaccgccaacgacgtgcccagcccctacgaggtgagaggcttccccaccatctacttcagccccgccaacaagaagctgaaccccaagaagtacgagggcggcagagagctgagcgacttcatcagctacctgcagagagaggccaccaacccccccgtgatccaggaggagaagcccaagaagaagaagaaggcccaggaggacctgtag

SEQ ID NO: 13271 - DNA, 3228 bp, synthetic construct
  source 1..3228: mol_type = other DNA; note = Synthetic coding sequence
atgagccagggcttccaccccgagagagaccccagcgacctgaagaaggtgaaggccgtggaggagaacggcgaggaggccgagcccgtgagaaacggcgccgagagcgtgagcgagggcgagggcatcgacgccaacagcggcagcaccgacagcagcggcgacggcgtgaccttccccttcaagcccgagagctggaagcccaccgacaccgagggcaagaagcagtacgacagagagttcctgctggacttccagttcatgcccgcctgcatccagaagcccgagggcctgccccccatcagcgacgtggtgctggacaagatcaaccagcccaagctgcccatgagaaccctggaccccagaatcctgcccagaggccccgacttcacccccgccttcgccgacttcggcagacagacccccggcggcagaggcgtgcccatctgcaaggtgcagagcagacacggcctgcccatcctggagcagagcaaggcccccacctgcccccccctggtgatgagccacccccccatgaagagcctgcccctgggcctgctgaacgtgggcagcagaagaagccagcccggccagagaagagagcccagaaagatcatcaccgtgagcgtgaaggaggacgtgcacctgaagaaggccgagaacgcctggaagcccagccagaagagagacagccaggccgacgaccccgagaacatcaagacccaggagctgttcagaaaggtgagaagcatcctgaacaagctgaccccccagatgttcaaccagctgatgaagcaggtgagcggcctgaccgtggacaccgaggagagactgaagggcgtgatcgacctggtgttcgagaaggccatcgacgagcccagcttcagcgtggcctacgccaacatgtgcagatgcctggtgaccctgaaggtgcccatggccgacaagcccggcaacaccgtgaacttcagaaagctgctgctgaacagatgccagaaggagttcgagaaggacaaggccgacgacgacgtgttcgagaagaagcagaaggagctggaggccgccagcgcccccgaggagagaaccagactgcacgacgagctggaggaggccaaggacaaggccagaagaagaagcatcggcaacatcaagttcatcggcgagctgttcaagctgaagatgctgaccgaggccatcatgcacgactgcgtggtgaagctgctgaagaaccacgacgaggagagcctggagtgcctgtgcagactgctgaccaccatcggcaaggacctggacttcgagaaggccaagcccagaatggaccagtacttcaaccagatggagaagatcgtgaaggagagaaagaccagcagcagaatcagattcatgctgcaggacgtgatcgacctgagactgtgcaactgggtgagcagaagagccgaccagggccccaagaccatcgagcagatccacaaggaggccaagatcgaggagcaggaggagcagagaaaggtgcagcagctgatgaccaaggagaagagaagacccggcgtgcagagagtggacgagggcggctggaacaccgtgcagggcgccaagaacagcagagtgctggaccccagcaagttcctgaagatcaccaagcccaccatcgacgagaagatccagctggtgcccaaggcccagctgggcagctggggcaagggcagcagcggcggcgccaaggccagcgagaccgacgccctgagaagcagcgccagcagcctgaacagattcagcgccctgcagccccccgcccccagcggcagcacccccagcacccccgtggagttcgacagcagaagaaccctgaccagcagaggcagcatgggcagagagaagaacgacaagcccctgcccagcgccaccgccagacccaacaccttcatgagaggcggcagcagcaaggacctgctggacaaccagagccaggaggagcagagaagagagatgctggagaccgtgaagcagctgaccggcggcgtggacgtggagagaaacagcaccgaggccgagagaaacaagaccagagagagcgccaagcccgagatcagcgccatgagcgcccacgacaaggccgccctgagcgaggaggagctggagagaaagagcaagagcatcatcgacgagttcctgcacatcaacgacttcaaggaggccatgcagtgcgtggaggagctgaacgcccagggcctgctgcacgtgttcgtgagagtgggcgtggagagcaccctggagagaagccagatcaccagagaccacatgggccagctgctgtaccagctggtgcagagcgagaagctgagcaagcaggacttcttcaagggcttcagcgagaccctggagctggccgacgacatggccatcgacatcccccacatctggctgtacctggccgagctggtgacccccatgctgaaggagggcggcatcagcatgagagagctgaccatcgagttcagcaagcccctgctgcccgtgggcagagccggcgtgctgctgagcgagatcctgcacctgctgtgcaagcagatgagccacaagaaggtgggcgccctgtggagagaggccgacctgagctggaaggacttcctgcccgagggcgaggacgtgcacaacttcctgctggagcagaagctggacttcatcgagagcgacagcccctgcagcagcgaggccctgagcaagaaggagctgagcgccgaggagctgtacaagagactggagaagctgatcatcgaggacaaggccaacgacgagcagatcttcgactgggtggaggccaacctggacgagatccagatgagcagccccaccttcctgagagccctgatgaccgccgtgtgcaaggccgccatcatcgccgacagcagcaccttcagagtggacaccgccgtgatcaagcagagagtgcccatcctgctgaagtacctggacagcgacaccgagaaggagctgcaggccctgtacgccctgcaggccagcatcgtgaagctggaccagcccgccaacctgctgagaatgttcttcgactgcctgtacgacgaggaggtgatcagcgaggacgccttctacaagtgggagagcagcaaggaccccgccgagcagaacggcaagggcgtggccctgaagagcgtgaccgccttcttcacctggctgagagaggccgaggaggagagcgaggacaactag

SEQ ID NO: 13272 - DNA, 474 bp, synthetic construct
  source 1..474: mol_type = other DNA; note = Synthetic coding sequence
atgaagtgcatcccctacagcgtgctgctgaaggacctggagatgagaaacctgagagagctggaggacctgatcatcgaggccgtgtacaccgacatcatccagggcaagctggaccagagaaaccagctgctggaggtggacttctgcatcggcagagacatcagaaagaaggacatcaacaacatcgtgaagaccctgcacgagtggtgcgacggctgcgaggccgtgctgctgggcatcgagcagcaggtgctgagagccaaccagtacaaggagaaccacaacagaacccagcagcaggtggaggccgaggtgaccaacatcaagaagaccctgaaggccaccgccagcagcagcgcccaggagatggagcagcagctggccgagagagagtgccccccccacgccgagcagagacagcccaccaagaagatgagcaaggtgaagggcctggtgagcagcagacactag

SEQ ID NO: 13273 - DNA, 837 bp, synthetic construct
  source 1..837: mol_type = other DNA; note = Synthetic coding sequence
atggactgcagagagatggacctgtacgaggactaccagagccccttcgacttcgacgccggcgtgaacaagagctacctgtacctgagccccagcggcaacagcagcccccccggcagccccaccctgcagaagttcggcctgctgagaaccgaccccgtgcccgaggagggcgaggacgtggccgccaccatcagcgccaccgagaccctgagcgaggaggagcaggaggagctgagaagagagctggccaaggtggaggaggagatccagaccctgagccaggtgctggccgccaaggagaagcacctggccgagatcaagagaaagctgggcatcaacagcctgcaggagctgaagcagaacatcgccaagggctggcaggacgtgaccgccaccagcgcctacaagaagaccagcgagaccctgagccaggccggccagaaggccagcgccgccttcagcagcgtgggcagcgtgatcaccaagaagctggaggacgtgaagaacagccccaccttcaagagcttcgaggagaaggtggagaacctgaagggcagccccaagaacgtggagagcttcgccagcatgctgagacacagccccctgacccagatgggccccgccaaggacaagctggtgatcggcagaatcttccacatcgtggagaacgacctgtacatcgacttcggcggcaagttccactgcgtgtgcagaagacccgaggtggacggcgagagccccatcagctggtacgccgtgtggagaagattcagccaggtgatgatcacctgcttcagcagcaacagcgacttcggcaagcacagaaagagatag

SEQ ID NO: 13274 - DNA, 3123 bp, synthetic construct; identical to SEQ ID NO: 10213
  source 1..3123: mol_type = other DNA; note = Synthetic coding sequence

SEQ ID NO: 13275 - DNA, 1809 bp, synthetic construct
  source 1..1809: mol_type = other DNA; note = Synthetic coding sequence
atgagcgacaagagcgacctgaaggccgagctggagagaaagaagcagagactggcccagatcagagaggagaagaagagaaaggaggaggagagaaagaagaaggaggccgacatgcagcagaagaaggagcccgtgcaggacgacagcgacctggacagaaagagaagagagaccgaggccctgctgcagagcatcggcatcagccccgagccccccctggtgcccacccccatgagccccagcagcaagagcgtgagcacccccagcgaggccggcagccaggacagcggcgacctgggccccctgaccagaagaagactgcacaagctgggcgtgagcaaggtgacccaggtggacttcctgcccagagaggtggtgagctacagcaaggagacccagacccccctggccacccaccagagcgaggaggacgaggaggacgaggagatggtggagagcaaggtgggccaggacagcgagctggagaaccaggacaagaagcaggaggtgaaggaggccccccccagagagctgaccgaggaggagaagcagcagatcctgcacagcgaggagttcctgatcttcttcgacagaaccatcagagtgatcgagagagccctggccgaggacagcgacatcttcttcgactacagcggcagagagctggaggagaaggacggcgacgtgcaggccggcgccaacctgagcttcaacagacagttctacgacgagcactggagcaagcacagagtggtgacctgcatggactggagcctgcagtaccccgagctgatggtggccagctacaacaacaacgaggacgccccccacgagcccgacggcgtggccctggtgtggaacatgaagttcaagaagaccacccccgagtacgtgttccactgccagagcagcgtgatgagcgtgtgcttcgccagattccaccccaacctggtggtgggcggcacctacagcggccagatcgtgctgtgggacaacagaagccacagaagaacccccgtgcagagaacccccctgagcgccgccgcccacacccaccccgtgtactgcgtgaacgtggtgggcacccagaacgcccacaacctgatcaccgtgagcaccgacggcaagatgtgcagctggagcctggacatgctgagcaccccccaggagagcatggagctggtgtacaacaagagcaagcccgtggccgtgaccggcatggccttccccaccggcgacgtgaacaacttcgtggtgggcagcgaggagggcaccgtgtacaccgcctgcagacacggcagcaaggccggcatcggcgaggtgttcgagggccaccagggccccgtgaccggcatcaactgccacatggccgtgggccccatcgacttcagccacctgttcgtgaccagcagcttcgactggaccgtgaagctgtggaccaccaagcacaacaagcccctgtacagcttcgaggacaacgccgactacgtgtacgacgtgatgtggagccccgtgcaccccgccctgttcgcctgcgtggacggcatgggcagactggacctgtggaacctgaacaacgacaccgaggtgcccaccgccagcgtggccatcgagggcgccagcgccctgaacagagtgagatgggcccaggccggcaaggaggtggccgtgggcgacagcgagggcagaatctgggtgtacgacgtgggcgagggcctggccatgctgcccggctggagccagaacagctggacccaggccatcctgctgtgctggccccccaaggtgctgggcctgcagacctag

SEQ ID NO: 13276 - DNA, 2847 bp, synthetic construct
  source 1..2847: mol_type = other DNA; note = Synthetic coding sequence
atgtacggcagcgccagaagcgtgggcaaggtggagcccagcagccagagccccggcagaagccccagactgcccagaagccccagactgggccacagaagaaccaacagcaccggcggcagcagcggcagcagcgtgggcggcggcagcggcaagaccctgagcatggagaacatccagagcctgaacgccgcctacgccaccagcggccccatgtacctgagcgaccacgagaacgtgggcagcgagacccccaagagcaccatgaccctgggcagaagcggcggcagactgccctacggcgtgagaatgaccgccatgggcagcagccccaacatcgccagcagcggcgtggccagcgacaccatcgccttcggcgagcaccacctgccccccgtgagcatggccagcaccgtgccccacagcctgagacaggccagagacaacaccatcatggacctgcagacccagctgaaggaggtgctgagagagaacgacctgctgagaaaggacgtggaggtgaaggagagcaagctgagcagcagcatgaacagcatcaagaccttctggagccccgagctgaagaaggagagagccctgagaaaggacgaggccagcaagatcaccatctggaaggagcagtacagagtggtgcaggaggagaaccagcacatgcagatgaccatccaggccctgcaggacgagctgagaatccagagagacctgaaccagctgttccagcaggacagcagcagcagaaccggcgagccctgcgtggccgagctgaccgaggagaacttccagagactgcacgccgagcacgagagacaggccaaggagctgttcctgctgagaaagaccctggaggagatggagctgagaatcgagacccagaagcagaccctgaacgccagagacgagagcatcaagaagctgctggagatgctgcagagcaagggcctgagcgccaaggccaccgaggaggaccacgagagaaccagaagactggccgaggccgagatgcacgtgcaccacctggagagcctgctggagcagaaggagaaggagaacagcatgctgagagaggagatgcacagaagattcgagaacgcccccgacagcgccaagaccaaggccctgcagaccgtgatcgagatgaaggacagcaagatcagcagcatggagagaggcctgagagacctggaggaggagatccagatgctgaagagcaacggcgccctgagcaccgaggagagagaggaggagatgaagcagatggaggtgtacagaagccacagcaagttcatgaagaacaagatcggccaggtgaagcaggagctgagcagaaaggacaccgagctgctggccctgcagaccaagctggagaccctgaccaaccagttcagcgacagcaagcagcacatcgaggtgctgaaggagagcctgaccgccaaggagcagagagccgccatcctgcagaccgaggtggacgccctgagactgagactggaggagaaggagaccatgctgaacaagaagaccaagcagatccaggacatggccgaggagaagggcacccaggccggcgagatccacgacctgaaggacatgctggacgtgaaggagagaaaggtgaacgtgctgcagaagaagatcgagaacctgcaggagcagctgagagacaaggagaagcagatgagcagcctgaaggagagagtgaagagcctgcaggccgacaccaccaacaccgacaccgccctgaccaccctggaggaggccctggccgagaaggagagaaccatcgagagactgaaggagcagagagacagagacgagagagagaagcaggaggagatcgacaactacaagaaggacctgaaggacctgaaggagaaggtgagcctgctgcagggcgacctgagcgagaaggaggccagcctgctggacctgaaggagcacgccagcagcctggccagcagcggcctgaagaaggacagcagactgaagaccctggagatcgccctggagcagaagaaggaggagtgcctgaagatggagagccagctgaagaaggcccacgaggccgccctggaggccagagccagccccgagatgagcgacagaatccagcacctggagagagagatcaccagatacaaggacgagagcagcaaggcccaggccgaggtggacagactgctggagatcctgaaggaggtggagaacgagaagaacgacaaggacaagaagatcgccgagctggagagcctgttcagcagacaggtgaaggaccagaacaagaaggtggccaacctgaagcacaaggagcaggtggagaagaagaagagcgcccagatgctggaggaggccagaagaagagaggacaacctgaacgacagcagccagcagctgcaggtggaggagctgctgatggccatggagaaggtgaagcaggagctggagagcatgaaggccaagctgagcagcacccagcagagcctggccgagaaggagacccacctgaccaacctgagagccgagagaagaaagcacctggaggaggtgctggagatgaagcaggaggccctgctggccgccatcagcgagaaggacgccaacatcgccctgctggagctgagcagcagcaagaagaagacccaggaggaggtggccgccctgaagagagagaaggacagactggtgcagcagctgaagcagcagacccagaacagaatgaagctgatggccgacaactacgaggacgaccacttcaagagcagccacagcaaccagaccaaccacaagcccagccccgaccaggacgaggaggagggcatctgggcctag

SEQ ID NO: 13277 - DNA, 2742 bp, synthetic construct
  source 1..2742: mol_type = other DNA; note = Synthetic coding sequence
atggaggtgggcagcgaggaggagaagtgggagaagctggacgccgagttcgaccacttcgtggtggacatgaagcccttcgtgctgaagctgccccacagaaccgagagacagagatgcgccctgtggatcagaaagctgtgcgagcccagcggcaccggcgccggcatcatgggcagaaagaacagaaacctgtacgccaagctgctgctgcacatgctgaagagaggcgccctggagggccccttcacccacagacccgagcccggcaccctgaagatcctgcccagctacatgagcatctacttcgacgagcccaaccccgccagagccaagggcagcagccccgagggcctgcccgcctgggtgctgggcgagctggagaccagcgagcacaagctgaacgagagctggaagctgagcagcggcgaggacaacaccctggtgcagagccccaccgacgtgtacagcagagagcagtacaccggcaagctgagagtgagaagccacagcctgagccccacccacagagaggacggccagaacatcacccccaagatctgcgaggtgtacagcaagaagagccccgtgagcctggacgacagcgacatcgaggccagactgaacagctggaacctgggcctggacatgaagaccaagatgatggaggccaagttccacgaggagaagctgaagctgcagcagaagcacgacgccgacgtgcagaagatcctggagagaaagaacaacgagatcgaggagctgaagaccctgtacagaagcaagcagcacgagaccgaggagaccatcagaaagctggagaagaaggtgcagaccctgatcagagactgccaggtgatcagagagaccaaggaggaccagatcgccgagctgaagaagatctgcgagcagagcaccgagagcctgaacaacgactgggagaagaagctgcacaacgccgtggccgagatggagcaggagaagttcgacctgcagaagcagcacaccgagaacatccaggagctgctggaggacaccaacgtgagactgaacaagatggagagcgagtacatggcccagacccagagcaccaaccacatgatcaaggagctggaggccagagtgcagcagctgaccggcgaggccgagaacagcaacctgcagagacagaagctgatccaggagaaggccgagctggagagatgctaccagatcacctgcagcgagctgcaggaggtgaaggccagaagaaacaccctgcacaaggagaaggaccacctggtgaacgactacgagcagaacatgaagctgctgcagaccaagtacgacgccgacatcaacctgctgaagcaggagcacgccctgagcgccagcaaggccagcagcatgatcgaggagctggagcagaacgtgtgccagctgaagcagcagctgcaggagagcgagctgcagagaaagcagcagctgagagaccaggagaacaagttccagatggagaagagccacctgaagcacatctacgagaagaaggcccacgacctgcagagcgagctggacaagggcaaggaggacacccagaagaagatccacaagttcgaggaggccctgaaggagaaggaggagcagctgaccagagtgaccgaggtgcagagactgcaggcccagcaggccgacgccgccctggaggagttcaagagacaggtggagctgaacagcgagaaggtgtacgccgagatgaaggagcagatggagaaggtggaggccgacctgaccagaagcaagagcctgagagagaagcagagcaaggagttcctgtggcagctggaggacatcagacagagatacgagcagcagatcgtggagctgaagctggagcacgagcaggagaagacccacctgctgcagcagcacaacgccgagaaggacagcctggtgagagaccacgagagagagatcgagaacctggagaagcagctgagagccgccaacatggagcacgagaaccagatccaggagttcaagaagagagacgcccaggtgatcgccgacatggaggcccaggtgcacaagctgagagaggagctgatcaacgtgaacagccagagaaagcagcagctggtggagctgggcctgctgagagaggaggagaagcagagagccaccagagagcacgagatcgtggtgaacaagctgaaggccgagagcgagaagatgaagatcgagctgaagaagacccacgccgccgagaccgagatgaccctggagaaggccaacagcaagctgaagcagatcgagaaggagtacacccagaagctggccaagagcagccagatcatcgccgagctgcagaccaccatcagcagcctgaaggaggagaacagccagcagcagctggccgccgagagaagactgcaggacgtgagacagaagttcgaggacgagaagaagcagctgatcagagacaacgaccaggccatcaaggtgctgcaggacgagctggagaacagaagcaaccaggtgagatgcgccgagaagaagctgcagcacaaggagctggagagccaggagcagatcacctacatcagacaggagtacgagaccaagctgaagggcctgatgcccgccagcctgagacaggagctggaggacaccatcagcagcctgaagagccaggtgaacttcctgcagaagagagccagcatcctgcaggaggagctgaccacctaccagggcagaagatag

SEQ ID NO: 13278 - DNA, 825 bp, synthetic construct
  source 1..825: mol_type = other DNA; note = Synthetic coding sequence
atgcaggacgagaagctgagagacgagaccgagcagcccgtgagcaaggtgatcgagagaaacagactgagaaccgtgctgaagaacctgagcctgctgaagctgctgaagagcagcaacagaagaatccaggagctgcacaagctggccaagagatgctggcacagcctgctgagcgtgcccaagatcctgagaatcagcagcggcgagaacagcgcctgcaacaagaccaagcagaacaacgaggagttccaggagatcggctgcagcgagaaggagctgaagagcaagaagctggagagcaccggcgaccccaagaagaaggagtacaaggagtggaagagccaggtgcagagcggcatgagaaacaaggagaagaccagcctggccgccatgcccagaaaggagaagcacatcgagcccgaggtgcccagaaccagcagagacgacagcctgaaccccggcgtgcagggcagacagcccctgaccgagggccccagagtgatcttcatcaagccctacagaaacagaacccccatgggccacatgaagcagctggacgtggccgaccagtggatctggttcgagggcctgcccaccagaatccacctgcccgcccccagagtgatgtgcagaagcagcaccctgagatgggtgaagagaagatgcaccagattctgcagcgccagcctggagatgcccatgtggcacccctacaaggtggacgtgacctggaccagagccagaggcgccagcagaggctggagaagcagacaccagctgaagggcagaaacggctggagaaacagcagagtgtacaagtag

SEQ ID NO: 13279 - DNA, 156 bp, synthetic construct
  source 1..156: mol_type = other DNA; note = Synthetic coding sequence
atgcagctgagacacatcggcgacaacatcgaccacagaatggtgagagaggacctgcagcaggacggcagagacgccctggaccacttcgtgttcttcttcttcagaagagtgcaggtgctgctgcacttcttctggaacaaccacctgctgtag

SEQ ID NO: 13280 - DNA, 444 bp, synthetic construct
  source 1..444: mol_type = other DNA; note = Synthetic coding sequence
atggccggcggcgccagagaggtgctgaccctgcagctgggccacttcgccggcttcgtgggcgcccactggtggaaccagcaggacgccgccctgggcagagccaccgacagcaaggagccccccggcgagctgtgccccgacgtgctgtacagaaccggcagaaccctgcacggccaggagacctacacccccagactgatcctgatggacctgaagggcagcctgagcagcctgaaggaggagggcggcctgtacagagacaagcagctggacgccgccatcgcctggcagggcaagctgaccacccacaaggaggagctgtaccccaagaacccctacctgcaggacttcctgagcgccgaggtgagagccagcgtgctgaacttcctgaccagatgccacaacctgagagtgagcatcggcgccggcagcgccgagtag

SEQ ID NO: 13281 - DNA, 1677 bp, synthetic construct
  source 1..1677: mol_type = other DNA; note = Synthetic coding sequence
atgagcgtgagcgtgcacgagaccagaaagagcagaagcagcaccggcagcatgaacgtgaccctgttccacaaggccagccaccccgactgcgtgctggccgccagcagcagatacttcgaggccatgttcagccacggcctgagagagagcagagacgacaccgtgaacttccaggacaacctgcaccccgaggtgctggagctgctgctggacttcgcctacagcagcagaatcgccatcaacgaggagaacgccgagagcctgctggaggccggcgacatgctgcagttccacgacgtgagagacgccgccgccgagttcctggagaagaacctgttccccagcaactgcctgggcatgatgctgctgagcgacgcccaccagtgcagaagactgtacgagttcagctggagaatgtgcctggtgcacttcgagaccgtgagacagagcgaggacttcaacagcctgagcaaggacaccctgctggacctgatcagcagcgacgagctggagaccgaggacgagagagtggtgttcgaggccatcctgcagtgggtgaagcacgacctggagcccagaaaggtgcacctgcccgagctgctgagaagcgtgagactggccctgctgcccagcgactgcctgcaggaggccgtgagcagcgaggccctgctgatggccgacgagagaaccaagctgatcatggacgaggccctgagatgcaagaccagaatcctgcagaacgacggcgtggtgaccagcccctgcgccagacccagaaaggccggccacaccctgctgatcctgggcggccagaccttcatgtgcgacaagatctaccaggtggaccacaaggccaaggagatcatccccaaggccgacctgcccagccccagaaaggagttcagcgccagcgccatcggctgcaaggtgtacgtgaccggcggcagaggcagcgagaacggcgtgagcaaggacgtgtgggtgtacgacaccgtgcacgaggagtggagcaaggccgcccccatgctgatcgccagattcggccacggcagcgccgagctggagaactgcctgtacgtggtgggcggccacaccagcctggccggcgtgttccccgccagccccagcgtgagcctgaagcaggtggagaagtacgaccccggcgccaacaagtggatgatggtggcccccctgagagacggcgtgagcaacgccgccgtggtgagcgccaagctgaagctgttcgtgttcggcggcaccagcatccacagagacatggtgagcaaggtgcagtgctacgaccccagcgagaacagatggaccatcaaggccgagtgcccccagccctggagatacaccgccgccgccgtgctgggcagccagatcttcatcatgggcggcgacaccgagttcaccgccgccagcgcctacagattcgactgcgagaccaaccagtggaccagaatcggcgacatgaccgccaagagaatgagctgccacgccctggccagcggcaacaagctgtacgtggtgggcggctacttcggcacccagagatgcaagaccctggactgctacgaccccaccagcgacacctggaactgcatcaccaccgtgccctacagcctgatccccaccgccttcgtgagcacctggaagcacctgcccgcctag

SEQ ID NO: 13282 - DNA, 2916 bp, synthetic construct
  source 1..2916: mol_type = other DNA; note = Synthetic coding sequence
atgaacttcctgagaggcgtgatgggcggccagagcgccggcccccagcacaccgaggccgagaccgtgagaggcgccgccggcctgggcctgggcaagggcagcggccagggcagaggcagaagcaccagaagacccgaggagtgcggcctgaagttcagacacagcttcagactggtgaagcacatcctgtaccacgtgaccatcaacgtgagcgacagcgagatcatcggctacgccctggacaccctgtacaacatcatcagcaacgaggaggaggaggaggtgggcggcagccaggaggagaacagcaccagacagagcgaggacctgggcagccagttcaccgagatcttcatcaagcagcaggagaacgtgaccctgctgctgagcctgctggaggagttcgacttccacgtgagatggcccggcgtgaagctgctgaccagcctgctgaagcagctgggcccccaggtgcagcagatcatcctggtgagccccatgggcgtgagcagactgatggacctgctggccgacagcagagaggtgatcagaaacgacggcgtgctgctgctgcaggccctgaccagaagcaacggcgccatccagaagatcgtggccttcgagaacgccttcgagagactgctggacatcatcagcgaggagggcaacagcgacggcggcatcgtggtggaggactgcctgatcctgctgcagaacctgctgaagaacaacaacagcaaccagaacttcttcaaggagggcagctacatccagagaatgaagccctggttcgaggtgggcgacgagaacagcggctggagcgcccagaaggtgaccaacctgcacctgatgctgcagctggtgagagtgctggtgagccccaccaacccccccggcgccaccagcagctgccagaaggccatgttccagtgcggcctgctgcagcagctgtgcaccatcctgatggccaccggcgtgcccgccgacatcctgaccgagaccatcaacaccgtgagcgaggtgatcagaggctgccaggtgaaccaggactacttcgccagcgtgaacgcccccagcaacccccccagacccgccatcgtggtgctgctgatgagcatggtgaacgagagacagcccttcgtgctgagatgcgccgtgctgtactgcttccagtgcttcctgtacaagaaccagaagggccagggcgagatcgtgagcaccctgctgcccagcaccatcgacgccaccggcaacagcgtgagcgccggccagctgctgtgcggcggcctgttcagcaccgacagcctgagcaactggtgcgccgccgtggccctggcccacgccctgcaggagaacgccacccagaaggagcagctgctgagagtgcagctggccaccagcatcggcaacccccccgtgagcctgctgcagcagtgcaccaacatcctgagccagggcgacaagatcgacagaagaggcagcaagatccagaccagagtgggcctgctgatgctgctgtgcacctggctgagcaactgccccatcgccgtgacccacttcctgcacaacagcgccaacgtgcccttcctgaccggccagatcgccgagaacctgggcgaggaggagcagctggtgcagggcctgtgcgccctgctgctgggcatcagcatctacttcaacgacaacagcctggagagctacatgaaggagaagctgaagcagctgatcgagaagagaatcggcaaggagaacttcatcgagaagctgggcttcatcagcaagcacgagctgtacagcagagccagccagaagccccagcccaacttccccagccccgagtacatgatcttcgaccacgagttcaccaagctggtgaaggagctggagggcgtgatcaccaaggccatctacaagagcagcgaggaggacaagaaggaggaggaggtgaagaagaccctggagcagcacgacaacatcgtgacccactacaagaacatgatcagagagcaggacctgcagctggaggagctgagacagcaggtgagcaccctgaagtgccagaacgagcagctgcagaccgccgtgacccagcaggtgagccagatccagcagcacaaggaccagtacaacctgctgaagatccagctgggcaaggacaaccagcaccagggcagctacagcgagggcgcccagatgaacggcatccagcccgaggagatcggcagactgagagaggagatcgaggagctgaagagaaaccaggagctgctgcagagccagctgaccgagaaggacagcatgatcgagaacatgaagagcagccagaccagcggcaccaacgagcagagcagcgccatcgtgagcgccagagacagcgagcaggtggccgagctgaagcaggagctggccaccctgaagagccagctgaacagccagagcgtggagatcaccaagctgcagaccgagaagcaggagctgctgcagaagaccgaggccttcgccaagagcgtggaggtgcagggcgagaccgagaccatcatcgccaccaagaccaccgacgtggagggcagactgagcgccctgctgcaggagaccaaggagctgaagaacgagatcaaggccctgagcgaggagagaaccgccatcaaggagcagctggacagcagcaacagcaccatcgccatcctgcagaccgagaaggacaagctggagctggagatcaccgacagcaagaaggagcaggacgacctgctggtgctgctggccgaccaggaccagaagatcctgagcctgaagaacaagctgaaggacctgggccaccccgtggaggaggaggacgagctggagagcggcgaccaggaggacgaggacgacgagagcgaggaccccggcaaggacctggaccacatctag

SEQ ID NO: 13283 - DNA, 258 bp, synthetic construct
  source 1..258: mol_type = other DNA; note = Synthetic coding sequence
atgggcaacagcgacagccagtacaccctgcagggcagcaagaaccacagcaacaccatcaccggcgccaagcagatcccctgcagcctgaagatcagaggcatccacgccaaggaggagaagagcctgcacggctggggccacggcagcaacggcgccggctacaagagcagaagcctggccagaagctgcctgagccacttcaagagcaaccagccctacgccagcagactgggcggccccacctgcaaggtgtag

SEQ ID NO: 13284 - DNA, 174 bp, synthetic construct
  source 1..174: mol_type = other DNA; note = Synthetic coding sequence
tgaggcagagcccccggccccgccatcggcggcagaagagccggcgacagctgccccggctggagaagaagaagcagaagcagaggcagaggccagagactgagccacggccccagaagaagaccccagctgctgaccgagaccagaagacccgtgctggtgcagtggctgtag

SEQ ID NO: 13285 - DNA, 936 bp, synthetic construct
  source 1..936: mol_type = other DNA; note = Synthetic coding sequence
atggtgagcctgagagtgaaccccctgagcctggtggagatcatcctgcacgtggtgagacagatgaccgaccccaacgtggccctgaccttcctggagaagaccagagagaaggtgaagagcagcgacgaggccgtgatcctgtgcaagaccgccatcggcgccctgaagctgaacatcggcgacctgcaggtgaccaaggagaccatcgaggacgtggaggagatgctgaacaacctgcccggcgtgaccagcgtgcacagcagattctacgacctgagcagcaagtactaccagaccatcggcaaccacgccagctactacaaggacgccctgagattcctgggctgcgtggacatcaaggacctgcccgtgagcgagcagcaggagagagccttcaccctgggcctggccggcctgctgggcgagggcgtgttcaacttcggcgagctgctgatgcaccccgtgctggagagcctgagaaacaccgacagacagtggctgatcgacaccctgtacgccttcaacagcggcaacgtggagagattccagaccctgaagaccgcctggggccagcagcccgacctggccgccaacgaggcccagctgctgagaaagatccagctgctgtgcctgatggagatgaccttcaccagacccgccaaccacagacagctgaccttcgaggagatcgccaagagcgccaagatcaccgtgaacgaggtggagctgctggtgatgaaggccctgagcgtgggcctggtgaagggcagcatcgacgaggtggacaagagagtgcacatgacctgggtgcagcccagagtgctggacctgcagcagatcaagggcatgaaggacagactggagttctggtgcaccgacgtgaagagcatggagatgctggtggagcaccaggcccacgacatcctgacctag

SEQ ID NO: 13286 - DNA, 1161 bp, synthetic construct
  source 1..1161: mol_type = other DNA; note = Synthetic coding sequence
atgaagagcctgaaggcctgcaagagagagatcaagagcgtgatgaacaccgccggcaacagcgcccccagcctgttcctgaagagcaacttcgagtacctgagaggcaactacagaaaggccgtgaagctgctgaacagcagcaacatcgccgagcaccccggcttcatgaagaccggcgagtgcctgagatgcatgttctggaacaacctgggctgcatccacttcgccatgagcaagcacaacctgggcatcttctacttcaagaaggccctgcaggagaacgacaacgtgtgcgcccagctgagcgccggcagcaccgaccccggcaagaagttcagcggcagacccatgtgcaccctgctgaccaacaagagatacgagctgctgtacaactgcggcatccagctgctgcacatcggcagacccctggccgccttcgagtgcctgatcgaggccgtgcaggtgtaccacgccaaccccagactgtggctgagactggccgagtgctgcatcgccgccaacaagggcaccagcgagcaggagaccaagggcctgcccagcaagaagggcatcgtgcagagcatcgtgggccagggctaccacagaaagatcgtgctggccagccagagcatccagaacaccgtgtacaacgacggccagagcagcgccatccccgtggccagcatggagttcgccgccatctgcctgagaaacgccctgctgctgctgcccgaggagcagcaggaccccaagcaggagaacggcgccaagaacagcaaccagctgggcggcaacaccgagagcagcgagagcagcgagacctgcagcagcaagagccacgacggcgacaagttcatccccgccccccccagcagccccctgagaaagcaggagctggagaacctgaagtgcagcatcctggcctgcagcgcctacgtggccctggccctgggcgacaacctgatggccctgaaccacgccgacaagctgctgcagcagcccaagctgagcggcagcctgaagttcctgggccacctgtacgccgccgaggccctgatcagcctggacagaatcagcgacgccatcacccacctgaaccccgagaacgtgaccgacgtgagcctgggcatcagcagcaacgagcaggaccagggctag

SEQ ID NO: 13287 - DNA, 1596 bp, synthetic construct
  source 1..1596: mol_type = other DNA; note = Synthetic coding sequence
atgctgcaggagctgaacttcggcgcctacctgggcctgcccgccttcctgctgcccctgaaccaggaggacaacaccaacctggccagagtgctgaccaaccacatccacaccggccaccacagcagcatgttctggatgagagtgcccctggtggcccccgaggacctgagagacgacatcatcgagaacgcccccaccacccacaccgaggagtacagcggcgaggagaagacctggatgtggtggcacaacttcagaaccctgtgcgactacagcaagagaatcgccgtggccctggagatcggcgccgacctgcccagcaaccacgtgatcgacagatggctgggcgagcccatcaaggccgccatcctgcccaccagcatcttcctgaccaacaagaagggcttccccgtgctgagcaagatgcaccagagactgatcttcagactgctgaagctggaggtgcagttcatcatcaccggcaccaaccaccacagcgagaaggagttctgcagctacctgcagtacctggagtacctgagccagaacagacccccccccaacgcctacgagctgttcgccaagggctacgaggactacctgcagagccccctgcagcccctgatggacaacctggagagccagacctacgaggtgttcgagaaggaccccatcaagtacagccagtaccagcaggccatctacaagtgcctgctggacagagtgcccgaggaggagaaggacaccaacgtgcaggtgctgatggtgctgggcgccggcagaggccccctggtgaacgccagcctgagagccgccaagcaggccgacagaagaatcaagctgtacgccgtggagaagaaccccaacgccgtggtgaccctggagaactggcagttcgaggagtggggcagccaggtgaccgtggtgagcagcgacatgagagagtgggtggcccccgagaaggccgacatcatcgtgagcgagctgctgggcagcttcgccgacaacgagctgagccccgagtgcctggacggcgcccagcacttcctgaaggacgacggcgtgagcatccccggcgagtacaccagcttcctggcccccatcagcagcagcaagctgtacaacgaggtgagagcctgcagagagaaggacagagaccccgaggcccagttcgagatgccctacgtggtgagactgcacaacttccaccagctgagcgccccccagccctgcttcaccttcagccaccccaacagagaccccatgatcgacaacaacagatactgcaccctggagttccccgtggaggtgaacaccgtgctgcacggcttcgccggctacttcgagaccgtgctgtaccaggacatcaccctgagcatcagacccgagacccacagccccggcatgttcagctggttccccatcctgttccccatcaagcagcccatcaccgtgagagagggccagaccatctgcgtgagattctggagatgcagcaacagcaagaaggtgtggtacgagtgggccgtgaccgcccccgtgtgcagcgccatccacaaccccaccggcagaagctacaccatcggcctgtag

SEQ ID NO: 13288 - DNA, 789 bp, synthetic construct; identical to SEQ ID NO: 10456
  source 1..789: mol_type = other DNA; note = Synthetic coding sequence

SEQ ID NO: 13289 - DNA, 1131 bp, synthetic construct
  source 1..1131: mol_type = other DNA; note = Synthetic coding sequence
atggccgcccccagccccagcggcacccccgtgagcagcatgcagggcaagagaaaggccctgaagctgaacttcgccaacccccccttcaagagcaccgccagattcaccctgaaccccaaccccaccggcgtgcagaacccccacatcgagagactgagaacccacagcatcgagagcagcggcaagctgaagatcagccccgagcagcactgggacttcaccgccgaggacctgaaggacctgggcgagatcggcagaggcgcctacggcagcgtgaacaagatggtgcacaagcccagcggccagatcatggccgtgaagagaatcagaagcaccgtggacgagaaggagcagaagcagctgctgatggacctggacgtggtgatgagaagcagcgactgcccctacatcgtgcagttctacggcgccctgttcagagagggcgactgctggatctgcatggagctgatgagcaccagcttcgacaagttctacaagtacgtgtacagcgtgctggacgacgtgatccccgaggagatcctgggcaagatcaccctggccaccgtgaaggccctgaaccacctgaaggagaacctgaagatcatccacagagacatcaagcccagcaacatcctgctggacagaagcggcaacatcaagctgtgcgacttcggcatcagcggccagctggtggacagcatcgccaagaccagagacgccggctgcagaccctacatggcccccgagagaatcgaccccagcgccagcagacagggctacgacgtgagaagcgacgtgtggagcctgggcatcaccctgtacgagctggccaccggcagattcccctaccccaagtggaacagcgtgttcgaccagctgacccaggtggtgaagggcgaccccccccagctgagcaacagcgaggagagagagttcagccccagcttcatcaacttcgtgaacctgtgcctgaccaaggacgagagcaagagacccaagtacaaggagctgctgaagcaccccttcatcctgatgtacgaggagagagccgtggaggtggcctgctacgtgtgcaagatcctggaccagatgcccgccacccccagcagccccatgtacgtggactag

SEQ ID NO: 13290 - DNA, 1035 bp, synthetic construct
  source 1..1035: mol_type = other DNA; note = Synthetic coding sequence
atggccggcagcggctgcgcctggggcgccgagccccccagattcctggaggccttcggcagactgtggcaggtgcagagcagactgggcagcggcagcagcgccagcgtgtacagagtgagatgctgcggcaaccccggcagcccccccggcgccctgaagcagttcctgccccccggcaccaccggcgccgccgccagcgccgccgagtacggcttcagaaaggagagagccgccctggagcagctgcagggccacagaaacatcgtgaccctgtacggcgtgttcaccatccacttcagccccaacgtgcccagcagatgcctgctgctggagctgctggacgtgagcgtgagcgagctgctgctgtacagcagccaccagggctgcagcatgtggatgatccagcactgcgccagagacgtgctggaggccctggccttcctgcaccacgagggctacgtgcacgccgacctgaagcccagaaacatcctgtggagcgccgagaacgagtgcttcaagctgatcgacttcggcctgagcttcaaggagggcaaccaggacgtgaagtacatccagaccgacggctacagagcccccgaggccgagctgcagaactgcctggcccaggccggcctgcagagcgacaccgagtgcaccagcgccgtggacctgtggagcctgggcatcatcctgctggagatgttcagcggcatgaagctgaagcacaccgtgagaagccaggagtggaaggccaacagcagcgccatcatcgaccacatcttcgccagcaaggccgtggtgaacgccgccatccccgcctaccacctgagagacctgatcaagagcatgctgcacgacgaccccagcagaagaatccccgccgagatggccctgtgcagccccttcttcagcatccccttcgccccccacatcgaggacctggtgatgctgcccacccccgtgctgagactgctgaacgtgctggacgacgactacctggagaacgaggaggagtacgagggcctgtgctag

SEQ ID NO: 13291 - DNA, 1467 bp, synthetic construct
  source 1..1467: mol_type = other DNA; note = Synthetic coding sequence
atggccctgaagatgaacaccctgagcagcaacagagccaacatgctgaaggaggtgcagctgatgaacagactgagccaccccaacatcctgagattcatgggcgtgtgcgtgcaccagggccagctgcacgccctgaccgagtacatcaacagcggcaacctggagcagctgctggacagcaacctgcacctgccctggaccgtgagagtgaagctggcctacgacatcgccgtgggcctgagctacctgcacttcaagggcatcttccacagagacctgaccagcaagaactgcctgatcaagagagacgagaacggctacagcgccgtggtggccgacttcggcctggccgagaagatccccgacgtgagcatgggcagcgagaagctggccgtggtgggcagccccttctggatggcccccgaggtgctgagagacgagccctacaacgagaaggccgacgtgttcagctacggcatcatcctgtgcgagatcatcgccagaatccaggccgaccccgactacctgcccagaaccgagaacttcggcctggactacgacgccttccagcacatggtgggcgactgcccccccgacttcctgcagctgaccttcaactgctgcaacatggaccccaagctgagacccagcttcgtggagatcggcaagaccctggaggagatcctgagcagactgcaggaggaggagcaggagagagacagaaagctgcagcccaccgccagaggcctgctggagaaggcccccggcgtgaagagactgagcagcctggacgacaagatcccccacaagagcccctgccccagaagaaccatctggctgagcagaagccagagcgacatcttcagcagaaagccccccagaaccgtgagcgtgctggacccctactacagacccagagacggcgccgccagaacccccaaggtgaaccccttcagcgccagacaggacctgatgggcggcaagatcaagttcttcgacctgcccagcaagagcgtgatcagcctggtgttcgacctggacgcccccggccccggcaccatgcccctggccgactggcaggagcccctggccccccccatcagaagatggagaagcctgcccggcagccccgagttcctgcaccaggaggcctgccccttcgtgggcagagaggagagcctgagcgacggccccccccccagactgagcagcctgaagtacagagtgaaggagatcccccccttcagagccagcgccctgcccgccgcccaggcccacgaggccatggactgcagcatcctgcaggaggagaacggcttcggcagcagaccccagggcaccagcccctgccccgccggcgccagcgaggagatggaggtggaggagagacccgccggcagcacccccgccaccttcagcaccagcggcatcggcctgcagacccagggcaagcaggacggctag

SEQ ID NO: 13292 - DNA, 1458 bp, synthetic construct
  source 1..1458: mol_type = other DNA; note = Synthetic coding sequence
atgaccctgtggatcctgcccaagttcaaggccgtggacttcagccccagcctggccgcctacacccacacctggctgctgcccagattcctggagatcctgatccagtgcggccactgcaagagactggcccccgagtacgaggccgccgccaccagactgaagggcatcgtgcccctggccaaggtggactgcaccgccaacaccaacacctgcaacaagtacggcgtgagcggctaccccaccctgaagatcttcagagacggcgaggaggccggcgcctacgacggccccagaaccgccgacggcatcgtgagccacctgaagaagcaggccggccccgccagcgtgcccctgagaaccgaggaggagttcaagaagttcatcagcgacaaggacgccagcatcgtgggcttcttcgacgacagcttcagcgaggcccacagcgagttcctgaaggccgccagcaacctgagagacaactacagattcgcccacaccaacgtggagagcctggtgaacgagtacgacgacaacggcgagggcatcatcctgttcagacccagccacctgaccaacaagttcgaggacaagaccgtggcctacaccgagcagaagatgaccagcggcaagatcaagaagttcatccaggagaacatcttcggcatctgcccccacatgaccgaggacaacaaggacctgatccagggcaaggacctgctgatcgcctactacgacgtggactacgagaagaacgccaagggcagcaactactggagaaacagagtgatgatggtggccaagaagttcctggacgccggccacaagctgaacttcgccgtggccagcagaaagaccttcagccacgagctgagcgacttcggcctggagagcaccgccggcgagatccccgtggtggccatcagaaccgccaagggcgagaagttcgtgatgcaggaggagttcagcagagacggcaaggccctggagagattcctgcaggactacttcgacggcaacctgaagagatacctgaagagcgagcccatccccgagagcaacgacggccccgtgaaggtggtggtggccgagaacttcgacgagatcgtgaacaacgagaacaaggacgtgctgatcgagttctacgccccctggtgcggccactgcaagaacctggagcccaagtacaaggagctgggcgagaagctgagcaaggaccccaacatcgtgatcgccaagatggacgccaccgccaacgacgtgcccagcccctacgaggtgagaggcttccccaccatctacttcagccccgccaacaagaagctgaaccccaagaagtacgagggcggcagagagctgagcgacttcatcagctacctgcagagagaggccaccaacccccccgtgatccaggaggagaagcccaagaagaagaagaaggcccaggaggacctgtag

SEQ ID NO: 13293 - DNA, 885 bp, synthetic construct
  source 1..885: mol_type = other DNA; note = Synthetic coding sequence
atgagcgcccagcacttcgtgagcaccgagcaggtggagctgcccggccccggccagtgggtggtggccgagtgccccgccagagtggacttcagcggcggctggagcgacaccccccccctggcctacgagctgggcggcgccgtgctgggcctggccgtgagagtggacggcagaagacccatcggcgccagagccagaagaatccccgagcccgagctgtggctggccgtgggccccagacaggacgagatgaccgtgaagatcgtgtgcagatgcctggccgacctgagagactactgccagccccacgcccccggcgccctgctgaaggccgccttcatctgcgccggcatcgtgcacgtgcacagcgagctgcagctgagcgagcagctgctgagaaccttcggcggcggcttcgagctgcacacctggagcgagctgccccacggcagcggcctgggcaccagcagcatcctggccggcaccgccctggccgccctgcagagagccgccggcagagtggtgggcaccgaggccctgatccacgccgtgctgcacctggagcaggtgctgaccaccggcggcggctggcaggaccaggtgggcggcctgatgcccggcatcaaggtgggcagaagcagagcccagctgcccctgaaggtggaggtggaggaggtgaccgtgcccgagggcttcgtgcagaagctgaacgaccacctgctgctggtgtacaccggcaagaccagactggccagaaacctgctgcaggacgtgctgagaagctggtacgccagactgcccgccgtggtgcagaacgcccacagcctggtgagacagaccgaggagtgcgccgagggcttcagacagggcagccacatctag

SEQ ID NO: 13294 - DNA, 945 bp, synthetic construct
  source 1..945: mol_type = other DNA; note = Synthetic coding sequence
gtgggcagaatggagggctgcagcagccccatcgtggtgaagttcgccgacacccagaaggacaaggagcagagaagactgcagcagcagctggcccagcagatgcagcagctgaacaccgccacctggggcaacctgaccggcctgggcggcctgaccccccagtacctggccctgctgcagcaggccaccagcagcagcaacctgggcgccttcagcggcatccagcagatggccggcatgaacgccctgcagctgcagaacctggccaccctggccgccgccgccgccgccgcccagaccagcgccaccagcaccaacgccaaccccctgagcaccaccagcagcgccctgggcgccctgaccagccccgtggccgccagcacccccaacagcaccgccggcgccgccatgaacagcctgaccagcctgggcaccctgcagggcctggccggcgccaccgtgggcctgaacaacatcaacgccctggccggcatggccgccctgaacggcggcctgggcgccaccggcctgaccaacggcaccgccggcaccatggacgccctgacccaggcctacagcggcatccagcagtacgccgccgccgccctgcccaccctgtacagccagagcctgctgcagcagcagagcgccgccggcagccagaaggagggccccgagggcgccaacctgttcatctaccacctgccccaggagttcggcgaccaggacatcctgcagatgttcatgcccttcggcaacgtgatcagcgccaaggtgttcatcgacaagcagaccaacctgagcaagtgcttcggcttcgtgagctacgacaaccccgtgagcgcccaggccgccatccaggccatgaacggcttccagatcggcatgaagagactgaaggtgcagctgaagagaagcaagaacgacagcaagccctactag

SEQ ID NO: 13295 - DNA, 1083 bp, synthetic construct
  source 1..1083: mol_type = other DNA; note = Synthetic coding sequence
agcatggagaagacctacaccagcaccagcaacaacagcatcagcggcagcctgaagagactggaggacaccaccgccagattcaccaacgccaacttccaggaggtgagcgcccacaccagcagcggcaaggacgtgagcgagaccagaggcagcgagggcaagggcaagaagagcagcgcccacagcagcggccagagaggcagaaagcccggcggcggcagaaaccccggcaccaccgtgagcgccgccagccccttcccccaggccggctacaagagagcccagaccagcggcatcgaggaggagaccgtgaaggagaagaagagaaagggcaacaagcagagcaagcacggccccggcagacccaagggcaacaagaaccaggagaacgtgagccacctgagcgtgagcagcgccagccccaccagcagcgtggccagcgccgccggcagcatcaccagcagcagcctgcagaagagccccaccctgctgagaaacggcagcctgcagagcctgagcgtgggcagcagccccgtgggcagcgagatcagcatgcagtacagacacgacggcgcctgccccaccaccaccttcagcgagctgctgaacgccatccacaacgacagaggcgacagcagcaccctgaccaagcaggagctgaagttcatcggcatctacaacagcaacgacgtggccgtgagcttccccaacgtggtgagcggcagcggcagcagcacccccgtgagcagcagccacctgccccagcagagcagcggccacctgcagcaggtgggcgccctgagccccagcgccgtgagcagcgccgcccccgccgtggccaccacccaggccaacaccctgagcggcagcagcctgagccaggcccccagccacatgtacggcaacagaagcaacagcagcatggccgccctgatcgcccagagcgagaacaaccagaccgaccaggacctgggcgacaacagcagaaacctggtgggcagaggcagcagccccagaggcagcctgagccccagaagccccgtgagcagcctgcagatcagatacgaccagcccggctag

SEQ ID NO: 13296 - DNA, 924 bp, synthetic construct
  source 1..924: mol_type = other DNA; note = Synthetic coding sequence
atgcagagcctgaccctggacctgctgggccccagcgagctgctgctggccctgaacatgggcaacaccagcttcaacgaggtgatggaggcccagctgcccagccacggcggccccaagcccagcgccgagagcgacatgggcaccagaagagactacatcatggccaagtacgtggagcacagattcgccagaagatgcacccccgagccccagagactgtggaccgccatctgcaacagagacctgctgagcgtgctggaggccttcgccaacggccaggacttcggccagcccctgcccggccccgacgcccaggcccccgaggagctggtgctgcacctggccgtgaaggtggccaaccaggccagcctgcccctggtggacttcatcatccagaacggcggccacctggacgccaaggccgccgacggcaacaccgccctgcactacgccgccctgtacaaccagcccgactgcctgaagctgctgctgaagggcagagccctggtgggcaccgtgaacgaggccggcgagaccgccctggacatcgccagaaagaagcaccacaaggagtgcgaggagctgctggagcaggcccaggccggcaccttcgccttccccctgcacgtggactacagctgggtgatcagcaccgagcccggcagcgacagcgaggaggacgaggaggagaagagatgcctgctgaagctgcccgcccaggcccactgggccagcggcagactggacatcagcaacaagacctacgagaccgtggccagcctgggcgccgccaccccccagggcgagagcgaggactgccccccccccctgcccgtgaagaacagcagcagaaccctggtgcagggctgcgccagacacgccagcggcggcagaagagaggagagagccagaagagagtag

SEQ ID NO: 13297 - DNA, 1497 bp, synthetic construct
  source 1..1497: mol_type = other DNA; note = Synthetic coding sequence
atgagcagctgcgtgagcagccagcccagcagcaacagagccgccccccaggacgagctgggcggcagaggcagcagcagcagcgagagccagaagccctgcgaggccctgagaggcctgagcagcctgagcatccacctgggcatggagagcttcatcgtggtgaccgagtgcgagcccggctgcgccgtggacctgggcctggccagagacagacccctggaggccgacggccaggaggtgcccctggacaccagcggcagccaggccagaccccacctgagcggcagaaagctgagcctgcaggagagaagccagggcggcctggccgccggcggcagcctggacatgaacggcagatgcatctgccccagcctgccctacagccccgtgagcagcccccagagcagccccagactgcccagaagacccaccgtggagagccaccacgtgagcatcaccggcatgcaggactgcgtgcagctgaaccagtacaccctgaaggacgagatcggcaagggcagctacggcgtggtgaagctggcctacaacgagaacgacaacacctactacgccatgaaggtgctgagcaagaagaagctgatcagacaggccggcttccccagaagacccccccccagaggcaccagacccgcccccggcggctgcatccagcccagaggccccatcgagcaggtgtaccaggagatcgccatcctgaagaagctggaccaccccaacgtggtgaagctggtggaggtgctggacgaccccaacgaggaccacctgtacatggtgttcgagctggtgaaccagggccccgtgatggaggtgcccaccctgaagcccctgagcgaggaccaggccagattctacttccaggacctgatcaagggcatcgagtacctgcactaccagaagatcatccacagagacatcaagcccagcaacctgctggtgggcgaggacggccacatcaagatcgccgacttcggcgtgagcaacgagttcaagggcagcgacgccctgctgagcaacaccgtgggcacccccgccttcatggcccccgagagcctgagcgagaccagaaagatcttcagcggcaaggccctggacgtgtgggccatgggcgtgaccctgtactgcttcgtgttcggccagtgccccttcatggacgagagaatcatgtgcctgcacagcaagatcaagagccaggccctggagttccccgaccagcccgacatcgccgaggacctgaaggacctgatcaccagaatgctggacaagaaccccgagagcagaatcgtggtgcccgagatcaagatcctggtgaagaccatgatcagaaagagaagcttcggcaaccccttcgagggcagcagaagagaggagagaagcctgagcgcccccggcaacctgctgaccaagcagggcagcgaggacaacctgcagggcaccgaccccccccccgtgggcgaggaggaggtgctgctgtag

SEQ ID NO: 13298 - DNA, 600 bp, synthetic construct; identical to SEQ ID NO: 10263
  source 1..600: mol_type = other DNA; note = Synthetic coding sequence

SEQ ID NO: 13299 - DNA, 1248 bp, synthetic construct
  source 1..1248: mol_type = other DNA; note = Synthetic coding sequence
atgtggagaaaggtgtacacccccagaagcagcttcgagctgagcgcccagccccccagctgggagcagagaaagctgctggagaagtgcgccatgaccgccctgagcagcaagctgatcagccagcagaaggccttcttcgccaagatggtggtggacgccgtgatgatgctggacgacctgctgcagctgaagatgatcggcatcaagaaggtgcagggcggcgccctggaggacagccagctggtggccggcgtggccttcaagaagaccttcagctacgccggcttcgagatgcagcccaagaagtaccacaaccccaagatcgccctgctgaacgtggagctggagctgaaggccgagaaggacaacgccgagatcagagtgcacaccgtggaggactaccaggccatcgtggacgccgagtggaacatcctgtacgacaagctggagaagatccaccacagcggcgccaaggtggtgctgagcaagctgcccatcggcgacgtggccacccagtacttcgccgacagagacatgttctgcgccggcagagtgcccgaggaggacctgaagagaaccatgatggcctgcggcggcagcatccagaccagcgtgaacgccctgagcgccgacgtgctgggcagatgccaggtgttcgaggagacccagatcggcggcgagagatacaacttcttcaccggctgccccaaggccaagacctgcaccttcatcctgagaggcggcgccgagcagttcatggaggagaccgagagaagcctgcacgacgccatcatgatcgtgagaagagccatcaagaacgacagcgtggtggccggcggcggcgccatcgagatggagctgagcaagtacctgagagactacagcagaaccatccccggcaagcagcagctgctgatcggcgcctacgccaaggccctggagatcatccccagacagctgtgcgacaacgccggcttcgacgccaccaacatcctgaacaagctgagagccagacacgcccagggcggcacctggtacggcgtggacatcaacaacgaggacatcgccgacaacttcgaggccttcgtgtgggagcccgccatggtgagaatcaacgccctgaccgccgccagcgaggccgcctgcctgatcgtgagcgtggacgagaccatcaagaaccccagaagcaccgtggacgcccccaccgccgccggcagaggcagaggcagaggcagaccccactag

SEQ ID NO: 13300 - DNA, 3117 bp, synthetic construct; identical to SEQ ID NO: 11268
  source 1..3117: mol_type = other DNA; note = Synthetic coding sequence

SEQ ID NO: 13301 - DNA, 1443 bp, synthetic construct
  source 1..1443: mol_type = other DNA; note = Synthetic coding sequence
atgagactgagaagactggccctgttccccggcgtggccctgctgctggccgccgccagactggccgccgccagcgagttcttcgccccctggtgcggccactgcaagagactggcccccgagtacgaggccgccgccaccagactgaagggcatcgtgcccctggccaaggtggactgcaccgccaacaccaacacctgcaacaagtacggcgtgagcggctaccccaccctgaagatcttcagagacggcgaggaggccggcgcctacgacggccccagaaccgccgacggcatcgtgagccacctgaagaagcaggccggccccgccagcgtgcccctgagaaccgaggaggagttcaagaagttcatcagcgacaaggacgccagcatcgtgggcttcttcgacgacagcttcagcgaggcccacagcgagttcctgaaggccgccagcaacctgagagacaactacagattcgcccacaccaacgtggagagcctggtgaacgagtacgacgacaacggcgagggcatcatcctgttcagacccagccacctgaccaacaagttcgaggacaagaccgtggcctacaccgagcagaagatgaccagcggcaagatcaagaagttcatccaggagaacatcttcggcatctgcccccacatgaccgaggacaacaaggacctgatccagggcaaggacctgctgatcgcctactacgacgtggactacgagaagaacgccaagggcagcaactactggagaaacagagtgatgatggtggccaagaagttcctggacgccggccacaagctgaacttcgccgtggccagcagaaagaccttcagccacgagctgagcgacttcggcctggagagcaccgccggcgagatccccgtggtggccatcagaaccgccaagggcgagaagttcgtgatgcaggaggagttcagcagagacggcaaggccctggagagattcctgcaggactacttcgacggcaacctgaagagatacctgaagagcgagcccatccccgagagcaacgacggccccgtgaaggtggtggtggccgagaacttcgacgagatcgtgaacaacgagaacaaggacgtgctgatcgagttctacgccccctggtgcggccactgcaagaacctggagcccaagtacaaggagctgggcgagaagctgagcaaggaccccaacatcgtgatcgccaagatggacgccaccgccaacgacgtgcccagcccctacgaggtgagaggcttccccaccatctacttcagccccgccaacaagaagctgaaccccaagaagtacgagggcggcagagagctgagcgacttcatcagctacctgcagagagaggccaccaacccccccgtgatccaggaggagaagcccaagaagaagaagaaggcccaggaggacctgtag

SEQ ID NO: 13302 - DNA, 228 bp, synthetic construct
  source 1..228: mol_type = other DNA; note = Synthetic coding sequence
atgggcgtgaagctggagatcttcagaatgatcatctacctgaccttccccgtggccatgttctgggtgagcaaccaggccgagtggttcgaggacgacgtgatccagagaaagagagagctgtggccccccgagaagctgcaggagctggaggagttcaaggagagactgagaaagagaaagagaagagaggagaagctgctgagagacgcccagcagaacagctag

SEQ ID NO: 13303 - DNA, 807 bp, synthetic construct; identical to SEQ ID NO: 13201
  source 1..807: mol_type = other DNA; note = Synthetic coding sequence

SEQ ID NO: 13304 - DNA, 351 bp, synthetic construct
  source 1..351: mol_type = other DNA; note = Synthetic coding sequence
atgctgctggagtgcggcatgcaggaggagggcctgttcagagtggcccccagcgccagcaagctgaagaagctgaaggccgccctggactgctgcgtggtggacgtgcaggagtacagcgccgacccccacgccatcgccggcgccctgaagagctacctgagagagctgcccgagcccctgatgaccttcgagctgtacgacgagtggatccaggccagcaacgtgcaggagcaggacaagaagctgcaggccctgtggaacgcctgcgagaagctgcccaaggccaaccacaacaacatcagatacctgatcaagttctaccccagctgccagaacatcaagatgtag

SEQ ID NO: 13305 - DNA, 906 bp, synthetic construct
  source 1..906: mol_type = other DNA; note = Synthetic coding sequence
atggtgagaaccaagacctggaccctgaagaagcacttcgtgggctaccccaccaacagcgacttcgagctgaagaccgccgagctgccccccctgaagaacggcgaggtgctgctggaggccctgttcctgaccgtggacccctacatgagagtggccgccaagagactgaaggagggcgacaccatgatgggccagcaggtggccaaggtggtggagagcaagaacgtggccctgcccaagggcaccatcgtgctggccagccccggctggaccacccacagcatcagcgacggcaaggacctggagaagctgctgaccgagtggcccgacaccatccccctgagcctggccctgggcaccgtgggcatgcccggcctgaccgcctacttcggcctgctggagatctgcggcgtgaagggcggcgagaccgtgatggtgaacgccgccgccggcgccgtgggcagcgtggtgggccagatcgccaagctgaagggctgcaaggtggtgggcgccgtgggcagcgacgagaaggtggcctacctgcagaagctgggcttcgacgtggtgttcaactacaagaccgtggagagcctggaggagaccctgaagaaggccagccccgacggctacgactgctacttcgacaacgtgggcggcgagttcagcaacaccgtgatcggccagatgaagaagttcggcagaatcgccatctgcggcgccatcagcacctacaacagaaccggccccctgccccccggccccccccccgagatcgtgatctaccaggagctgagaatggaggccttcgtggtgtacagatggcagggcgacgccagacagaaggccctgaaggacctgctgaagtgggtgctggagatcaagagagagaacgaggaggactag

SEQ ID NO: 13306 - DNA, 1068 bp, synthetic construct
  source 1..1068: mol_type = other DNA; note = Synthetic coding sequence
atgctgggcagcggcttcaaggccgagagactgagagtgaacctgagactggtgatcaacagactgaagctgctggagaagaagaagaccgagctggcccagaaggccagaaaggagatcgccgactacctggccgccggcaaggacgagagagccagaatcagagtggagcacatcatcagagaggactacctggtggaggccatggagatcctggagctgtactgcgacctgctgctggccagattcggcctgatccagagcatgaaggagctggacagcggcctggccgagagcgtgagcaccctggccgagctgaagatcgtggccgaccagctgtgcgccaagtacagcaaggagtacggcaagctgtgcagaaccaaccagatcggcaccgtgaacgacagactgatgcacaagctgagcgtggaggccccccccaagatcctggtggagagatacctgatcgagatcgccaagaactacaacgtgccctacgagcccgacagcgtggtgatggccgaggccccccccggcgtggagaccgacctgatcgacgtgggcttcaccgacgacgtgaagaagggcggccccggcagaggcggcagcggcggcttcaccgcccccgtgggcggccccgacggcaccgtgcccatgcccatgcccatgcccatgcccatgcccagcgccaacacccccttcagctaccccctgcccaagggccccagcgacttcaacggcctgcccatgggcacctaccaggccttccccaacatccaccccccccagatccccgccaccccccccagctacgagagcgtggacgacatcaacgccgacaagaacatcagcagcgcccagatcgtgggccccggccccaagcccgaggccagcgccaagctgcccagcagacccgccgacaactacgacaacttcgtgctgcccgagctgcccagcgtgcccgacaccctgcccaccgccagcgccggcgccagcaccagcgccagcgaggacatcgacttcgacgacctgagcagaagattcgaggagctgaagaagaagacctag

SEQ ID NO: 13307 - DNA, 2175 bp, synthetic construct
  source 1..2175: mol_type = other DNA; note = Synthetic coding sequence
atgcagatgaccatccaggccctgcaggacgagctgagaatccagagagacctgaaccagctgttccagcaggacagcagcagcagaaccggcgagccctgcgtggccgagctgaccgaggagaacttccagagactgcacgccgagcacgagagacaggccaaggagctgttcctgctgagaaagaccctggaggagatggagctgagaatcgagacccagaagcagaccctgaacgccagagacgagagcatcaagaagctgctggagatgctgcagagcaagggcctgagcgccaaggccaccgaggaggaccacgagagaaccagaagactggccgaggccgagatgcacgtgcaccacctggagagcctgctggagcagaaggagaaggagaacagcatgctgagagaggagatgcacagaagattcgagaacgcccccgacagcgccaagaccaaggccctgcagaccgtgatcgagatgaaggacagcaagatcagcagcatggagagaggcctgagagacctggaggaggagatccagatgctgaagagcaacggcgccctgagcaccgaggagagagaggaggagatgaagcagatggaggtgtacagaagccacagcaagttcatgaagaacaagatcggccaggtgaagcaggagctgagcagaaaggacaccgagctgctggccctgcagaccaagctggagaccctgaccaaccagttcagcgacagcaagcagcacatcgaggtgctgaaggagagcctgaccgccaaggagcagagagccgccatcctgcagaccgaggtggacgccctgagactgagactggaggagaaggagaccatgctgaacaagaagaccaagcagatccaggacatggccgaggagaagggcacccaggccggcgagatccacgacctgaaggacatgctggacgtgaaggagagaaaggtgaacgtgctgcagaagaagatcgagaacctgcaggagcagctgagagacaaggagaagcagatgagcagcctgaaggagagagtgaagagcctgcaggccgacaccaccaacaccgacaccgccctgaccaccctggaggaggccctggccgagaaggagagaaccatcgagagactgaaggagcagagagacagagacgagagagagaagcaggaggagatcgacaactacaagaaggacctgaaggacctgaaggagaaggtgagcctgctgcagggcgacctgagcgagaaggaggccagcctgctggacctgaaggagcacgccagcagcctggccagcagcggcctgaagaaggacagcagactgaagaccctggagatcgccctggagcagaagaaggaggagtgcctgaagatggagagccagctgaagaaggcccacgaggccgccctggaggccagagccagccccgagatgagcgacagaatccagcacctggagagagagatcaccagatacaaggacgagagcagcaaggcccaggccgaggtggacagactgctggagatcctgaaggaggtggagaacgagaagaacgacaaggacaagaagatcgccgagctggagagcctgaccagcagacaggtgaaggaccagaacaagaaggtggccaacctgaagcacaaggagcaggtggagaagaagaagagcgcccagatgctggaggaggccagaagaagagaggacaacctgaacgacagcagccagcagctgcaggtggaggagctgctgatggccatggagaaggtgaagcaggagctggagagcatgaaggccaagctgagcagcacccagcagagcctggccgagaaggagacccacctgaccaacctgagagccgagagaagaaagcacctggaggaggtgctggagatgaagcaggaggccctgctggccgccatcagcgagaaggacgccaacatcgccctgctggagctgagcagcagcaagaagaagacccaggaggaggtggccgccctgaagagagagaaggacagactggtgcagcagctgaagcagcagacccagaacagaatgaagctgatggccgacaactacgaggacgaccacttcaagagcagccacagcaaccagaccaaccacaagcccagccccgaccaggacgaggaggagggcatctgggcctag

SEQ ID NO: 13308 - DNA, 408 bp, synthetic construct
  source 1..408: mol_type = other DNA; note = Synthetic coding sequence
atggccatcggcttcaacgtggagaccgtgacctacaagaacctgaagttccaggtgtgggacctgggcggccagaccagcatcagaccctactggagatgctactacagcaacaccgacgccgtgatctacgtggtggacagctgcgacagagacagaatcggcatcagcaagagcgagctggtggccatgctggaggaggaggagctgagaaaggccatcctggtggtgttcgccaacaagcaggacatggagcaggccatgaccagcagcgagatggccaacagcctgggcctgcccgccctgaaggacagaaagtggcagatcttcaagaccagcgccaccaagggcaccggcctggacgaggccatggagtggctggtggagaccctgaagagcagacagtag

SEQ ID NO: 13309 - DNA, 684 bp, synthetic construct
  source 1..684: mol_type = other DNA; note = Synthetic coding sequence
agaagacagatcctgaaggagctggccctgtgcctgagaagacaggagatgtacggccccagagccgccagcagaaacaaggagaccagcgccggccccgtggccgtgatgggcaaggactactacaagatcctgggcatccccagcggcgccaacgaggacgagatcaagaaggcctacagaaagatggccctgaagtaccaccccgacaagaacaaggagcccaacgccgaggagaagttcaaggagatcgccgaggcctacgacgtgctgagcgaccccaagaagagaggcctgtacgaccagtacggcgaggagggcctgaagaccggcggcggcaccagcggcggcagcagcggcagcttccactacaccttccacggcgacccccacgccaccttcgccagcttcttcggcggcagcaaccccttcgacatcttcttcgccagcagcagaagcaccagacccttcagcggcttcgaccccgacgacatggacgtggacgaggacgaggaccccttcggcgccttcggcagattcggcttcaacggcctgagcagaggccccagaagagcccccgagcccctgtaccccagaagaaaggtgcaggacccccccgtggtgcacgagctgagagtgagcctggaggagatctaccacggcagcaccaagagaatgaagtag

SEQ ID NO: 13310 - DNA, 252 bp, synthetic construct
  source 1..252: mol_type = other DNA; note = Synthetic coding sequence
atgagcatgctgaagcccagcggcctgaaggcccccaccaagatcctgaagcccggcagcaccgccctgaagacccccaccgccgtggtggcccccgtggagaagaccatcagcagcgagaaggccagcagcacccccagcagcgagacccaggaggagttcgtggacgacttcagagtgggcgagagagtgtgggtgaacggcaacaagcccggcttcatccagttcctgggcgagacccagttcgcctag

SEQ ID NO: 13311 - DNA, 642 bp, synthetic construct
  source 1..642: mol_type = other DNA; note = Synthetic coding sequence
atggacatgctgggcggccccggcatcgagagccagtgcagaaaggtggacatcatcgccgacgccgcctacagcatcttccagaagcccaagagcttcaccggcaacttcgtgatcgacgagaacatcctgaaggaggagggcatcgagaacttcgacgtgtacgccatcaagcccggccaccccctgcagcccgacttcttcctggacgagtaccccgaggccgtgagcaagaaggtggagagcaccggcgccgtgcccgagttcaaggaggagaagctgcagctgcagcccaagcccagaagcggcgccgtggaggagaccttcagaatcgtgaaggacagcctgagcgacgacgtggtgaaggccacccaggccatctacctgttcgagctgagcggcgaggacggcggcacctggttcctggacctgaagagcaagggcggcaacgtgggctacggcgagcccagcgaccaggccgacgtggtgatgagcatgaccaccgacgacttcgtgaagatgttcagcggcaagctgaagcccaccatggccttcatgagcggcaagctgaagatcaagggcaacatggccctggccatcaagctggagaagctgatgaaccagatgaacgccagactgtag

SEQ ID NO: 13312 - DNA, 1230 bp, synthetic construct
  source 1..1230: mol_type = other DNA; note = Synthetic coding sequence
atgaacagaacctggcccagaagaatctggggcagcagccaggacgagcccgagttcgccagcagcgtgagaagaccccacctgaccagcgacgccgtggccctgctgagagacaacgtgacccccagagagaacgagctgtggaccagcctgggcgacagctggaccagacccggcctggagctgagccccgaggagggccccccctacagacccgagttcttcagcggctgggagccccccgtgaccgacccccagagcagagcctgggaggaccccgtggagaagcagctgcagcacgagagaagaagaagacaggtgacccaggccacccagcagggcagaggctgggaggtgagaggcagaggcagaagcgcctggcccagactgaccagactgagctacttcctgcagcagagcgccccccaggtggccgtgaacggccacagagacctggagcccgagagcgagccccagctggagagcgagaccgccggcaagtgggtgctgtgcaactacgacttccaggccagaaacagcagcgagctgagcgtgaagcagagagacgtgctggaggtgctggacgacagcagaaagtggtggaaggtgagagaccccgccggccaggagggctacgtgccctacaacatcctgaccccctaccccggccccagactgcaccacagccagagccccgccagaagcctgaacagcacccccccccccccccccgcccccgcccccgcccccccccccgccctggccagacccagatgggacagacccagatgggacagctgcgacagcctgaacggcctggaccccagcgagaaggagaagttcagccagatgctgatcgtgaacgaggagctgcaggccagactggcccagggcagaagcggccccagcagagccgtgcccggccccagagcccccgagccccagctgagccccggcagcgacgccagcgaggtgagagcctggctgcaggccaagggcttcagcagcggcaccgtggacgccctgggcgtgctgaccggcgcccagctgttcagcctgcagaaggaggagctgagagccgtgagccccgaggagggcgccagagtgtacagccaggtgaccgtgcagagaagcctgctggaggacaaggagaaggtgagcgagctggaggccgtgatggagaagcagaagaagaaggtggagggcgaggtggagatggaggtgatctag

SEQ ID NO: 13313 - DNA, 1425 bp, synthetic construct
  source 1..1425: mol_type = other DNA; note = Synthetic coding sequence
atggccagcctgagcagagccctgagagtggccgccgcccaccccagacagagccccaccagaggcatgggcccctgcaacctgagcagcgccgccggccccaccgccgagaagagcgtgccctaccagagaaccctgaaggagggccagggcaccagcgtggtggcccagggccccagcagacccctgcccagcaccgccaacgtggtggtgatcggcggcggcagcctgggctgccagaccctgtaccacctggccaagctgggcatgagcggcgccgtgctgctggagagagagagactgaccagcggcaccacctggcacaccgccggcctgctgtggcagctgagacccagcgacgtggaggtggagctgctggcccacaccagaagagtggtgagcagagagctggaggaggagaccggcctgcacaccggctggatccagaacggcggcctgttcatcgccagcaacagacagagactggacgagtacaagagactgatgagcctgggcaaggcctacggcgtggagagccacgtgctgagccccgccgagaccaagaccctgtaccccctgatgaacgtggacgacctgtacggcaccctgtacgtgccccacgacggcaccatggaccccgccggcacctgcaccaccctggccagagccgccagcgccagaggcgcccaggtgatcgagaactgccccgtgaccggcatcagagtgtggaccgacgacttcggcgtgagaagagtggccggcgtggagacccagcacggcagcatccagaccccctgcgtggtgaactgcgccggcgtgtgggccagcgccgtgggcagaatggccggcgtgaaggtgcccctggtggccatgcaccacgcctacgtggtgaccgagagaatcgagggcatccagaacatgcccaacgtgagagaccacgacgccagcgtgtacctgagactgcagggcgacgccctgagcgtgggcggctacgaggccaaccccatcttctgggaggaggtgagcgacaagttcgccttcggcctgttcgacctggactgggaggtgttcacccagcacatcgagggcgccatcaacagagtgcccgtgctggagaagaccggcatcaagagcaccgtgtgcggccccgagagcttcacccccgaccacaagcccctgatgggcgaggcccccgagctgagaggcttcttcctgggctgcggcttcaacagcgccggcatgatgctgggcggcggctgcggccaggagctggcccactggatcatccacggcagacccgagaaggacatgcacggctacgacatcagaagattccaccacagcctgaccgaccaccccagatggatcagagagagaagccacgagagctaccaggagctgctgagaagactgccccccagatag

SEQ ID NO: 13314 - DNA, 1893 bp, synthetic construct
  source 1..1893: mol_type = other DNA; note = Synthetic coding sequence
atgagcatcgagctgcagagcgtgagcaaccccgtgcacagaaaggacctggtgatcagactgaccgacgacaccgaccccttcttcctgtacaacctggtgatcagcgaggaggacttccagagcctgaagttccagcagggcctgctggtggacttcctggccttcccccagaagttcatcgacctgctgcagcagtgcacccaggagcacgccaaggagatccccagattcctgctgcagctggtgagccccgccgccatcctggacaacagccccgccttcctgaacgtggtggagaccaaccccttcaagcacctgacccacctgagcctgaagctgctgcccggcaacgacgtggagatcaagaagttcctggccggctgcctgaagtgcagcaaggaggagaagctgagcctgatgcagagcctggacgacgccaccaagcagctggacttcaccagaaagaccctggccgagaagaagcaggagctggacaagctgagaaacgagtgggccagccacaccgccgccctgaccaacaagcacagccaggagctgaccaacgagaaggagaaggccctgcaggcccaggtgcagtaccagcagcagcacgagcagcagaagaaggacctggagatcctgcaccagcagaacatccaccagctgcagaacagactgagcgagctggaggccgccaacaaggacctgaccgagagaaagtacaagggcgacagcaccatcagagagctgaaggccaagctgagcggcgtggaggaggagctgcagagaaccaagcaggaggtgctgagcctgagaagagagaacagcaccctggacgtggagtgccacgagaaggagaagcacgtgaaccagctgcagaccaaggtggccgtgctggagcaggagatcaaggacaaggaccagctggtgctgagaaccaaggaggccttcgacaccatccaggagcagaaggtggtgctggaggagaacggcgagaagaaccaggtgcagctgggcaagctggaggccaccatcaagagcctgagcgccgagctgctgaaggccaacgagatcatcaagaagctgcagggcgacctgaagaccctgatgggcaagctgaagctgaagaacaccgtgaccatccagcaggagaagctgctggccgagaaggaggagaagctgcagaaggagcagaaggagctgcaggacgtgggccagagcctgagaatcaaggagcaggaggtgtgcaagctgcaggagcagctggaggccaccgtgaagaagctggaggagagcaagcagctgctgaagaacaacgagaagctgatcacctggctgaacaaggagctgaacgagaaccagctggtgagaaagcaggacgtgctgggccccagcaccaccccccccgcccacagcagcagcaacaccatcagaagcggcatcagccccaacctgaacgtggtggacggcagactgacctaccccacctgcggcatcggctaccccgtgagcagcgccttcgccttccagaacaccttcccccacagcatcagcgccaagaacaccagccaccccggcagcggcaccaaggtgcagttcaacctgcagttcaccaagcccaacgccagcctgggcgacgtgcagagcggcgccaccatcagcatgccctgcagcaccgacaaggagaacggcgagaacgtgggcctggagagcaagtacctgaagaagagagaggacagcatccccctgagaggcctgagccagaacctgttcagcaacagcgaccaccagagagacggcaccctgggcgccctgcacaccagcagcaagcccaccgccctgcccagcgccagcagcgcctacttccccggccagctgcccaacagctag

SEQ ID NO: 13315 - DNA, 1170 bp, synthetic construct
  source 1..1170: mol_type = other DNA; note = Synthetic coding sequence
atggacagagagaccctgatcgacgtggccagaaccagcctgagaaccaaggtgcacgccgagctggccgacgtgctgaccgaggccgtggtggacagcatcctggccatcaagaagcaggacgagcccatcgacctgttcatgatcgagatcatggagatgaagcacaagagcgagaccgacaccagcctgatcagaggcctggtgctggaccacggcgccagacaccccgacatgaagaagagagtggaggacgcctacatcctgacctgcaacgtgagcctggagtacgagaagaccgaggtgaacagcggcttcttctacaagagcgccgaggagagagagaagctggtgaaggccgagagaaagttcatcgaggacagagtgaagaagatcatcgagctgaagagaaaggtgtgcggcgacagcgacaagggcttcgtggtgatcaaccagaagggcatcgaccccttcagcctggacgccctgagcaaggagggcatcgtggccctgagaagagccaagagaagaaacatggagagactgaccctggcctgcggcggcgtggccctgaacagcttcgacgacctgagccccgactgcctgggccacgccggcctggtgtacgagtacaccctgggcgaggagaagttcaccttcatcgagaagtgcaacaaccccagaagcgtgaccctgctgatcaagggccccaacaagcacaccctgacccagatcaaggacgccgtgagagacggcctgagagccgtgaagaacgccatcgacgacggctgcgtggtgcccggcgccggcgccgtggaggtggccatggccgaggccctgatcaagcacaagcccagcgtgaagggcagagcccagctgggcgtgcaggccttcgccgacgccctgctgatcatccccaaggtgctggcccagaacagcggcttcgacctgcaggagaccctggtgaagatccaggccgagcacagcgagagcggccagctggtgggcgtggacctgaacaccggcgagcccatggtggccgccgaggtgggcgtgtgggacaactactgcgtgaagaagcagctgctgcacagctgcaccgtgatcgccaccaacatcctgctggtggacgagatcatgagagccggcatgagcagcctgaagggctag

SEQ ID NO: 13316 - DNA, 441 bp, synthetic construct
  source 1..441: mol_type = other DNA; note = Synthetic coding sequence
atgaccgtgaacgaggccaaggagaagctgaaggaggcccccgagggcaccttcctgatcagagacagcagccacagcgactacctgctgaccatcagcgtgaagaccagcgccggccccaccaacctgagaatcgagtaccaggacggcaagttcagactggacagcatcatctgcgtgaagagcaagctgaagcagttcgacagcgtggtgcacctgatcgactactacgtgcagatgtgcaaggacaagagaaccggccccgaggcccccagaaacggcaccgtgcacctgtacctgaccaagcccctgtacaccagcgcccccagcctgcagcacctgtgcagactgaccatcaacaagtgcaccggcgccatctggggcctgcccctgcccaccagactgaaggactacctggaggagtacaagttccaggtgtag

SEQ ID NO: 13317 - DNA, 1905 bp, synthetic construct
  source 1..1905: mol_type = other DNA; note = Synthetic coding sequence
atgctggagtacgccctgaagcaggagagagccaagtaccacaagctgaagttcggcaccgacctgaaccagggcgagaagaaggccgacgtgagcgagcaggtgagcaacggccccgtggagagcgtgaccctggagaacagccccctggtgtggaaggagggcagacagctgctgagacagtacctggaggaggtgggctacaccgacaccatcctggacatgagaagcaagagagtgagaagcctgctgggcagaagcctggagctgaacggcgccgtggagcccagcgagggcgcccccagagccccccccggccccgccggcctgagcggcggcgagagcctgctggtgaagcagatcgaggagcagatcaagagaaacgccgccggcaaggacggcaaggagagactgggcggcagcgtgctgggccagatccccttcctgcagaactgcgaggacgaggacagcgacgaggacgacgagctggacagcgtgcagcacaagaagcagagagtgaagctgcccagcaaggccctggtgcccgagatggaggacgaggacgaggaggacgacagcgaggacgccatcaacgagttcgacttcctgggcagcggcgaggacggcgagggcgcccccgaccccagaagatgcaccgtggacggcagcccccacgagctggagagcagaagagtgaagctgcagggcatcctggccgacctgagagacgtggacggcctgccccccaaggtgaccggccccccccccggcaccccccagcccagaccccacgaggacgtgttcatcatggacaccatcggcggcggcgaggtgagcctgggcgacctggccgacctgaccgtgaccaacgacaacgacctgagctgcgacctgagcgacagcaaggacgccttcaagaagacctggaaccccaagttcaccctgagaagccactacgacggcatcagaagcctggccttccaccacagccagagcgccctgctgaccgccagcgaggacggcaccctgaagctgtggaacctgcagaaggccgtgaccgccaagaagaacgccgccctggacgtggagcccatccacgccttcagagcccacagaggccccgtgctggccgtggccatgggcagcaacagcgagtactgctacagcggcggcgccgacgcctgcatccacagctggaagatccccgacctgagcatggacccctacgacggctacgaccccagcgtgctgagccacgtgctggagggccacggcgacgccgtgtggggcctggccttcagccccaccagccagagactggccagctgcagcgccgacggcaccgtgagaatctgggaccccagcagcagcagccccgcctgcctgtgcaccttccccaccgccagcgagcacggcgtgcccaccagcgtggccttcaccagcaccgagcccgcccacatcgtggccagcttcagaagcggcgacaccgtgctgtacgacatggaggtgggcagcgccctgctgaccctggagagcagaggcagcagcggccccacccagatcaaccaggtggtgagccaccccaaccagcccctgaccatcaccgcccacgacgacagaggcatcagattcctggacaacagaaccggcaagcccgtgcacagcatggtggcccacctggacgccgtgacctgcctggccgtggaccccaacggcgccttcctgatgagcggcagccacgactgcagcctgagactgtggagcctggacaacaagacctgcgtgcaggagatcaccgcccacagaaagaagcacgaggaggccatccacgccgtggcctgccaccccagcaaggccctgatcgccagcgccggcgccgacgccctggccaaggtgttcgtgtag

SEQ ID NO: 13318 - DNA, 1368 bp, synthetic construct; identical to SEQ ID NO: 10195
  source 1..1368: mol_type = other DNA; note = Synthetic coding sequence

SEQ ID NO: 13319 - DNA, 474 bp, synthetic construct
  source 1..474: mol_type = other DNA; note = Synthetic coding sequence
atgaagagcatgagccagctggccgtgctgagcagaagatggaagcccagcgagatgaagctggaccccttccaggaggtggtgctggagagcagcagcgtggacgagctgagagagaagctgagcgagatcagcggcatccccctggacgacatcgagttcgccaagggcagaggcaccttcccctgcgacatcagcgtgctggacatccaccaggacctggactggaaccccaaggtgagcaccctgaacgtgtggcccctgtacatctgcgacgacggcgccgtgatcttctacagagacaagaccgaggagctgatggagctgaccgacgagcagagaaacgagctgatgaagaaggagagcagcagactgcagaagaccggccacagagtgacctacagccccagaaaggagaaggccctgaagatctacctggacggcgcccccaacaaggacctgacccaggactag

SEQ ID NO: 13320 - DNA, 1083 bp, synthetic construct
  source 1..1083: mol_type = other DNA; note = Synthetic coding sequence
atgaaggccaccgccatgaccagcgcctggctggcccagggcaccggcgagggcgtgaacgacgtgagaaagggcgcctgcgccagccacgtgagcaccatggccagcttcctgaagggcgcccacgtgaccatcaacgccagagccgaggaggacgtggagcccgagtgcatcatggagaaggtggccaaggccagcggcgccaactacagcttccacaaggagagcggcagattccaggacgtgggcccccaggcccccgtgggcagcgtgtaccagaagaccaacgccgtgagcgagatcaagagagtgggcaaggacagcttctgggccaaggccgagaaggaggaggagaacagaagactggaggagaagagaagagccgaggaggcccagagacagctggagcaggagagaagagagagagagctgagagaggccgccagaagagagcagagataccaggagcagggcggcgaggccagcccccagagaacctgggagcagcagcaggaggtggtgagcagaaacagaaacgagcaggagagcgccgtgcaccccagagagatcttcaagcagaaggagagagccatgagcaccaccagcatcagcagcccccagcccggcaagctgagaagccccttcctgcagaagcagctgacccagcccgagacccacttcggcagagagcccgccgccgccatcagcagacccagagccgacctgcccgccgaggagcccgcccccagcacccccccctgcctggtgcaggccgaggaggaggccgtgtacgaggagccccccgagcaggagaccttctacgagcagccccccctggtgcagcagcagggcgccggcagcgagcacatcgaccaccacatccagggccagggcctgagcggccagggcctgtgcgccagagccctgtacgactaccaggccgccgacgacaccgagatcagcttcgaccccgagaacctgatcaccggcatcgaggtgatcgacgagggctggtggagaggctacggccccgacggccacttcggcatgttccccgccaactacgtggagctgatcgagtag

SEQ ID NO: 13321 - DNA, 291 bp, synthetic construct
  source 1..291: mol_type = other DNA; note = Synthetic coding sequence
atgtgccacaccagctgcagcagcggctgccagcccgcctgctgcgcccccagcccctgccagcccgcctgctgcgtgcccgtgagctgccagagcagcgtgtgcgtgcccgtgagctgcagacccatcgtgtgcgccgcccccagctgccagagcagcctgtgcgtgcccgtgagctgcagacccgtggtgtacgccgcccccagctgccagagcagcggctgctgccagcccagctgcaccagcgtgctgtgcagacccatcagctacagcatcagcagctgctgctag

SEQ ID NO: 13322 - DNA, 27 bp, synthetic construct
  source 1..27: mol_type = other DNA; note = Synthetic coding sequence
atgcccctgagcagccccaacgcctag

SEQ ID NO: 13323 - DNA, 384 bp, synthetic construct
  source 1..384: mol_type = other DNA; note = Synthetic coding sequence
atgagcagcagcatgtggtacatcatgcagagcatccagagcaagtacagcctgagcgagagactgatcagaaccatcgccgccatcagaagcttcccccacgacaacgtggaggacctgatcagaggcggcgccgacgtgaactgcacccacggcaccctgaagcccctgcactgcgcctgcatggtgagcgacgccgactgcgtggagctgctgctggagaagggcgccgaggtgaacgccctggacggctacaacagaaccgccctgcactacgccgccgagaaggacgaggcctgcgtggaggtgctgctggagtacggcgccaaccccaacgccctggacggcaacagagacacccccctgcactgggccgccttctag

SEQ ID NO: 13324 - DNA, 318 bp, synthetic construct
  source 1..318: mol_type = other DNA; note = Synthetic coding sequence
cagtggaccgccagcaccgccaccatcaccaaggagaagcaggaccagcccaagaaggacatcagcaactaccaggtggagcaggcccaggtgctgctgaagagagagaaggagatcccccccaccgtgttccccaacagaagcccctggtgccagaacccctacgtgagcgcccacccctactgccccctgatcgagccccacaacaccagcaccgccggcggcagactggacagacagcccagaaccagaagcaccagacccaacagagccagcggcagcaagaagaagaagaccagcgagagccagaagcagtag

SEQ ID NO: 13325 - DNA, 1116 bp, synthetic construct
  source 1..1116: mol_type = other DNA; note = Synthetic coding sequence
atggaggaggagggcctggccgacgaggaggtgagactggtgcagaagaaggacaccggccacatctacgccatgaagatcctgagaaagagcgacatgctggagaaggagcaggtggcccacatcagagccgagagagacatcctggtggaggccgacggcgcctgggtggtgaagatgttctacagcttccaggacaagagaaacctgtacctgatcatggagttcctgcccggcggcgacatgatgaccctgctgatgaagaaggacaccctgaccgaggaggagacccagttctacatcagcgagaccgtgctggccatcgacgccatccaccagctgggcttcatccacagagacatcaagcccgacaacctgctgctggacgccaagggccacgtgaagctgagcgacttcggcctgtgcaccggcctgaagaaggcccacagaaccgagttctacagaaacctgacccacaacccccccagcgacttcagcttccagaacatgaacagcaagagaaaggccgagacctggaagaagaacagaagacagctggcctacagcaccgtgggcacccccgactacatcgcccccgaggtgttcatgcagaccggctacaacaagctgtgcgactggtggagcctgggcgtgatcatgtacgagatgctgatcggctacccccccttctgcagcgagaccccccaggagacctacagaaaggtgatgaactggaaggagaccctggtgttcccccccgaggtgcccatcagcgagaaggccaaggacctgatcctgagattctgcatcgacagcgagaacagaatcggcaacagcggcgtggaggagatcaagggccaccccttcttcgagggcgtggactgggagcacatcagagagagacccgccgccatccccatcgagatcaagagcatcgacgacaccagcaacttcgacgacttccccgagagcgacatcctgcagcccgtgcccaacaccaccgagcccgactacaagagcaaggactgggtgttcctgaactacacctacaagagattcgagggcctgacccagagaggcagcatccccacctacatgaaggccggcaagctgtag

SEQ ID NO: 13326 - DNA, 564 bp, synthetic construct
  source 1..564: mol_type = other DNA; note = Synthetic coding sequence
atgaacaacaccctgagaaaggacggcaagaaggactgctgcttcgagatcagcgcccccgacaagagaatctaccagttcaccgccgccagccccaaggacgccgaggagtgggtgcagcagctgaagttcgtgctgcaggacatggagagcgacatcatccccgaggactacgacgagagaggcgagctgtacgacgacgtggaccaccccctgcccatcagcaaccccctgaccagcagccagcccatcgacgacgagatctacgaggagctgcccgaggaggaggaggacagcgcccccgtgaaggtggaggagcagagaaagatgagccaggacagcgtgcaccacaccagcggcgacaagagcaccgactacgccaacttctaccagggcctgtgggactgcaccggcgccttcagcgacgagctgagcttcaagagaggcgacgtgatctacatcctgagcaaggagtacaacagatacggctggtgggtgggcgagatgaagggcgccatcggcctggtgcccaaggcctacatcatggagatgtacgacatctag

SEQ ID NO: 13327 - DNA, 219 bp, synthetic construct
  source 1..219: mol_type = other DNA; note = Synthetic coding sequence
atggccctgagcctgggctggaaggcccacagaaaccactgcggcctgctgctgcaggccctgagaagcagcggcctgctgctgttcccctgcggccagtgcccctggagaggcgccggcagcttcctggaccccgagatcaaggccttcctggaggagaacaccgaggtgaccagcagcggcagcctgacccccgagatccagctgagactgctgtag

SEQ ID NO: 13328 - DNA, 2919 bp, synthetic construct
  source 1..2919: mol_type = other DNA; note = Synthetic coding sequence
atggccgccgccgccgccgagcagcagcagttctacctgctgctgggcaacctgctgagccccgacaacgtggtgagaaagcaggccgaggagacctacgagaacatccccggccagagcaagatcaccttcctgctgcaggccatcagaaacaccaccgccgccgaggaggccagacagatggccgccgtgctgctgagaagactgctgagcagcgccttcgacgaggtgtaccccgccctgcccagcgacgtgcagaccgccatcaagaacctgctgcccggcttcctgcaggccgtgaacgacagctgctaccagaacgacgacagcgtgctgaagagcctggtggagatcgccgacaccgtgcccaagtacctgagaccccacctggaggccaccctgcagctgagcctgaagctgtgcggcgacaccagcctgaacaacatgcagagacagctggccctggaggtgatcgtgaccctgagcgagaccgccgccgccatgctgagaaagcacaccaacatcgtggcccagaccatcccccagatgctggccatgatggtggacctggaggaggacgaggactgggccaacgccgacgagctggaggacgacgacttcgacagcaacgccgtggccggcgagagcgccctggacagaatggcctgcggcctgggcggcaagctggtgctgcccatgatcaaggagcacatcatgcagatgctgcagaaccccgactggaagtacagacacgccggcctgatggccctgagcgccatcggcgagggctgccaccagcagatggagggcatcctgaacgagatcgtgaacttcgtgctgctgttcctgcaggacccccaccccagagtgagatacgccgcctgcaacgccgtgggccagatggccaccgacttcgcccccggcttccagaagaagttccacgagaaggtgatcgccgccctgctgcagaccatggaggaccagggcaaccagagagtgcaggcccacgccgccgccgccctgatcaacttcaccgaggactgccccaagagcctgctgatcccctacctggacaacctggtgaagcacctgcacagcatcatggtgctgaagctgcaggagctgatccagaagggcaccaagctggtgctggagcaggtggtgaccagcatcgccagcgtggccgacaccgccgaggagaagttcgtgccctactacgacctgttcatgcccagcctgaagcacatcgtggagaacgccgtgcagaaggagctgagactgctgagaggcaagaccatcgagtgcatcagcctgatcggcctggccgtgggcaaggagaagttcatgcaggacgccagcgacgtgatgcagctgctgctgaagacccagaccgacttcaacgacatggaggacgacgacccccagatcagctacatgatcagcgcctgggccagaatgtgcaagatcctgggcaaggagttccagcagtacctgcccgtggtgatgggccccctgatgaagaccgccagcatcaagcccgaggtggccctgctggacacccaggacatggagaacatgagcgacgacgacggctgggagttcgtgaacctgggcgaccagcagagcttcggcatcaagaccgccggcctggaggagaagagcaccgcctgccagatgctggtgtgctacgccaaggagctgaaggagggcttcgtggagtacaccgagcaggtggtgaagctgatggtgcccctgctgaagttctacttccacgacggcgtgagagtggccgccgccgagagcatgcccctgctgctggagtgcgccagagtgagaggccccgagtacctgacccagatgtggcacttcatgtgcgacgccctgatcaaggccatcggcaccgagcccgacagcgacgtgctgagcgagatcatgcacagcttcgccaagtgcatcgaggtgatgggcgacggctgcctgaacaacgagcacttcgaggagctgggcggcatcctgaaggccaagctggaggagcacttcaagaaccaggagctgagacaggtgaagagacaggacgaggactacgacgagcaggtggaggagagcctgcaggacgaggacgacaacgacgtgtacatcctgaccaaggtgagcgacatcctgcacagcatcttcagcagctacaaggagaaggtgctgccctggttcgagcagctgctgcccctgatcgtgaacctgatctgcccccacagaccctggcccgacagacagtggggcctgtgcatcttcgacgacgtgatcgagcactgcagccccgccagcttcaagtacgccgagtacttcctgagacccatgctgcagtacgtgtgcgacaacagccccgaggtgagacaggccgccgcctacggcctgggcgtgatggcccagtacggcggcgacaactacagacccttctgcaccgaggccctgcccctgctggtgagagtgatccagagcgccgacagcaagaccaaggagaacgtgaacgccaccgagaactgcatcagcgccgtgggcaagatcatgaagttcaagcccgactgcgtgaacgtggaggaggtgctgccccactggctgagctggctgcccctgcacgaggacaaggaggaggccgtgcagaccttcaactacctgtgcgacctgatcgagagcaaccaccccatcgtgctgggccccaacaacaccaacctgcccaagatcttcagcatcatcgccgagggcgagatgcacgaggccatcaagcacgaggacccctgcgccaagagactggccaacgtggtgagacaggtgcagaccagcggcggcctgtggaccgagtgcatcgcccagctgagccccgagcagcaggccgccatccaggagctgctgaacagcgcctag

SEQ ID NO: 13329 - DNA, 1428 bp, synthetic construct
  source 1..1428: mol_type = other DNA; note = Synthetic coding sequence
atgcaggtgaccttcatctacgtgtgcctgaagggcctgatgctgcaggacctggtgagcgccaagctgatcagcgactacaccgtgaccgagatccccgacaccatcaacgacctgcagggcagcaccaaggtgctgcaggccgtgcagtggctggtgagccactgcccccacagcctggacctgtgctgccagaccctgatccagtacgtggaggacggcatcggccacgagttcagcggcagattcttccacgacagaagagagagaagactgggcggcctggccagccaggagcccggcgccatcatcgagctgttcaacagcgtgctgcagttcctggccagcgtggtgagcagcgagcagctgtgcgacctgagctggcccgtgaccgagttcgccgaggccggcggcagcagactgctgccccacctgcactggaacgcccccgagcacctggcctggctgaagcaggccgtgctgggcttccagctgccccagatggacctgccccccctgggcgccccctggctgcccgtgtgcagcatggtggtgcagtacgccagccagatccccagcagcagacagacccagcccgtgctgcagagccaggtggagaacctgctgcacagaacctactgcagatggaagagcaagagccccagccccgtgcacggcgccggccccagcgtgatggagatcccctgggacgacctgatcgccctgtgcatcaaccacaagctgagagactggaccccccccagactgcccgtgaccagcgaggccctgagcgaggacggccagatctgcgtgtacttcttcaagaacgacctgaagaagtacgacgtgcccctgagctgggagcaggccagactgcagacccagaaggagctgcagctgagagagggcagactggccatcaagcccttccaccccagcgccaacaacttccccatccccctgctgcacatgcacagaaactggaagagaagcaccgagtgcgcccaggagggcagaatccccagcaccgaggacctgatgagaggcgccagcgccgaggagctgctggcccagtgcctgagcagcagcctgctgctggagaaggaggagaacaagagattcgaggaccagctgcagcagtggctgagcgaggacagcggcgccttcaccgacctgaccagcctgcccctgtacctgccccagaccctggtgagcctgagccacaccatcgagcccgtgatgaagaccagcgtgaccaccagcccccagagcgacatgatgagagagcagctgcagctgagcgaggccaccggcacctgcctgggcgagagactgaagcacctggagagactgatcagaagcagcagagaggaggaggtggccagcgagctgcacctgagcgccctgctggacatggtggacatctag

SEQ ID NO: 13330 - DNA, 333 bp, synthetic construct
  source 1..333: mol_type = other DNA; note = Synthetic coding sequence
atgagcaccgccctgacccacaccaccgtggccatgagatgccccatgggcggcggcggcggccccacctacggccccccccagccctggggccaccccgacgtgcacatcatgcagcaccacgtgctgcccatccaggccagactgggcagcatcgccgagatcgacctgggcgtgcccccccccgtgatgaagaccttcaaggagttcctgctgagcctggacgacagcgtggacgagaccgaggccgtgaagagatacaacgactacaagctggacttcagaagacagcagatgcaggacttcttcctggcccacaaggacgaggagtag

SEQ ID NO: 13331 - DNA, 828 bp, synthetic construct; identical to SEQ ID NO: 12370
  source 1..828: mol_type = other DNA; note = Synthetic coding sequence

SEQ ID NO: 13332 - DNA, 876 bp, synthetic construct
  source 1..876: mol_type = other DNA; note = Synthetic coding sequence
atgatcggcgacggcgaggactacttcctgagcctgttcggcgacagcaagaagctgaccgcccacagcaactacacccagaagaccctgaagtacttcagcatgatcctggaggaggtgggccagttcaccagcagcagcctgggcgacgtggagatcgccgaggtgaacgtgaagggcctgttcgtgaagctgatcaacagcagcctggacaaggagatggccatcggcgaccacatcctgcagcagaacgtgaacggccagaccatcagcctgtacagattcctgcccaacatcgtgatgcaggccaacagcaccgtgaccgtgtgggccgccgccagcgaggccaagcaccagccccccagcgacttcctgtggaaggagcaggacaagttcagagccagccccgactgcatcaccatcctgtgcaagcccaacggccaggccatcgcctggtacacccccatccactggaagcaggcctgggagaagctggacgccgacgtggagttcaacagatgcagcgtggtgagccccaccttcagaaagagagtgttccagtggaccgccagcaccgccaccatcaccaaggagaagcaggaccagcccaagaaggacatcagcaactaccaggtggagcaggcccaggtgctgctgaagagagagaaggagatcccccccaccgtgttccccaacagaagcccctggtgccagaacccctacgtgagcgcccacccctactgccccctgatcgagccccacaacaccagcaccgccggcggcagactggacagacagcccagaaccagaagcaccagacccaacagagccagcggcagcaagaagaagaagaccagcgagagccagaagcagtag

SEQ ID NO: 13333 - DNA, 1185 bp, synthetic construct
  source 1..1185: mol_type = other DNA; note = Synthetic coding sequence
atggtgcccagccaggccccctacctggtgcccgccttccccctgcccgccgccaccagccccggcagagagtacgccgcccccggcaccgcccccgagggcctgcacggcctgcccctgagcgagggcctgcagccctaccccgccttccccttcccctacctggacaccttcatgaccgtgttcctgcccgacccccccgtgtgccccctgctgagccccagcttcctgccctgccccttcctgggcgccaccgccagcagcgccatcagccccagcatgagcagcgccatgagccccaccctggaccccccccccagcgtgaccagccagagaagagaggaggagaagtgggaggcccagagcgagggccaccccttcatcaccagcagaagcagcagccccctgcagctgaacctgctgcaggaggagatgcccagacccagcgagagccccgaccagatgagaagaaacacctgcccccagaccgagtactgcgtgaccggcaacaacggcagcgagagcagccccgccaccaccggcgccctgagcaccggcagcccccccagagagaaccccagccaccccaccgccagcgccctgagcaccggcagcccccccatgaagaaccccagccaccccaccgccagcaccctgagcatgggcctgccccccagcagaacccccagccaccccaccgccaccgtgctgagcaccggcagcccccccagcgagagccccagcagaaccggcagcgccgccagcggcagcagcgacagcagcatctacctgaccagcagcgtgtacagcagcaagatcagccagaacggccagcagagccaggacgtgcagaagaaggagaccttccccaacgtggccgaggagcccatctggagaatgatcagacagacccccgagagaatcctgatgacctaccaggtgcccgagagagtgaaggaggtggtgctgaaggaggacctggagaagctggagagcatgagacagcagcagccccagttcagccacggccagaaggaggagctggccaaggtgtacaactggatccagagccagaccgtgacccaggagatcgacatccaggcctgcgtgacctgcgagaacgaggacagcgccgacggcgccgccaccagctgcggccaggtgctggtggaggacagctgctag

SEQ ID NO: 13334 - DNA, 2424 bp, synthetic construct
  source 1..2424: mol_type = other DNA; note = Synthetic coding sequence
cagggcgccagcttcgccctggccgccgccgccgccctgctgttcggcagcgacatggaggacggccccagcaacaacgccagctgcttcagaagactgaccgagtgcttcctgagccccagcctgaccgacgagaaggtgaaggcctacctgagcctgcacccccaggtgctggacgagttcgtgagcgagagcgtgagcgccgagaccgtggagaagtggctgaagagaaagaacaacaagagcgaggacgagagcgcccccaaggaggtgagcagataccaggacaccaacatgcagggcgtggtgtacgagctgaacagctacatcgagcagagactggacaccggcggcgacaaccagctgctgctgtacgagctgagcagcatcatcaagatcgccaccaaggccgacggcttcgccctgtacttcctgggcgagtgcaacaacagcctgtgcatcttcaccccccccggcatcaaggagggcaagcccagactgatccccgccggccccatcacccagggcaccaccgtgagcgcctacgtggccaagagcagaaagaccctgctggtggaggacatcctgggcgacgagagattccccagaggcaccggcctggagagcggcaccagaatccagagcgtgctgtgcctgcccatcgtgaccgccatcggcgacctgatcggcatcctggagctgtacagacactggggcaaggaggccttctgcctgagccaccaggaggtggccaccgccaacctggcctgggccagcgtggccatccaccaggtgcaggtgtgcagaggcctggccaagcagaccgagctgaacgacttcctgctggacgtgagcaagacctacttcgacaacatcgtggccatcgacagcctgctggagcacatcatgatctacgccaagaacctggtgaacgccgacagatgcgccctgttccaggtggaccacaagaacaaggagctgtacagcgacctgttcgacatcggcgaggagaaggagggcaagcccgtgttcaagaagaccaaggagatcagattcagcatcgagaagggcatcgccggccaggtggccagaaccggcgaggtgctgaacatccccgacgcctacgccgaccccagattcaacagagaggtggacctgtacaccggctacaccaccagaaacatcctgtgcatgcccatcgtgagcagaggcagcgtgatcggcgtggtgcagatggtgaacaagatcagcggcagcgccttcagcaagaccgacgagaacaacttcaagatgttcgccgtgttctgcgccctggccctgcactgcgccaacatgtaccacagaatcagacacagcgagtgcatctacagagtgaccatggagaagctgagctaccacagcatctgcaccagcgaggagtggcagggcctgatgcagttcaccctgcccgtgagactgtgcaaggagatcgagctgttccacttcgacatcggccccttcgagaacatgtggcccggcatcttcgtgtacatggtgcacagaagctgcggcaccagctgcttcgagctggagaagctgtgcagattcatcatgagcgtgaagaagaactacagaagagtgccctaccacaactggaagcacgccgtgaccgtggcccactgcatgtacgccatcctgcagaacaaccacaccctgttcaccgacctggagagaaagggcctgctgatcgcctgcctgtgccacgacctggaccacagaggcttcagcaacagctacctgcagaagttcgaccaccccctggccgccctgtacagcaccagcaccatggagcagcaccacttcagccagaccgtgagcatcctgcagctggagggccacaacatcttcagcaccctgagcagcagcgagtacgagcaggtgctggagatcatcagaaaggccatcatcgccaccgacctggccctgtacttcggcaacagaaagcagctggaggagatgtaccagaccggcagcctgaacctgaacaaccagagccacagagacagagtgatcggcctgatgatgaccgcctgcgacctgtgcagcgtgaccaagctgtggcccgtgaccaagctgaccgccaacgacatctacgccgagttctgggccgagggcgacgagatgaagaagctgggcatccagcccatccccatgatggacagagacaagaaggacgaggtgccccagggccagctgggcttctacaacgccgtggccatcccctgctacaccaccctgacccagatcctgccccccaccgagcccctgctgaaggcctgcagagacaacctgagccagtgggagaaggtgatcagaggcgaggagaccgccacctggatcagcagccccagcgtggcccagaaggccgccgccagcgaggactag

SEQ ID NO: 13335 - DNA, 1677 bp, synthetic construct
  source 1..1677: mol_type = other DNA; note = Synthetic coding sequence
atggccagctgccccgacagcgacaacagctgggtgctggccggcggcgagctgggcatcagcctgaacatgtgcctgctgggcgccctggtgctgctgggcctgggcgtgctgctgttcagcggcggcctgagcgagagcgagaccggccccatggaggaggtggagagacaggtgctgcccgaccccgaggtgctggaggccgtgggcgacagacaggacggcctgagagagcagctgcaggcccccgtgccccccgacagcgtgcccagcctgcagaacatgggcctgctgctggacaagctggccaaggagaaccaggacatcagactgctgcaggcccagctgcaggcccagaaggaggagctgcagagcctgatgcaccagcccaagggcctggaggaggagaacgcccagctgagaggcgccctgcagcagggcgaggccttccagagagccctggagagcgagctgcagcagctgagagccagactgcagggcctggaggccgactgcgtgagaggccccgacggcgtgtgcctgagcggcggcagaggcccccagggcgacaaggccatcagagagcagggccccagagagcaggagcccgagctgagcttcctgaagcagaaggagcagctggaggccgaggcccaggccctgagacaggagctggagagacagagaagactgctgggcagcgtgcagcaggacctggagagaagcctgcaggacgccagcagaggcgaccccgcccacgccggcctggccgagctgggccacagactggcccagaagctgcagggcctggagaactggggccaggaccccggcgtgagcgccaacgccagcaaggcctggcaccagaagagccacttccagaacagcagagagtggagcggcaaggagaagtggtgggacggccagagagacagaaaggccgagcactggaagcacaagaaggaggagagcggcagagagagaaagaagaactggggcggccaggaggacagagagcccgccggcagatggaaggagggcagacccagagtggaggagagcggcagcaagaaggagggcaagagacagggccccaaggagccccccagaaagagcggcagcttccacagcagcggcgagaagcagaagcagcccagatggagagagggcaccaaggacagccacgaccccctgcccagctgggccgagctgctgagacccaagtacagagccccccagggctgcagcggcgtggacgagtgcgccagacaggagggcctgaccttcttcggcaccgagctggcccccgtgagacagcaggagctggccagcctgctgagaacctacctggccagactgccctgggccggccagctgaccaaggagctgcccctgagccccgccttcttcggcgaggacggcatcttcagacacgacagactgagattcagagacttcgtggacgccctggaggacagcctggaggaggtggccgtgcagcagaccggcgacgacgacgaggtggacgacttcgaggacttcatcttcagccacttcttcggcgacaaggccctgaagaagagaagcggcaagaaggacaagcacagccagagccccagagccgccggccccagagagggccacagccacagccaccaccaccaccacagaggctag

SEQ ID NO: 13336 - DNA, 1881 bp, synthetic construct
  source 1..1881: mol_type = other DNA; note = Synthetic coding sequence
atgggcaacgccgccggcagcgccgagcagcccgccggccccgccgcccccccccccaagcagcacagattcgagaagctgatggagtacttcagaaacgaggacagcaacatcgacttcatggtggcctgcatgcagttcatcaacatcgtggtgcacagcgtggagaacatgaacttcagagtgttcctgcagtacgagttcacccacctgggcctggacctgtacctggagagactgagactgaccgagagcgacaagctgcaggtgcagatccaggcctacctggacaacatcttcgacgtgggcgccctgctggaggacaccgagaccaagaacgccgtgctggagcacatggaggagctgcaggagcaggtggccctgctgaccgagagactgagagacgccgagaacgagagcatggccaagatcgccgagctggagaagcagctgagccaggccagaaaggagctggagaccctgagagagagattcagcgagagcaccgccatgggccccagcagaagaccccccgagcccgagaaggccccccccgccgcccccaccagacccagcgccctggagctgaaggtggaggagctggaggagaagggcctgatcagaatcctgagaggccccggcgacgccgtgagcatcgagatcctgcccgtggccgtggccacccccagcggcggcgacgcccccacccccggcgtgcccaccggcagccccagccccgacctggcccccgccgccgagcccgcccccggcgccgccccccccccccccccccccccccccggcggcccccccgacgccctgggcagaagagacagcgagctgggccccggcgtgaaggccaagaagcccatccagaccaagttcagaatgcccctgctgaactgggtggccctgaagcccagccagatcaccggcaccgtgttcaccgagctgaacgacgagaaggtgctgcaggagctggacatgagcgacttcgaggagcagttcaagaccaagagccagggccccagcctggacctgagcgccctgaagagcaaggccgcccagaaggcccccagcaaggccaccctgatcgaggccaacagagccaagaacctggccatcaccctgagaaagggcaacctgggcgccgagagaatctgccaggccatcgaggcctacgacctgcaggccctgggcctggacttcctggagctgctgatgagattcctgcccaccgagtacgagagaagcctgatcaccagattcgagagagagcagagacccatggaggagctgagcgaggaggacagattcatgctgtgcttcagcagaatccccagactgcccgagagaatgaccaccctgaccttcctgggcaacttccccgacaccgcccagctgctgatgccccagctgaacgccatcatcgccgccagcatgagcatcaagagcagcgacaagctgagacagatcctggagatcgtgctggccttcggcaactacatgaacagcagcaagagaggcgccgcctacggcttcagactgcagagcctggacgccctgctggagatgaagagcaccgacagaaagcagaccctgctgcactacctggtgaaggtgatcgccgagaagtacccccagctgaccggcttccacagcgacctgcacttcctggacaaggccggcagcgtgagcctggacagcgtgctggccgacgtgagaagcctgcagagaggcctggagctgacccagagagagttcgtgagacaggacgactgcatggtgctgaaggagttcctgagagccaacagccccaccatggacaagctgctggccgacagcaagaccgcccaggccgtgcccaccggcggcctgtag

SEQ ID NO: 13337 - DNA, 1500 bp, synthetic construct
  source 1..1500: mol_type = other DNA; note = Synthetic coding sequence
atggacaagctgatcgtggacggcagaggcaaggccaccatcagcaacgacggcgccaccatcctgaagctgctggacgtggtgcaccccgccgccaagaccctggtggacatcgccaagagccaggacgccgaggtgggcgacggcaccaccagcgtgaccctgctggccgccgagttcctgaagcaggtgaagccctacgtggaggagggcctgcacccccagatcatcatcagagccttcagaaccgccacccagctggccgtgaacaagatcaaggagatcgccgtgaccgtgaagaaggccgacaaggtggagcagagaaagctgctggagaagtgcgccatgaccgccctgagcagcaagctgatcagccagcagaaggccttcttcgccaagatggtggtggacgccgtgatgatgctggacgacctgctgcagctgaagatgatcggcatcaagaaggtgcagggcggcgccctggaggacagccagctggtggccggcgtggccttcaagaagaccttcagctacgccggcttcgagatgcagcccaagaagtaccacaaccccaagatcgccctgctgaacgtggagctggagctgaaggccgagaaggacaacgccgagatcagagtgcacaccgtggaggactaccaggccatcgtggacgccgagtggaacatcctgtacgacaagctggagaagatccaccacagcggcgccaaggtggtgctgagcaagctgcccatcggcgacgtggccacccagtacttcgccgacagagacatgttctgcgccggcagagtgcccgaggaggacctgaagagaaccatgatggcctgcggcggcagcatccagaccagcgtgaacgccctgagcgccgacgtgctgggcagatgccaggtgttcgaggagacccagatcggcggcgagagatacaacttcttcaccggctgccccaaggccaagacctgcaccttcatcctgagaggcggcgccgagcagttcatggaggagaccgagagaagcctgcacgacgccatcatgatcgtgagaagagccatcaagaacgacagcgtggtggccggcggcggcgccatcgagatggagctgagcaagtacctgagagactacagcagaaccatccccggcaagcagcagctgctgatcggcgcctacgccaaggccctggagatcatccccagacagctgtgcgacaacgccggcttcgacgccaccaacatcctgaacaagctgagagccagacacgcccagggcggcacctggtacggcgtggacatcaacaacgaggacatcgccgacaacttcgaggccttcgtgtgggagcccgccatggtgagaatcaacgccctgaccgccgccagcgaggccgcctgcctgatcgtgagcgtggacgagaccatcaagaaccccagaagcaccgtggacgcccccaccgccgccggcagaggcagaggcagaggcagaccccactag

SEQ ID NO: 13338 - DNA, 78 bp, synthetic construct
  source 1..78: mol_type = other DNA; note = Synthetic coding sequence
atggcccacgagatgatcggcacccagatcgtgaccgagagactggtggccctgctggagagcggcaccgagaagtag

SEQ ID NO: 13339 - DNA, 633 bp, synthetic construct
  source 1..633: mol_type = other DNA; note = Synthetic coding sequence
atggagaagaccgagctgatccagaaggccgtggcctacaagaacgtggtgggcggcagaagaagcgcctggagagtgatcagcagcatcgagcagaagaccgacaccagcgacaagaagctgcagctgatcaaggactacagagagaaggtggagagcgagctgagaagcatctgcaccaccgtgctggagctgctggacaagtacctgatcgccaacgccaccaaccccgagagcaaggtgttctacctgaagatgaagggcgactacttcagatacctggccgaggtggcctgcggcgacgacagaaagcagaccatcgacaacagccagggcgcctaccaggaggccttcgacatcagcaagaaggagatgcagcccacccaccccatcagactgggcctggccctgaacttcagcgtgttctactacgagatcctgaacaaccccgagctggcctgcaccctggccaagaccgccttcgacgaggccatcgccgagctggacaccctgaacgaggacagctacaaggacagcaccctgatcatgcagctgctgagagacaacctgaccctgtggaccagcgacagcgccggcgaggagtgcgacgccgccgagggcgccgagaactag

SEQ ID NO: 13340 - DNA, 501 bp, synthetic construct
  source 1..501: mol_type = other DNA; note = Synthetic coding sequence
atggacctgatgcccttcatcaacaaggccggctgcgagtgcctgaacgagagcgacgagcacggcttcgacaactgcctgagaaaggacaccaccttcctggagagcgactgcgacgagcagctgctgatcaccgtggccttcaaccagcccgtgaagctgtacagcatgaagttccagggccccgacaacggccagggccccaagtacgtgaagatcttcatcaacctgcccagaagcatggacttcgaggaggccgagagaagcgagcccacccaggccctggagctgaccgaggacgacatcaaggaggacggcatcgtgcccctgagatacgtgaagttccagaacgtgaacagcgtgaccatcttcgtgcagagcaaccagggcgaggaggagaccaccagaatcagctacttcaccttcatcggcacccccgtgcaggccaccaacatgaacgacttcaagagagtggtgggcaagaagggcgagagccactag

SEQ ID NO: 13341 - DNA, 639 bp, synthetic construct
  source 1..639: mol_type = other DNA; note = Synthetic coding sequence
atggccgcccccgaggagagagacctgacccaggagcagaccgagaagctgctgcagttccaggacctgaccggcatcgagagcatggaccagtgcagacacaccctggagcagcacaactggaacatcgaggccgccgtgcaggacagactgaacgagcaggagggcgtgcccagcgtgttcaaccccccccccagcagacccctgcaggtgaacaccgccgaccacagaatctacagctacgtggtgagcagaccccagcccagaggcctgctgggctggggctactacctgatcatgctgcccttcagattcacctactacaccatcctggacatcttcagattcgccctgagattcatcagacccgaccccagaagcagagtgaccgaccccgtgggcgacatcgtgagcttcatgcacagcttcgaggagaagtacggcagagcccaccccgtgttctaccagggcacctacagccaggccctgaacgacgccaagagagagctgagattcctgctggtgtacctgcacggcgacgaccaccaggacagcgacgagttctgcagaaacaccctgtgcgcccccgaggtgatcagcctgatcaacaccagcagccacagcttcctgctgctgtag

SEQ ID NO: 13342 - DNA, 1371 bp, synthetic construct; identical to SEQ ID NO: 11746
  source 1..1371: mol_type = other DNA; note = Synthetic coding sequence

SEQ ID NO: 13343 - DNA, 183 bp, synthetic construct
  source 1..183: mol_type = other DNA; note = Synthetic coding sequence
atggacgagcaggccctgctgggcctgaaccccaacgccgacagcgacttcagacagagagccctggcctacttcgagcagctgaagatcagccccgacgcctggcaggtgtgcgccgaggccctggcccagagaacctacagcgacgaccacgtgaagttcttctgcttccaggtgctgtag

SEQ ID NO: 13344 - DNA, 339 bp, synthetic construct
  source 1..339: mol_type = other DNA; note = Synthetic coding sequence
atgagcagcagcatgtggtacatcatgcagagcatccagagcaagtacagcctgagcgagagactgatcagaaccatcgccgccatcagaagcttcccccacgacaacgtggaggacctgatcagaggcggcgccgacgtgaactgcacccacggcaccctgaagcccctgcactgcgcctgcatggtgagcgacgccgactgcgtggagctgctgctggagaagggcgccgaggtgaacgccctggacggctacaacagaaccgccctgcactacgccgccgagaaggacgaggcctgcgtggaggtgctgctggagtacggcgccaaccccaactag

SEQ ID NO: 13345 - DNA, 1173 bp, synthetic construct; identical to SEQ ID NO: 12528
  source 1..1173: mol_type = other DNA; note = Synthetic coding sequence

SEQ ID NO: 13346 - DNA, 1335 bp, synthetic construct; identical to SEQ ID NO: 9462
  source 1..1335: mol_type = other DNA; note = Synthetic coding sequence

SEQ ID NO: 13347 - DNA, 495 bp, synthetic construct; identical to SEQ ID NO: 10722
  source 1..495: mol_type = other DNA; note = Synthetic coding sequence

SEQ ID NO: 13348 - DNA, 3252 bp, synthetic construct; identical to SEQ ID NO: 9558
  source 1..3252: mol_type = other DNA; note = Synthetic coding sequence

SEQ ID NO: 13349 - DNA, 1503 bp, synthetic construct
  source 1..1503: mol_type = other DNA; note = Synthetic coding sequence
atggccgccgtgaagaccctgaaccccaagggcaccatgaagatgctggtgagcggcgccggcgacatcaagctgaccaaggacggcaacgtgctgctgcacgagatgcagatccagcaccccaccgccagcctgatcgccaaggtggccaccgcccaggacgacatcaccggcgacggcaccaccagcaacgtgctgatcatcggcgagctgctgaagcaggccgacctgtacatcagcgagggcctgcaccccagaatcatcaccgagggcttcgaggccgccaaggagaaggccctgcagttcctggaggaggtgaaggtgagcagagagatggacagagagaccctgatcgacgtggccagaaccagcctgagaaccaaggtgcacgccgagctggccgacgtgctgaccgaggccgtggtggacagcatcctggccatcaagaagcaggacgagcccatcgacctgttcatgatcgagatcatggagatgaagcacaagagcgagaccgacaccagcctgatcagaggcctggtgctggaccacggcgccagacaccccgacatgaagaagagagtggaggacgcctacatcctgacctgcaacgtgagcctggagtacgagaagaccgaggtgaacagcggcttcttctacaagagcgccgaggagagagagaagctggtgaaggccgagagaaagttcatcgaggacagagtgaagaagatcatcgagctgaagagaaaggtgtgcggcgacagcgacaagggcttcgtggtgatcaaccagaagggcatcgaccccttcagcctggacgccctgagcaaggagggcatcgtggccctgagaagagccaagagaagaaacatggagagactgaccctggcctgcggcggcgtggccctgaacagcttcgacgacctgagccccgactgcctgggccacgccggcctggtgtacgagtacaccctgggcgaggagaagttcaccttcatcgagaagtgcaacaaccccagaagcgtgaccctgctgatcaagggccccaacaagcacaccctgacccagatcaaggacgccgtgagagacggcctgagagccgtgaagaacgccatcgacgacggctgcgtggtgcccggcgccggcgccgtggaggtggccatggccgaggccctgatcaagcacaagcccagcgtgaagggcagagcccagctgggcgtgcaggccttcgccgacgccctgctgatcatccccaaggtgctggcccagaacagcggcttcgacctgcaggagaccctggtgaagatccaggccgagcacagcgagagcggccagctggtgggcgtggacctgaacaccggcgagcccatggtggccgccgaggtgggcgtgtgggacaactactgcgtgaagaagcagctgctgcacagctgcaccgtgatcgccaccaacatcctgctggtggacgagatcatgagagccggcatgagcagcctgaagggctag

SEQ ID NO: 13350 - DNA, 1542 bp, synthetic construct
  source 1..1542: mol_type = other DNA; note = Synthetic coding sequence
atgtgggacgtgtgcatggagagaggccacagagacctggagcagttcgagagagtgcacagatacatcagcgaccagctgttcaccaacttcaaggagagaaccgagagactggtgatcagccccctgaaccagctgctgagcatgttcaccggcccccacaagctggtgcagaagagattcgacaagctgctggacttctacaactgcaccgagagagccgagaagctgaaggacaagaagaccctggaggagctgcagagcgccagaaacaactacgaggccctgaacgcccagctgctggacgagctgcccaagttccaccagtacgcccagggcctgttcaccaactgcgtgcacggctacgccgaggcccactgcgacttcgtgcaccaggccctggagcagctgaagcccctgctgagcctgctgaaggtggccggcagagagggcaacctgatcgccatcttccacgaggagcacagcagagtgctgcagcagctgcaggtgttcaccttcttccccgagagcctgcccgccaccaagaagcccttcgagagaaagaccatcgacagacagagcgccagaaagcccctgctgggcctgcccagctacatgctgcagagcgaggagctgagagccagcctgctggccagatacccccccgagaagctgttccaggccgagagaaacttcaacgccgcccaggacctggacgtgagcctgctggagggcgacctggtgggcgtgatcaagaagaaggaccccatgggcagccagaacagatggctgatcgacaacggcgtgaccaagggcttcgtgtacagcagcttcctgaagccctacaaccccagaagaagccacagcgacgccagcgtgggcagccacagcagcaccgagagcgagcacggcagcagcagccccagattccccagacagaacagcggcagcaccctgaccttcaaccccagcagcatggccgtgagcttcaccagcggcagctgccagaagcagccccaggacgccagccccccccccaaggagtgcgaccagggcaccctgagcgccagcctgaaccccagcaacagcgagagcagccccagcagatgccccagcgaccccgacagcaccagccagcccagaagcggcgacagcgccgacgtggccagagacgtgaagcagcccaccgccacccccagaagctacagaaacttcagacaccccgagatcgtgggctacagcgtgcccggcagaaacggccagagccaggacctggtgaagggctgcgccagaaccgcccaggcccccgaggacagaagcaccgagcccgacggcagcgaggccgagggcaaccaggtgtacttcgccgtgtacaccttcaaggccagaaaccccaacgagctgagcgtgagcgccaaccagaagctgaagatcctggagttcaaggacgtgaccggcaacaccgagtggtggctggccgaggtgaacggcaagaagggctacgtgcccagcaactacatcagaaagaccgagtacacctag

SEQ ID NO: 13351 - DNA, 153 bp, synthetic construct; identical to SEQ ID NO: 11238
  source 1..153: mol_type = other DNA; note = Synthetic coding sequence

SEQ ID NO: 13352 - DNA, 4317 bp, synthetic construct
  source 1..4317: mol_type = other DNA; note = Synthetic coding sequence
atgagcatgctgaagcccagcggcctgaaggcccccaccaagatcctgaagcccggcagcaccgccctgaagacccccaccgccgtggtggcccccgtggagaagaccatcagcagcgagaaggccagcagcacccccagcagcgagacccaggaggagttcgtggacgacttcagagtgggcgagagagtgtgggtgaacggcaacaagcccggcttcatccagttcctgggcgagacccagttcgcccccggccagtgggccggcatcgtgctggacgagcccatcggcaagaacgacggcagcgtggccggcgtgagatacttccagtgcgagcccctgaagggcatcttcaccagacccagcaagctgaccagaaaggtgcaggccgaggacgaggccaacggcctgcagaccacccccgccagcagagccaccagccccctgtgcaccagcaccgccagcatggtgagcagcagccccagcacccccagcaacatcccccagaagcccagccagcccgccgccaaggagcccagcgccaccccccccatcagcaacctgaccaagaccgccagcgagagcatcagcaacctgagcgaggccggcagcatcaagaagggcgagagagagctgaagatcggcgacagagtgctggtgggcggcaccaaggccggcgtggtgagattcctgggcgagaccgacttcgccaagggcgagtggtgcggcgtggagctggacgagcccctgggcaagaacgacggcgccgtggccggcaccagatacttccagtgccagcccaagtacggcctgttcgcccccgtgcacaaggtgaccaagatcggcttccccagcaccacccccgccaaggccaaggccaacgccgtgagaagagtgatggccaccaccagcgccagcctgaagagaagccccagcgccagcagcctgagcagcatgagcagcgtggccagcagcgtgagcagcagacccagcagaaccggcctgctgaccgagaccagcagcagatacgccagaaagatcagcggcaccaccgccctgcaggaggccctgaaggagaagcagcagcacatcgagcagctgctggccgagagagacctggagagagccgaggtggccaaggccaccagccacgtgggcgagatcgagcaggagctggccctggccagagacggccacgaccagcacgtgctggagctggaggccaagatggaccagctgagaaccatggtggaggccgccgacagagagaaggtggagctgctgaaccagctggaggaggagaagagaaaggtggaggacctgcagttcagagtggaggaggagagcatcaccaagggcgacctggagcagaagagccagatcagcgaggaccccgagaacacccagaccaagctggagcacgccagaatcaaggagctggagcagagcctgctgttcgagaagaccaaggccgacaagctgcagagagagctggaggacaccagagtggccaccgtgagcgagaagagcagaatcatggagctggagaaggacctggccctgagagtgcaggaggtggccgagctgagaagaagactggagagcaacaagcccgccggcgacgtggacatgagcctgagcctgctgcaggagatcagcagcctgcaggagaagctggaggtgaccagaaccgaccaccagagagagatcaccagcctgaaggagcacttcggcgccagagaggagacccaccagaaggagatcaaggccctgtacaccgccaccgagaagctgagcaaggagaacgagagcctgaagagcaagctggagcacgccaacaaggagaacagcgacgtgatcgccctgtggaagagcaagctggagaccgccatcgccagccaccagcaggccatggaggagctgaaggtgagcttcagcaagggcctgggcaccgagaccgccgagttcgccgagctgaagacccagatcgagaagatgagactggactaccagcacgagatcgagaacctgcagaaccagcaggacagcgagagagccgcccacgccaaggagatggaggccctgagagccaagctgatgaaggtgatcaaggagaaggagaacagcctggaggccatcagaagcaagctggacaaggccgaggaccagcacctggtggagatggaggacaccctgaacaagctgcaggaggccgagatcaaggtgaaggagctggaggtgctgcaggccaagtgcaacgagcagaccaaggtgatcgacaacttcaccagccagctgaaggccaccgaggagaagctgctggacctggacgccctgagaaaggccagcagcgagggcaagagcgagatgaagaagctgagacagcagctggaggccgccgagaagcagatcaagcacctggagatcgagaagaacgccgagagcagcaaggccagcagcatcaccagagagctgcagggcagagagctgaagctgaccaacctgcaggagaacctgagcgaggtgagccaggtgaaggagaccctggagaaggagctgcagatcctgaaggagaagttcgccgaggccagcgaggaggccgtgagcgtgcagagaagcatgcaggagaccgtgaacaagctgcaccagaaggaggagcagttcaacatgctgagcagcgacctggagaagctgagagagaacctggccgacatggaggccaagttcagagagaaggacgagagagaggagcagctgatcaaggccaaggagaagctggagaacgacatcgccgagatcatgaagatgagcggcgacaacagcagccagctgaccaagatgaacgacgagctgagactgaaggagagagacgtggaggagctgcagctgaagctgaccaaggccaacgagaacgccagcttcctgcagaagagcatcgaggacatgaccgtgaaggccgagcagagccagcaggaggccgccaagaagcacgaggaggagaagaaggagctggagagaaagctgagcgacctggagaagaagatggagaccagccacaaccagtgccaggagctgaaggccagatacgagagagccaccagcgagaccaagaccaagcacgaggagatcctgcagaacctgcagaagaccctgctggacaccgaggacaagctgaagggcgccagagaggagaacagcggcctgctgcaggagctggaggagctgagaaagcaggccgacaaggccaaggccgcccagaccgccgaggacgccatgcagatcatggagcagatgaccaaggagaagaccgagaccctggccagcctggaggacaccaagcagaccaacgccaagctgcagaacgagctggacaccctgaaggagaacaacctgaagaacgtggaggagctgaacaagagcaaggagctgctgaccgtggagaaccagaagatggaggagttcagaaaggagatcgagaccctgaagcaggccgccgcccagaagagccagcagctgagcgccctgcaggaggagaacgtgaagctggccgaggagctgggcagaagcagagacgaggtgaccagccaccagaagctggaggaggagagaagcgtgctgaacaaccagctgctggagatgaagaagagagagagcaagttcatcaaggacgccgacgaggagaaggccagcctgcagaagagcatcagcatcaccagcgccctgctgaccgagaaggacgccgagctggagaagctgagaaacgaggtgaccgtgctgagaggcgagaacgccagcgccaagagcctgcacagcgtggtgcagaccctggagagcgacaaggtgaagctggagctgaaggtgaagaacctggagctgcagctgaaggagaacaagagacagctgagcagcagcagcggcaacaccgacacccaggccgacgaggacgagagagcccaggagagccagatcgacttcctgaacagcgtgatcgtggacctgcagagaaagaaccaggacctgaagatgaaggtggagatgatgagcgaggccgccctgaacggcaacggcgacgacctgaacaactacgacagcgacgaccaggagaagcagagcaagaagaagcccagactgttctgcgacatctgcgactgcttcgacctgcacgacaccgaggactgccccacccaggcccagatgagcgaggaccccccccacagcacccaccacggcagcagaggcgaggagagaccctactgcgagatctgcgagatgttcggccactgggccaccaactgcaacgacgacgagaccttctag

SEQ ID NO: 13353 - DNA, 636 bp, synthetic construct
  source 1..636: mol_type = other DNA; note = Synthetic coding sequence
atggccttcgccgacagccacctgtggaagctgctggacagacacgccaacaccatcagactgttcgtgctgctgcccgagcagagccccgtgagctacagcaagagaaccgcctaccagaaggccggcggcgacagcggcaacgtggacgacgactgcgagagagtgaagggccccgtgggcagcctgaagagcgtggaggccatcctggaggagagcaccgagaagctgaagagcctgagcctgcagcagcagcaggacggcgacaacggcgacagcagcaagagcaccgagaccagcgacttcgagaacatcgagagccccctgaacgagagagacagcagcgccagcgtggacaacagagagctggagcagcacatccagaccagcgaccccgagaacttccagagcgaggagagaagcgacagcgacgtgaacaacgacagaagcaccagcagcgtggacagcgacatcctgagcagcagccacagcagcgacaccctgtgcaacgccgacaacgcccagatccccctggccaacggcctggacagccacagcatcaccagcagcagaagaaccaaggccaacagagagaagagaaacatgggctacagcagaagaagactgtggaactag

SEQ ID NO: 13354 - DNA, 2136 bp, synthetic construct
  source 1..2136: mol_type = other DNA; note = Synthetic coding sequence
atgctggccagcctgaaggtgaagaagcaggagctggccaacagcagcgacgccaccctgcccgacagacccctgagcccccccctgaccgccccccccaccatgaagagcagcgagttcttcgagatgctggagaagatgcagggcatcaagctggaggagcagaagcccggcccccagaagaacaaggacgactacatcccctaccccagcatcgacgaggtggtggagaagggcggcccctacccccaggtgatcctgccccagttcggcggctactggatcgaggaccccgagaacgtgggcacccccaccagcctgggcagcagcatctgcgaggaggaggaggaggacaacctgagccccaacaccttcggctacaagctggagtgcaagggcgaggccagagcctacagaagacacttcctgggcaaggaccacctgaacttctactgcaccggcagcagcctgggcaacctgatcctgagcgtgaagtgcgaggaggccgagggcatcgagtacctgagagtgatcctgagaagcaagctgaagaccgtgcacgagagaatccccctggccggcctgagcaagctgcccagcgtgccccagatcgccaaggccttctgcgacgacgccgtgggcctgagattcaaccccgtgctgtaccccaaggccagccagatgatcgtgagctacgacgagcacgaggtgaacaacaccttcaagttcggcgtgatctaccagaaggccagacagaccctggaggaggagctgttcggcaacaacgaggagagccccgccttcaaggagttcctggacctgctgggcgacaccatcaccctgcaggacttcaagggcttcagaggcggcctggacgtgacccacggccagaccggcgtggagagcgtgtacaccaccttcagagacagagagatcatgttccacgtgagcaccaagctgcccttcaccgacggcgacgcccagcagctgcagagaaagagacacatcggcaacgacatcgtggccatcatcttccaggaggagaacacccccttcgtgcccgacatgatcgccagcaacttcctgcacgcctacatcgtggtgcaggtggagacccccggcaccgagacccccagctacaaggtgagcgtgaccgccagagaggacgtgcccaccttcggcccccccctgcccagcccccccgtgttccagaagggccccgagttcagagagttcctgctgaccaagctgaccaacgccgagaacgcctgctgcaagagcgacaagttcgccaagctggaggacagaaccagagccgccctgctggacaacctgcacgacgagctgcacgcccacacccaggccatgctgggcctgggccccgaggaggacaagttcgagaacggcggccacggcggcttcctggagagcttcaagagagccatcagagtgagaagccacagcatggagaccatggtgggcggccagaagaagagccacagcggcggcatccccggcagcctgagcggcggcatcagccacaacagcatggaggtgaccaagaccaccttcagcccccccgtggtggccgccaccgtgaagaaccagagcagaagccccatcaagagaagaagcggcctgttccccagactgcacaccggcagcgagggccagggcgacagcagagccagatgcgacagcaccagcagcacccccaagacccccgacggcggccacagcagccaggagatcaagagcgagaccagcagcaaccccagcagccccgagatctgccccaacaaggagaagcccttcatgaagctgaaggagaacggcagagccatcagcagaagcagcagcagcaccagcagcgtgagcagcaccgccggcgagggcgaggccatggaggagggcgacagcggcggcagccagcccagcaccaccagccccttcaagcaggaggtgttcgtgtacagccccagccccagcagcgagagccccagcctgggcgccgccgccacccccatcatcatgagcagaagccccaccgacgccaagagcagaaacagccccagaagcaacctgaagttcagattcgacaagctgagccacgccagcagcggcgccggccactag

SEQ ID NO: 13355 - DNA, 1089 bp, synthetic construct
  source 1..1089: mol_type = other DNA; note = Synthetic coding sequence
atggacggcctggacgacgtggagaacagcatgctgtactacaaccaggccgtgatcctgtaccacctgagacagtacaccgaggccatcagcgtgggcgagaagctgtaccagttcatcgagcccttcgaggagaagttcgcccaggccgtgtgcttcctgctggtggacctgtacatcctgacctaccaggccgagaaggccctgcacctgctggccgtgctggagaagatgatcagccagggcaacaacaacaagaacggcaagaacgagaccggcaacaacaacaacaaggacggcagcaaccacaaggccgagagcggcgccctgatcgaggccgccaagagcaagatccaccagtacaaggtgagagcctacatccagatgaagagcctgaaggcctgcaagagagagatcaagagcgtgatgaacaccgccggcaacagcgcccccagcctgttcctgaagagcaacttcgagtacctgagaggcaactacagaaaggccgtgaagctgctgaacagcagcaacatcgccgagcaccccggcttcatgaagaccggcgagtgcctgagatgcatgttctggaacaacctgggctgcatccacttcgccatgagcaagcacaacctgggcatcttctacttcaagaaggccctgcaggagaacgacaacgtgtgcgcccagctgagcgccggcagcaccgaccccggcaagaagttcagcggcagacccatgtgcaccctgctgaccaacaagagatacgagctgctgtacaactgcggcatccagctgctgcacatcggcagacccctggccgccttcgagtgcctgatcgaggccgtgcaggtgtaccacgccaaccccagactgtggctgagactggccgagtgctgcatcgccgccaacaagggcaccagcgagcaggagaccaagggcctgcccagcaagaagggcatcgtgcagagcatcgtgggccagggctaccacagaaagatcgtgctggccagccagagcatccagaacaccgtgtacaacgacggccagagcagcgccatccccgtggccaaggccggcaagtggggctag

SEQ ID NO: 13356 - DNA, 1821 bp, synthetic construct
  source 1..1821: mol_type = other DNA; note = Synthetic coding sequence
atgtgcggcgccggcttcggccacttcgagtggctggccggcggcggcgccggccaggacgtgggcagaagctgcatcctggtgagcatcgccggcaagaacgtgatgctggactgcggcatgcacatgggcttcaacgacgacagaagattccccgacttcagctacatcacccagaacggcagactgaccgacttcctggactgcgtgatcatcagccacttccacctggaccactgcggcgccctgccctacttcagcgagatggtgggctacgacggccccatctacatgacccaccccacccaggccatctgccccatcctgctggaggactacagaaagatcgccgtggacaagaagggcgaggccaacttcttcaccagccagatgatcaaggactgcatgaagaaggtggtggccgtgcacctgcaccagaccgtgcaggtggacgacgagctggagatcaaggcctactacgccggccacgtgctgggcgccgccatgttccagatcaaggtgggcagcgagagcgtggtgtacaccggcgactacaacatgacccccgacagacacctgggcgccgcctggatcgacaagtgcagacccaacctgctgatcaccgagagcacctacgccaccaccatcagagacagcaagagatgcagagagagagacttcctgaagaaggtgcacgagaccgtggagagaggcggcaaggtgctgatccccgtgttcgccctgggcagagcccaggagctgtgcatcctgctggagaccttctgggagagaatgaacctgaaggtgcccatctacttcagcaccggcctgaccgagaaggccaaccactactacaagctgttcatcccctggaccaaccagaagatcagaaagaccttcgtgcagagaaacatgttcgagttcaagcacatcaaggccttcgacagagccttcgccgacaaccccggccccatggtggtgttcgccacccccggcatgctgcacgccggccagagcctgcagatcttcagaaagtgggccggcaacgagaagaacatggtgatcatgcccggctactgcgtgcagggcaccgtgggccacaagatcctgagcggccagagaaagctggagatggagggcagacaggtgctggaggtgaagatgcaggtggagtacatgagcttcagcgcccacgccgacgccaagggcatcatgcagctggtgggccaggccgagcccgagagcgtgctgctggtgcacggcgaggccaagaagatggagttcctgaagcagaagatcgagcaggagctgagagtgaactgctacatgcccgccaacggcgagaccgtgaccctgcccaccagccccagcatccccgtgggcatcagcctgggcctgctgaagagagagatggcccagggcctgctgcccgaggccaagaagcccagactgctgcacggcaccctgatcatgaaggacagcaacttcagactggtgagcagcgagcaggccctgaaggagctgggcctggccgagcaccagctgagattcacctgcagagtgcacctgcacgacaccagaaaggagcaggagaccgccctgagagtgtacagccacctgaagagcgtgctgaaggaccactgcgtgcagcacctgcccgacggcagcgtgaccgtggagagcgtgctgctgcaggccgccgcccccagcgaggaccccggcaccaaggtgctgctggtgagctggacctaccaggacgaggagctgggcagcttcctgaccagcctgctgaagaagggcctgccccaggcccccagctag

SEQ ID NO: 13357 - DNA, 399 bp, synthetic construct
  source 1..399: mol_type = other DNA; note = Synthetic coding sequence
atgaagaaggtgagactgaaggagctggagagcagactgcagcaggtggacggcttcgagaagcccaagctgctgctggagcagtaccccaccagaccccacatcgccgcctgcatgctgtacaccatccacaacacctacgacgacatcgagaacaaggtggtggccgacctgggctgcggctgcggcgtgctgagcatcggcaccgccatgctgggcgccggcctgtgcgtgggcttcgacatcgacgaggacgccctggagatcttcaacagaaacgccgaggagttcgagctgcagatcctgacctggttcaacgtgatgtgcgcctactacctgaccgagtgccccagccacagcatccagaactacgagagcagcctgtgggaccagaagtag

SEQ ID NO: 13358 - DNA, 1371 bp, synthetic construct
  source 1..1371: mol_type = other DNA; note = Synthetic coding sequence
atgatggtgggcgacggcaccaccagcgtgaccctgctggccgccgagttcctgaagcaggtgaagccctacgtggaggagggcctgcacccccagatcatcatcagagccttcagaaccgccacccagctggccgtgaacaagatcaaggagatcgccgtgaccgtgaagaaggccgacaaggtggagcagagaaagctgctggagaagtgcgccatgaccgccctgagcagcaagctgatcagccagcagaaggccttcttcgccaagatggtggtggacgccgtgatgatgctggacgacctgctgcagctgaagatgatcggcatcaagaaggtgcagggcggcgccctggaggacagccagctggtggccggcgtggccttcaagaagaccttcagctacgccggcttcgagatgcagcccaagaagtaccacaaccccaagatcgccctgctgaacgtggagctggagctgaaggccgagaaggacaacgccgagatcagagtgcacaccgtggaggactaccaggccatcgtggacgccgagtggaacatcctgtacgacaagctggagaagatccaccacagcggcgccaaggtggtgctgagcaagctgcccatcggcgacgtggccacccagtacttcgccgacagagacatgttctgcgccggcagagtgcccgaggaggacctgaagagaaccatgatggcctgcggcggcagcatccagaccagcgtgaacgccctgagcgccgacgtgctgggcagatgccaggtgttcgaggagacccagatcggcggcgagagatacaacttcttcaccggctgccccaaggccaagacctgcaccttcatcctgagaggcggcgccgagcagttcatggaggagaccgagagaagcctgcacgacgccatcatgatcgtgagaagagccatcaagaacgacagcgtggtggccggcggcggcgccatcgagatggagctgagcaagtacctgagagactacagcagaaccatccccggcaagcagcagctgctgatcggcgcctacgccaaggccctggagatcatccccagacagctgtgcgacaacgccggcttcgacgccaccaacatcctgaacaagctgagagccagacacgcccagggcggcacctggtacggcgtggacatcaacaacgaggacatcgccgacaacttcgaggccttcgtgtgggagcccgccatggtgagaatcaacgccctgaccgccgccagcgaggccgcctgcctgatcgtgagcgtggacgagaccatcaagaaccccagaagcaccgtggacgcccccaccgccgccggcagaggcagaggcagaggcagaccccactag

SEQ ID NO: 13359 - DNA, 2520 bp, synthetic construct
  source 1..2520: mol_type = other DNA; note = Synthetic coding sequence
atggacggcaaggccgacgtgaagagcctgatggccaagtacaacaccggcggcaaccccaccgaggacgtgagcgtgaacagcagacccttcagagtgaccggccccaacagcagcagcggcatccaggccagaaagaacctgttcaacaaccagggcaacgccagcccccccgccggccccagcaacgtgcccaagttcggcagccccaagccccccgtggccgtgaagcccagcagcgaggagaagcccgacaaggagcccaagccccccttcctgaagcccaccggcgccggccagagattcggcacccccgccagcctgaccaccagagaccccgaggccaaggtgggcttcctgaagcccgtgggccccaagcccatcaacctgcccaaggaggacagcaagcccaccttcccctggccccccggcaacaagcccagcctgcacagcgtgaaccaggaccacgacctgaagcccctgggccccaagagcggccccaccccccccaccagcgagaacgagcagaagcaggccttccccaagctgaccggcgtgaagggcaagttcatgagcgccagccaggacctggagcccaagcccctgttccccaagcccgccttcggccagaagccccccctgagcaccgagaacagccacgaggacgagagccccatgaagaacgtgagcagcagcaagggcagccccgcccccctgggcgtgagaagcaagagcggccccctgaagcccgccagagaggacagcgagaacaaggaccacgccggcgagatcagcagcctgcccttccccggcgtggtgctgaagcccgccgccagcagaggcggccccggcctgagcaagaacggcgaggagaagaaggaggacagaaagatcgacgccgccaagaacaccttccagagcaagatcaaccaggaggagctggccagcggcaccccccccgccagattccccaaggcccccagcaagctgaccgtgggcggcccctggggccagagccaggagaaggagaagggcgacaagaacagcgccacccccaagcagaagcccctgccccccctgttcaccctgggcccccccccccccaagcccaacagaccccccaacgtggacctgaccaagttccacaagaccagcagcggcaacagcaccagcaagggccagaccagctacagcaccaccagcctgcccccccccccccccagccaccccgccagccagccccccctgcccgccagccaccccagccagccccccgtgcccagcctgccccccagaaacatcaagccccccttcgacctgaagagccccgtgaacgaggacaaccaggacggcgtgacccacagcgacggcgccggcaacctggacgaggagcaggacagcgagggcgagacctacgaggacatcgaggccagcaaggagagagagaagaagagagagaaggaggagaagaagagactggagctggagaagaaggagcagaaggagaaggagaagaaggagcaggagatcaagaagaagttcaagctgaccggccccatccaggtgatccacctggccaaggcctgctgcgacgtgaagggcggcaagaacgagctgagcttcaagcagggcgagcagatcgagatcatcagaatcaccgacaaccccgagggcaagtggctgggcagaaccgccagaggcagctacggctacatcaagaccaccgccgtggagatcgactacgacagcctgaagctgaagaaggacagcctgggcgcccccagcagacccatcgaggacgaccaggaggtgtacgacgacgtggccgagcaggacgacatcagcagccacagccagagcggcagcggcggcatcttcccccccccccccgacgacgacatctacgacggcatcgaggaggaggacgccgacgacggcagcaccctgcaggtgcaggagaagagcaacacctggagctggggcatcctgaagatgctgaagggcaaggacgacagaaagaagagcatcagagagaagcccaaggtgagcgacagcgacaacaacgagggcagcagcttccccgccccccccaagcagctggacatgggcgacgaggtgtacgacgacgtggacaccagcgacttccccgtgagcagcgccgagatgagccagggcaccaacgtgggcaaggccaagaccgaggagaaggacctgaagaagctgaagaagcaggagaaggaggagaaggacttcagaaagaagttcaagtacgacggcgagatcagagtgctgtacagcaccaaggtgaccaccagcatcaccagcaagaagtggggcaccagagacctgcaggtgaagcccggcgagagcctggaggtgatccagaccaccgacgacaccaaggtgctgtgcagaaacgaggagggcaagtacggctacgtgctgagaagctacctggccgacaacgacggcgagatctacgacgacatcgccgacggctgcatctacgacaacgactag

SEQ ID NO: 13360 - DNA, 1017 bp, synthetic construct
  source 1..1017: mol_type = other DNA; note = Synthetic coding sequence
atgggccacagatacatcgaggtgttcaagagccacagaaccgagatggactgggtgctgaagcacagcggccccaacagcgccgacagcgccaacgacggcttcgtgagactgagaggcctgcccttcggctgcaccaaggaggagatcgtgcagttcttcagcggcctggagatcgtgcccaacggcatcaccctgcccgtggaccccgagggcaagatcaccggcgaggccttcgtgcagttcgccagccaggagctggccgagaaggccctgggcaagcacaaggagagaatcggccacagatacatcgaggtgttcaagagcagccaggaggaggtgagaagctacagcgacccccccctgaagttcatgagcgtgcagagacccggcccctacgacagacccggcaccgccagaagatacatcggcatcgtgaagcaggccggcctggagagaatgagacccggcgcctacagcaccggctacggcggctacgaggagtacagcggcctgagcgacggctacggcttcaccaccgacctgttcggcagagacctgagctactgcctgagcggcatgtacgaccacagatacggcgacagcgagttcaccgtgcagagcaccaccggccactgcgtgcacatgagaggcctgccctacaaggccaccgagaacgacatctacaacttcttcagccccctgaaccccgtgagagtgcacatcgagatcggccccgacggcagagtgaccggcgaggccgacgtggagttcgccacccacgaggaggccgtggccgccatgagcaaggacagagccaacatgcagcacagatacatcgagctgttcctgaacagcaccaccggcgccagcaacggcgcctacagcagccaggtgatgcagggcatgggcgtgagcgccgcccaggccacctacagcggcctggagagccagagcgtgagcggctgctacggcgccggctacagcggccagaacagcatgggcggctacgactag

SEQ ID NO: 13361 - DNA, 1536 bp, synthetic construct
  source 1..1536: mol_type = other DNA; note = Synthetic coding sequence
atggccagcgtggtggagtacaagggcctgagagccggctaccactgcggctactgcgacagcaaggagggcaaggccagctgcggcatgtgggcccacagcatgaccgtgcaggactaccaggacctgatcgacagaggctggagaagaagcggcaagtacgtgtacaagcccgtgatgaaccagacctgctgcccccagtacaccatcagatgcagacccctgcagttccagcccagcaagagccacaagaaggtgctgaagaagatgctgaagttcctggccaagggcgaggtgcccaagggcagctgcgaggacgagcccatggacagcaccatggacgacgccgtggccggcgacttcgccctgatcaacaagctggacatccagtgcgacctgaagaccctgagcgacgacatcaaggagagcctggagagcgagggcaagaacagcaagaaggaggagccccaggagctgctgcagagccaggacttcgtgggcgagaagctgggcagcggcgagcccagccacagcgtgaaggtgcacaccgtgcccaagcccggcaagggcgccgacctgagcaagcccccctgcagaaaggccaaggagatcagaaaggagagaaagagactgaagctgatgcagcagaaccccgccggcgagctggagggcttccaggcccagggccacccccccagcctgttcccccccaaggccaagagcaaccagcccaagagcctggaggacctgatcttcgagagcctgcccgagaacgccagccacaagctggaggtgagactggtgcccgtgagcttcgaggaccccgagttcaagagcagcttcagccagagcttcagcctgtacgtgaagtaccaggtggccatccaccaggacccccccgacgagtgcggcaagaccgagttcaccagattcctgtgcagcagccccctggaggccgagaccccccccaacggccccgactgcggctacggcagcttccaccagcagtactggctggacggcaagatcatcgccgtgggcgtgatcgacatcctgcccaactgcgtgagcagcgtgtacctgtactacgaccccgactacagcttcctgagcctgggcgtgtacagcgccctgagagagatcgccttcaccagacagctgcacgagaagaccagccagctgagctactactacatgggcttctacatccacagctgccccaagatgaagtacaagggccagtacagacccagcgacctgctgtgccccgagacctacgtgtgggtgcccatcgagcagtgcctgcccagcctggagaacagcaagtactgcagattcaaccaggaccccgaggccgtggacgaggacagaagcaccgagcccgacagactgcaggtgttccacaagagagccatcatgccctacggcgtgtacaagaagcagcagaaggaccccagcgaggaggccgccgtgctgcagtacgccagcctggtgggccagaagtgcagcgagagaatgctgctgttcagaaactag

SEQ ID NO: 13362 - DNA, 3963 bp, synthetic construct
  source 1..3963: mol_type = other DNA; note = Synthetic coding sequence
atgcaggacgacagcatcgaggccagcaccagcatcagccagctgctgagagagagctacctggccgagaccagacacagaggcaacaacgagagaagcagagccgagcccagcagcaacccctgccacttcggcagccccagcggcgccgccgagggcggcggcggccaggacgacctgcccgacctgagcgccttcctgagccaggaggagctggacgagagcgtgaacctggccagactggccatcaactacgaccccctggagaaggccgacgagacccaggccagaaagagactgagccccgaccagatgaagcacagccccaacctgagcttcgagcccaacttctgccaggacaaccccagaagccccaccagcagcaaggagagcccccaggaggccaagagaccccagtactgcagcgagacccagagcaagaaggtgttcctgaacaaggccgccgacttcatcgaggagctgagcagcctgttcaagagccacagcagcaagagaatcagacccagagcctgcaagaaccacaagagcaagctggagagccagaacaaggtgatgcaggagaacagcagcagcttcagcgacctgagcgagagaagagagagaagcagcgtgcccatccccatccccgccgacaccagagacaacgaggtgaaccacgccctggagcagcaggaggccaagagaagagaggccgagcaggccgccagcgaggccgccggcggcgacaccacccccggcagcagccccagcagcctgtactacgaggagcccctgggccagccccccagattcacccagaagctgagaagcagagaggtgcccgagggcaccagagtgcagctggactgcatcgtggtgggcatcccccccccccaggtgagatggtactgcgagggcaaggagctggagaacagccccgacatccacatcgtgcaggccggcaacctgcacagcctgaccatcgccgaggccttcgaggaggacaccggcagatacagctgcttcgccagcaacatctacggcaccgacagcaccagcgccgagatctacatcgagggcgtgagcagcagcgacagcgagggcgaccccaacaaggaggagatgaacagaatccagaagcccaacgaggtgagcagcccccccaccaccagcgccgtgatcccccccgccgtgccccaggcccagcacctggtggcccagcccagagtggccaccatccagcagtgccagagccccaccaactacctgcagggcctggacggcaagcccatcatcgccgcccccgtgttcaccaagatgctgcagaacctgagcgccagcgagggccagctggtggtgttcgagtgcagagtgaagggcgcccccagccccaaggtggagtggtacagagagggcaccctgatcgaggacagccccgacttcagaatcctgcagaagagacccgtgtgcatggagcacatcgaggagatctgcaccctggtgatcgccgaggtgttcgccgaggacagcggctgcttcacctgcaccgccagcaacaagtacggcaccgtgagcagcatcgcccagctgcacgtgagaggcaacgaggacctgagcaacaacggcagcctgcacagcgccaacagcaccaccaacctggccgccatcgagccccagcccagccccccccacagcgagccccccagcgtggagcagccccccaagcccaagctggagggcgtgctggtgaaccacaacgagcccagaagcagcagcagaatcggcctgagagtgcacttcaacctgcccgaggacgacaagggcagcgaggccagcagcgaggccggcgtggtgaccaccagacagaccagacccgacagcttccaggagagattcaacggccaggccaccaagacccccgagcccagcagccccgtgaaggagcccccccccgtgctggccaagcccaagctggacagcacccagctgcagcagctgcacaaccaggtgctgctggagcagcaccagctgcagaaccccccccccagcagccccaaggagttccccttcagcatgaccgtgctgaacagcaacgccccccccgccgtgaccaccagcagcaagcaggtgaaggcccccagcagccagaccttcagcctggccagacccaagtacttcttccccagcaccaacaccaccgccgccaccgtggcccccagcagcagccccgtgttcaccctgagcagcaccccccagaccatccagagaaccgtgagcaaggagagcctgctggtgagccaccccagcgtgcagaccaagagccccggcggcctgagcatccagaacgagcccctgccccccggccccaccgagcccacccccccccccttcaccttcagcatccccagcggcaaccagttccagcccagatgcgtgagccccatccccgtgagccccaccagcagaatccagaaccccgtggccttcctgagcagcgtgctgcccagcctgcccgccatcccccccaccaacgccatgggcctgcccagaagcgcccccagcatgcccagccagggcctggccaagaagaacaccaagagcccccagcccgtgaacgacgacaacatcagagagaccaagaacgccgtgatcagagacctgggcaagaagatcaccttcagcgacgtgagacccaaccagcaggagtacaagatcagcagcttcgagcagagactgatgaacgagatcgagttcagactggagagaacccccgtggacgagagcgacgacgagatccagcacgacgagatccccaccggcaagtgcatcgcccccatcttcgacaagagactgaagcacttcagagtgaccgagggcagccccgtgaccttcacctgcaagatcgtgggcatccccgtgcccaaggtgtactggttcaaggacggcaagcagatcagcaagagaaacgagcactgcaagatgagaagagagggcgacggcacctgcagcctgcacatcgagagcaccaccagcgacgacgacggcaactacaccatcatggccgccaacccccagggcagaatcagctgcagcggccacctgatggtgcagagcctgcccatcagaagcagactgaccagcgccggccagagccacagaggcagaagcagagtgcaggagagagacaaggagcccctgcaggagagattcttcagaccccacttcctgcaggcccccggcgacatggtggcccacgagggcagactgtgcagactggactgcaaggtgagcggcctgcccccccccgagctgacctggctgctgaacggccagcccgtgctgcccgacgccagccacaagatgctggtgagagagaccggcgtgcacagcctgctgatcgaccccctgacccagagagacgccggcacctacaagtgcatcgccaccaacaagaccggccagaacagcttcagcctggagctgagcgtggtggccaaggaggtgaagaaggcccccgtgatcctggagaagctgcagaactgcggcgtgcccgagggccaccccgtgagactggagtgcagagtgatcggcatgcccccccccgtgttctactggaagaaggacaacgagaccatcccctgcaccagagagagaatcagcatgcaccaggacaccaccggctacgcctgcctgctgatccagcccgccaagaagagcgacgccggctggtacaccctgagcgccaagaacgaggccggcatcgtgagctgcaccgccagactggacatctacgcccagtggcaccaccagatccccccccccatgagcgtgagacccagcggcagcagatacggcagcctgaccagcaagggcctggacatcttcagcgccttcagcagcatggagagcaccatggtgtacagctgcagcagcagaagcgtggtggagagcgacgagctgtag

SEQ ID NO: 13363 - DNA, 2292 bp, synthetic construct
  source 1..2292: mol_type = other DNA; note = Synthetic coding sequence
atgcaggacctgggcgacaagctgagaatgatcgtgatgggccacagaagagtgcacatcagcagacagctggaggtggagcccgaggagcccgaggccgagaacaagcacaagcccagaagaaagagcaagagaggcaagaaggaggccgaggacgagctgagcgccagacaccccgccgagctggccatggagcccacccccgagctgcccgccgaggtgctgatggtggaggtggagaacgtggtgcacgaggacttccaggtgaccgaggaggtgaaggccctgaccgccgagatcgtgaagaccatcagagacatcatcgccctgaaccccctgtacagagagagcgtgctgcagatgatgcaggccggccagagagtggtggacaaccccatctacctgagcgacatgggcgccgccctgaccggcgccgagagccacgagctgcaggacgtgctggaggagaccaacatccccaagagactgtacaaggccctgagcctgctgaagaaggagttcgagctgagcaagctgcagcagagactgggcagagaggtggaggagaagatcaagcagacccacagaaagtacctgctgcaggagcagctgaagatcatcaagaaggagctgggcctggagaaggacgacaaggacgccatcgaggagaagttcagagagagactgaaggagctggtggtgcccaagcacgtgatggacgtggtggacgaggagctgagcaagctgggcctgctggacaaccacagcagcgagttcaacgtgaccagaaactacctggactggctgaccagcatcccctggggcaagtacagcaacgagaacctggacctggccagagcccaggccgtgctggaggaggaccactacggcatggaggacgtgaagaagagaatcctggagttcatcgccgtgagccagctgagaggcagcacccagggcaagatcctgtgcttctacggcccccccggcgtgggcaagaccagcatcgccagaagcatcgccagagccctgaacagagagtacttcagattcagcgtgggcggcatgaccgacgtggccgagatcaagggccacagaagaacctacgtgggcgccatgcccggcaagatcatccagtgcctgaagaagaccaagaccgagaaccccctgatcctgatcgacgaggtggacaagatcggcagaggctaccagggcgaccccagcagcgccctgctggagctgctggaccccgagcagaacgccaacttcctggaccactacctggacgtgcccgtggacctgagcaaggtgctgttcatctgcaccgccaacgtgaccgacaccatccccgagcccctgagagacagaatggagatgatcaacgtgagcggctacgtggcccaggagaagctggccatcgccgagagatacctggtgccccaggccagagccctgtgcggcctggacgagagcaaggccaagctgagcagcgacgtgctgaccctgctgatcaagcagtactgcagagagagcggcgtgagaaacctgcagaagcaggtggagaaggtgctgagaaagagcgcctacaagatcgtgagcggcgaggccgagagcgtggaggtgacccccgagaacctgcaggacttcgtgggcaagcccgtgttcaccgtggagagaatgtacgacgtgaccccccccggcgtggtgatgggcctggcctggaccgccatgggcggcagcaccctgttcgtggagaccagcctgagaagaccccaggacaaggacgccaagggcgacaaggacggcagcctggaggtgaccggccagctgggcgaggtgatgaaggagagcgccagaatcgcctacaccttcgccagagccttcctgatgcagcacgcccccgccaacgactacctggtgaccagccacatccacctgcacgtgcccgagggcgccacccccaaggacggccccagcgccggctgcaccatcgtgaccgccctgctgagcctggccatgggcagacccgtgagacagaacctggccatgaccggcgaggtgagcctgaccggcaagatcctgcccgtgggcggcatcaaggagaagaccatcgccgccaagagagccggcgtgacctgcatcgtgctgcccgccgagaacaagaaggacttctacgacctggccgccttcatcaccgagggcctggaggtgcacttcgtggagcactacagagagatcttcgacatcgccttccccgacgagcaggccgaggccctggccgtggagagatag

SEQ ID NO: 13364 - DNA, 558 bp, synthetic construct
  source 1..558: mol_type = other DNA; note = Synthetic coding sequence
atgaacaacaaccagatcgtggccaaggacctgcaggacgagaagatcctgtaccccgagttcaacaagctgaaggagagaaacagagagctgaagaccctgctgagcatcggcggctggaacttcggcaccagcagattcaccaccatgctgagcaccttcgccaacagagagaagttcatcgccagcgtgatcagcctgctgagaacccacgacttcgacggcctggacctgttcttcctgtaccccggcctgagaggcagccccatgcacgacagatggaccttcctgttcctgatcgaggagctgctgttcgccttcagaaaggaggccctgctgaccatgagacccagactgctgctgagcgccgccgtgagcggcgtgccccacatcgtgcagaccagctacgacgtgagattcctgggcagattcgtgcccctgagcggcgagagaagaagcaccggcctgatcaccagcatgagcagaatgcccaccagaggcaagagcggcctggccatgaccatgcccagcgccagcgtgaccagacacggcctgtag

SEQ ID NO: 13365 - DNA, 1269 bp, synthetic construct
  source 1..1269: mol_type = other DNA; note = Synthetic coding sequence
atgagcggcggcaccccctacatcggcagcaagatcagcctgatcagcaaggccgagatcagatacgagggcatcctgtacaccatcgacaccgagaacagcaccgtggccctggccaaggtgagaagcttcggcaccgaggacagacccaccgacagacccatcccccccagagacgaggtgttcgagtacatcatcttcagaggcagcgacatcaaggacctgaccgtgtgcgagccccccaagccccagtgcagcctgccccaggaccccgccatcgtgcagagcagcctgggcagcagcaccagcagcttccagagcatgggcagctacggccccttcggcagaatgcccacctacagccagttcagccccagcagcctggtgggccagcagttcggcgccgtgggcgtgggcagaagcagcccccagctggaccccctgagaaagagccccaccatggagcaggccgtgcagaccgccagcgcccacctgcccgcccccgccgccgtgggcagaagaagccccgtgagcaccagacccctgcccagcgccagccagaaggccggcgagaaccaggagcacagaagagccgaggtgcacaaggtgagcagacccgagaacgagcagctgagaaacgacaacaagagacaggtggcccccggcgcccccagcgcccccagaagaggcagaggcggccacagaggcggcagaggcagattcggcatcagaagagacggccccatgaagttcgagaaggacttcgacttcgagagcgccaacgcccagttcaacaaggaggagatcgacagagagttccacaacaagctgaagctgaaggaggacaagctggagaagcaggagaagcccgtgaacggcgaggacaagggcgacagcggcgtggacacccagaacagcgagggcaacgccgacgaggaggaccccctgggccccaactgctactacgacaagaccaagagcttcttcgacaacatcagctgcgacgacaacagagagagaagacccacctgggccgaggagagaagactgaacgccgagaccttcggcatccccctgagacccaacagaggcagaggcggctacagaggcagaggcggcctgggcttcagaggcggcagaggcagaggcggcggcagaggcggcaccttcaccgcccccagaggcttcagaggcggcttcagaggcggcagaggcggcagagagttcgccgacttcgagtacagaaagaccaccgccttcggcccctag

SEQ ID NO: 13366 - DNA, 1266 bp, synthetic construct; identical to SEQ ID NO: 10383
  source 1..1266: mol_type = other DNA; note = Synthetic coding sequence

SEQ ID NO: 13367 - DNA, 756 bp, synthetic construct
  source 1..756: mol_type = other DNA; note = Synthetic coding sequence
atggacagcgagctgatgcacagcatcgtgggcagctaccacaagccccccgagagagtgttcgtgcccagcttcacccagaacgagcccagccagaactgccaccccgccaacctggaggtgaccagccccaagatcctgcacagccccaacagccaggccctgatcctggccctgaagaccctgcaggagaagatccacagactggagctggagagaacccaggccgaggacaacctgaacatcctgagcagagaggccgcccagtacaagaaggccctggagaacgagaccaacgagagaaacctggcccaccaggagctgatcaagcagaagaaggacatcagcatccagctgagcagcgcccagagcagatgcaccctgctggagaagcagctggagtacaccaagagaatggtgctgaacgtggagagagagaagaacatgatcctggagcagcaggcccagctgcagagagagaaggagcaggaccagatgaagctgtacgccaagctggagaagctggacgtgctggagaaggagtgcttcagactgaccaccacccagaagaccgccgaggacaagatcaagcacctggaggagaagctgaaggaggaggagcaccagagaaagctgttccaggacaaggccagcgagctgcagaccggcctggagatcagcaagatcatcatgagcagcgtgagcaacctgaagcacagcaaggagaagaagaagagcagcaaggtgtgcatctag

SEQ ID NO: 13368 - DNA, 1980 bp, synthetic construct
  source 1..1980: mol_type = other DNA; note = Synthetic coding sequence
atggacagccagggcagagtgtgggcccaggagatgctgctgagagtgagccccgaccacgtgaccctgctggaccccgccagcaaggaggagctggagagctaccccctgggcgccatcgtgagatgcgacgccgtgatgccccccggcagaagcagaagcctgctgctgctggtgtgccaggagcccgagagagcccagcccgacgtgcacttcttccagggcctgagactgggcgccgagctgatcagagaggacatccagggcgccctgcacaactacagaagcggcagaggcgagagaagagccgccgccctgagagccacccaggaggagctgcagagagacagaagccccgccgccgagaccccccccctgcagagaagacccagcgtgagagccgtgatcagcaccgtggagagaggcgccggcagaggcagaccccaggccaagcccatccccgaggccgaggaggcccagagacccgagcccgtgggcaccagcagcaacgccgacagcgccagccccgacctgggccccagaggccccgacctggccgtgctgcaggccgagagagaggtggacatcctgaaccacgtgttcgacgacgtggagagcttcgtgagcagactgcagaagagcgccgaggccgccagagtgctggagcacagagagagaggcagaagaagcagaagaagagccgccggcgagggcctgctgaccctgagagccaagccccccagcgaggccgagtacaccgacgtgctgcagaagatcaagtacgccttcagcctgctggccagactgagaggcaacatcgccgaccccagcagccccgagctgctgcacttcctgttcggccccctgcagatgatcgtgaacaccagcggcggccccgagttcgccagcagcgtgagaagaccccacctgaccagcgacgccgtggccctgctgagagacaacgtgacccccagagagaacgagctgtggaccagcctgggcgacagctggaccagacccggcctggagctgagccccgaggagggccccccctacagacccgagttcttcagcggctgggagccccccgtgaccgacccccagagcagagcctgggaggaccccgtggagaagcagctgcagcacgagagaagaagaagacagcagagcgccccccaggtggccgtgaacggccacagagacctggagcccgagagcgagccccagctggagagcgagaccgccggcaagtgggtgctgtgcaactacgacttccaggccagaaacagcagcgagctgagcgtgaagcagagagacgtgctggaggtgctggacgacagcagaaagtggtggaaggtgagagaccccgccggccaggagggctacgtgccctacaacatcctgaccccctaccccggccccagactgcaccacagccagagccccgccagaagcctgaacagcacccccccccccccccccgcccccgcccccgcccccccccccgccctggccagacccagatgggacagacccagatgggacagctgcgacagcctgaacggcctggaccccagcgagaaggagaagttcagccagatgctgatcgtgaacgaggagctgcaggccagactggcccagggcagaagcggccccagcagagccgtgcccggccccagagcccccgagccccagctgagccccggcagcgacgccagcgaggtgagagcctggctgcaggccaagggcttcagcagcggcaccgtggacgccctgggcgtgctgaccggcgcccagctgttcagcctgcagaaggaggagctgagagccgtgagccccgaggagggcgccagagtgtacagccaggtgaccgtgcagagaagcctgctggaggacaaggagaaggtgagcgagctggaggccgtgatggagaagcagaagaagaaggtggagggcgaggtggagatggaggtgatctag

SEQ ID NO: 13369 - DNA, 3702 bp, synthetic construct
  source 1..3702: mol_type = other DNA; note = Synthetic coding sequence
atgaacaccaagaagagaggcagccccgccagaacccacagcatgatgagcctgagcgtgagaccccagagaagactgctgagcgccagagtgaacagaagccagagcttcgccggcgtgctgggcagccacgagagaggccccagaagcttccccgtgttcagcccccccggcccccccagaaagccccccgccctgagcagagtgagcagaatgttcagcgtggcccaccccgccgccaaggtgccccagcccgagagactggacctggtgtacaccgccctgaagagaggcctgaccgcctacctggaggtgcaccagcaggagcaggagaagctgcagggccagatcagagagagcaagagaaacagcagactgggcttcctgtacgacctggacaagcaggtgaagagcatcgagagattcctgagaagactggagttccacgccagcaagatcgacgagctgtacgaggcctactgcgtgcagagaagactgagagacggcgcctacaacatggtgagagcctacaccaccggcagccccggcagcagagaggccagagacagcctggccgaggccaccagaggccacagagagtacaccgagagcatgtgcctgctggagagcgagctggaggcccagctgggcgagttccacctgagaatgaagggcctggccggcttcgccagactgtgcgtgggcgaccagtacgagatctgcatgaagtacggcagacagagatggaagctgagaggcagaatcgagggcagcggcaagcaggtgtgggacagcgaggagaccatcttcctgcccctgctgaccgagttcctgagcatcaaggtgaccgagctgaagggcctggccaaccacgtggtggtgggcagcgtgagctgcgagaccaaggacctgttcgccgccctgccccaggtggtggccgtggacatcaacgacctgggcaccatcaagctgagcctggaggtgacctggagccccttcgacaaggacgaccagcccagcgccgccagcagcgtgaacaaggccagcaccgtgaccaagagattcagcacctacagccagagcccccccgacacccccagcctgagagagcaggccttctacaacatgctgagaagacaggaggagctggagaacggcaccgcctggagcctgagcagcgagagcagcgacgacagcagcagcccccagctgagcggcaccgccagacacagccccgcccccagacccctggtgcagcagcccgagcccctgcccatccaggtggccttcagaagacccgagacccccagcagcggccccctggacgaggagggcgccgtggcccccgtgctggccaacggccacgccccctacagcagaaccctgagccacatcagcgaggccagcgtggacgccgccctggccgaggccagcgtggaggccgtgggccccgagagcctggcctggggccccagcccccccacccaccccgcccccacccacggcgagcaccccagccccgtgccccccgccctggaccccggccacagcgccaccagcagcaccctgggcaccaccggcagcgtgcccaccagcaccgaccccgcccccagcgcccacctggacagcgtgcacaagagcaccgacagcggccccagcgagctgcccggccccacccacaccaccaccggcagcacctacagcgccatcaccaccacccacagcgcccccagccccctgacccacaccaccaccggcagcacccacaagcccatcatcagcaccctgaccaccaccggccccaccctgaacatcatcggccccgtgcagaccaccaccagccccacccacaccatgcccagccccacccacaccaccgccagccccacccacaccagcaccagccccacccacacccccaccagccccacccacaagaccagcatgagcccccccaccaccaccagccccacccccagcggcatgggcctggtgcagaccgccaccagccccacccaccccaccaccagccccacccaccccaccaccagccccatcctgatcaacgtgagccccagcaccagcctggagctggccaccctgagcagccccagcaagcacagcgaccccaccctgcccggcaccgacagcctgccctgcagcccccccgtgagcaacagctacacccaggccgaccccatggcccccagaaccccccaccccagccccgcccacagcagcagaaagcccctgaccagccccgcccccgaccccagcgagagcaccgtgcagagcctgagccccacccccagcccccccacccccgccccccagcacagcgacctgtgcctggccatggccgtgcagacccccgtgcccaccgccgccggcggcagcggcgacagaagcctggaggaggccctgggcgccctgatggccgccctggacgactacagaggccagttccccgagctgcagggcctggagcaggaggtgaccagactggagagcctgctgatgcagagacagggcctgaccagaagcagagccagcagcctgagcatcaccgtggagcacgccctggagagcttcagcttcctgaacgaggacgaggacgaggacaacgacgtgcccggcgacagaccccccagcagccccgaggccggcgccgaggacagcatcgacagccccagcgccagacccctgagcaccggctgccccgccctggacgccgccctggtgagacacctgtaccactgcagcagactgctgctgaagctgggcaccttcggccccctgagatgccaggaggcctgggccctggagagactgctgagagaggccagagtgctggaggccgtgtgcgagttcagcagaagatgggagatccccgccagcagcgcccaggaggtggtgcagttcagcgccagcagacccggcttcctgaccttctgggaccagtgcaccgagagactgagctgcttcctgtgccccgtggagagagtgctgctgaccttctgcaaccagtacggcgccagactgagcctgagacagcccggcctggccgaggccgtgtgcgtgaagttcctggaggacgccctgggccagaagctgcccagaagaccccagcccggccccggcgagcagctgaccgtgttccagttctggagcttcgtggagaccctggacagccccaccatggaggcctacgtgaccgagaccgccgaggaggtgctgctggtgagaaacctgaacagcgacgaccaggccgtggtgctgaaggccctgagactggcccccgagggcagactgagaagagacggcctgagagccctgagcagcctgctggtgcacggcaacaacaaggtgatggccgccgtgagcacccagctgagaagcctgagcctgggccccaccttcagagagagagccctgctgtgcttcctggaccagctggaggacgaggacgtgcagaccagagtggccggctgcctggccctgggctgcatcaaggcccccgagggcatcgagcccctggtgtacctgtgccagaccgacaccgaggccgtgagagaggccgccagacagagcctgcagcagtgcggcgaggagggccagagcgcccacagaagactggaggagagcctggacgccctgcccagaatcttcggccccggcagcatggccagcaccgccttctag

SEQ ID NO: 13370 - DNA, 1428 bp, synthetic construct
  source 1..1428: mol_type = other DNA; note = Synthetic coding sequence
atggaccagatggtgcagcaccccgccgccaagatgatcgtgatggccagccacatgcaggagcaggaggtgggcgacggcaccaacttcgtgctggtgttcgccggcgccctgctggagctggccgaggagctgctgagaatcggcctgagcgtgagcgaggtgatcgagggctacgagatcgcctgcagaaaggcccacgagatcctgcccaacctggtgtgctgcagcgccaagaacctgagagacatcgacgaggtgagcagcctgctgagaaccagcatcatgagcaagcagtacggcaacgaggtgttcctggccaagctgatcgcccaggcctgcgtgagcatcttccccgacagcggccacttcaacgtggacaacatcagagtgtgcaagatcctgggcagcggcatcagcagcagcagcgtgctgcacggcatggtgttcaagaaggagaccgagggcgacgtgaccagcgtgaaggacgccaagatcgccgtgtacagctgccccttcgacggcatgatcaccgagaccaagggcaccgtgctgatcaagaccgccgaggagctgatgaacttcagcaagggcgaggagaacctgatggacgcccaggtgaaggccatcgccgacaccggcgccaacgtggtggtgaccggcggcaaggtggccgacatggccctgcactacgccaacaagtacaacatcatgctggtgagactgaacagcaagtgggacctgagaagactgtgcaagaccgtgggcgccaccgccctgcccagactgaccccccccgtgctggaggagatgggccactgcgacagcgtgtacctgagcgaggtgggcgacacccaggtggtggtgttcaagcacgagaaggaggacggcgccatcagcaccatcgtgctgagaggcagcaccgacaacctgatggacgacatcgagagagccgtggacgacggcgtgaacaccttcaaggtgctgaccagagacaagagactggtgcccggcggcggcgccaccgagatcgagctggccaagcagatcaccagctacggcgagacctgccccggcctggagcagtacgccatcaagaagttcgccgaggccttcgaggccatccccagagccctggccgagaacagcggcgtgaaggccaacgaggtgatcagcaagctgtacgccgtgcaccaggagggcaacaagaacgtgggcctggacatcgaggccgaggtgcccgccgtgaaggacatgctggaggccggcatcctggacacctacctgggcaagtactgggccatcaagctggccaccaacgccgccgtgaccgtgctgagagtggaccagatcatcatggccaagcccgccggcggccccaagccccccagcggcaagaaggactgggacgacgaccagaacgactag

SEQ ID NO: 13371 - DNA, 1626 bp, synthetic construct
  source 1..1626: mol_type = other DNA; note = Synthetic coding sequence
atgagagccctgctgcacaagcccgagatgatcaagcagatcctgcccgagcacagcgtgctgcagaacatcaacttcgtggaggccttccaggacgagctgctggtgaccgaggtgtacgacctgccccagagacccaacgacgtgcagctgttctacggcagcatgtgcaagatcatcctgagcgtgatcggcgagttcagagactgcatcagcagcagagagttcctgcagcccagcagcaaggccagcctggagagcaccagcgacctgggcgccagcggcaagcacggcggcaacgtgagcctggacgtgctgcccgtgaagggcccccagggcagccccctgctgagcagagccgccagaccccccctggaccagctggccagcgaggagccctggaccgtgctgcccgagcacctgatcctggtggcccccagcccctgcgacatggccaagaccggcagattccagatcgtgaacaacagcgtgagactgctgagattcgagctgtgctggcccgcccactgcctgaccgtgaccccccagcacggctgcgtggcccccgagagcaagctgcagatcctggtgagccccaacagcagcctgagcaccaagcagagcatgttcccctggagcggcctgatctacatccactgcgacgacggccagaagaagatcgtgaaggtgcagatcagagaggacctgacccaggtggagctgctgaccagactgaccagcaagcccttcggcatcctgagccccgtgagcgagcccagcgtgagccacctggtgaagcccatgaccaagccccccagcaccaaggtggagatcagaaacaagagcatcaccttccccaccaccgagcccggcgagaccagcgagagctgcctggagctggagaaccacggcaccaccgacgtgaagtggcacctgagcagcctggcccccccctacgtgaagggcgtggacgagagcggcgacgtgttcagagccacctacgccgccttcagatgcagccccatcagcggcctgctggagagccacggcatccagaaggtgagcatcaccttcctgcccagaggcagaggcgactacgcccagttctgggacgtggagtgccaccccctgaaggagccccacatgaagcacaccctgagattccagctgagcggccagagcatcgaggccgagaacgagcccgagaacgcctgcctgagcaccgacagcctgatcaagatcgaccacctggtgaagcccagaagacaggccgtgagcgaggccagcgccagaatccccgagcagctggacgtgaccgccagaggcgtgtacgcccccgaggacgtgtacagattcagacccaccagcgtgggcgagagcagaaccctgaaggtgaacctgagaaacaacagcttcatcacccacagcctgaagttcctgagccccagagagcccttctacgtgaagcacagcaagtacagcctgagagcccagcactacatcaacatgcccgtgcagttcaagcccaagagcgccggcaagttcgaggccctgctggtgatccagaccgacgagggcaagagcatcgccatcagactgatcggcgaggccctgggcaagaactag

SEQ ID NO: 13372 - DNA, 1737 bp, synthetic construct
  source 1..1737: mol_type = other DNA; note = Synthetic coding sequence
atgagcagcaagggcagcagcaccgacggcagaaccgacctggccaacggcagcctgagcagcagccccgaggagatgagcggcgccgaggagggcagagagaccagcagcggcatcgaggtggaggccagcgacctgagcctgagcctgaccggcgacgacggcggccccaacagaaccagcatggaggacaccggccactacagcatcaacgacgagaacagagtgcacgacagaagcgaggaggaggaggaggaggaggaggaggaggaggaggagcagcccagaagaagagtgcagagaaagagagccaacagagaccaggacagcagcgacgacgagagagccctggaggactgggtgagcagcgagaccagcgccctgcccagacccagatggcaggccctgcccgccctgagagagagagagctgggcagcagcgccagattcgtgtacgaggcctgcggcgccagagtgttcgtgcagagattcagactgcagcacggcctggagggccacaccggctgcgtgaacaccctgcacttcaaccagagaggcacctggctggccagcggcagcgacgacctgaaggtggtggtgtgggactgggtgagaagacagcccgtgctggacttcgagagcggccacaagagcaacgtgttccaggccaagttcctgcccaacagcggcgacagcaccctggccatgtgcgccagagacggccaggtgagagtggccgagctgagcgccacccagtgctgcaagaacaccaagagagtggcccagcacaagggcgccagccacaagctggccctggagcccgacagcccctgcaccttcctgagcgccggcgaggacgccgtggtgttcaccatcgacctgagacaggacagacccgccagcaagctggtggtgaccaaggagaaggagaagaaggtgggcctgtacaccatctacgtgaaccccgccaacacccaccagttcgccgtgggcggcagagaccagttcgtgagaatctacgaccagagaaagatcgacgagaacgagaacaacggcgtgctgaagaagttctgcccccaccacctggtgaacagcgagagcaaggccaacatcacctgcctggtgtacagccacgacggcaccgagctgctggccagctacaacgacgaggacatctacctgttcaacagcagccacagcgacggcgcccagtacgtgaagagatacaagggccacagaaacaacgccaccgtgaagggcgtgaacttctacggccccaagagcgagttcgtggtgagcggcagcgactgcggccacatcttcctgtgggagaagagcagctgccagatcatccagttcatggagggcgacaagggcggcgtggtgaactgcctggagccccacccccacctgcccgtgctggccaccagcggcctggaccacgacgtgaagatctgggcccccaccgccgaggccagcaccgagctgaccggcctgaaggacgtgatcaagaagaacaagagagagagagacgaggacagcctgcaccagaccgacctgttcgacagccacatgctgtggttcctgatgcaccacctgagacagagaagacaccacagaagatggagagagcccggcgtgggcgccaccgacgccgacagcgacgagagccccagcagcagcgacaccagcgacgaggaggagggccccgacagagtgcagtgcatgcccagctag

SEQ ID NO: 13373 - DNA, 426 bp, synthetic construct
  source 1..426: mol_type = other DNA; note = Synthetic coding sequence
atgggcggcaagcccagacacagcctgtacttcatcggctaccaggacgacttcctgctgtacctggacccccactactgccagcccaccgtggacgtgagccaggccgacttccccctggagagcttccactgcaccagccccagaaagatggccttcgccaagatggaccccagctgcaccgtgggcttctacgccggcgacagaaaggagttcgagaccctgtgcagcgagctgaccagagtgctgagcagcagcagcgccaccgagagataccccatgttcaccctggccgagggccacgcccaggaccacagcctggacgacctgtgcagccagctggcccagcccaccctgagactgcccagaaccggcagactgctgagagccaagagacccagcagcgaggacttcgtgttcctgtag

SEQ ID NO: 13374 - DNA, 570 bp, synthetic construct
  source 1..570: mol_type = other DNA; note = Synthetic coding sequence
atggtgctgctgcacgtgaagagaggcgacgagagccagttcctgctgcaggcccccggcagcaccgagctggaggagctgaccgtgcaggtggccagagtgtacaacggcagactgaaggtgcagagactgtgcagcgcccccaacgagaagatgaagcaggtgctgaagaagaccatcgaggaggccaaggccatcatcagcaagaagcaggtggaggccggcgtgtgcgtgaccatggagatggtgaaggacgccctggaccagctgagaggcgccgtgatgatcgtgtaccccatgggcctgcccccctacgaccccatcagaatggagttcgagaacaaggaggacctgagcggcacccaggccggcctgaacgtgatcaaggaggccgaggcccagctgtggtgggccgccaaggagctgagaagaaccaagaagctgagcgactacgtgggcaagaacgagaagaccaagatcatcgccaagatccagcaggtgagcaccttctgcttcaacgtgagcgtggtgttcgtgatcagcctgcagaccgacaagaacgtgcagtag

SEQ ID NO: 13375 - DNA, 2031 bp, synthetic construct
  source 1..2031: mol_type = other DNA; note = Synthetic coding sequence
atggccgccatccagcacggccacgaggccgtggtgagactgctgatggagtggggcgccgaccccaaccacgccgccagaaccgtgggctggagccccctgatgctggccgccctgaccggcagactgggcgtggcccagcagctggtggagaagggcgccaaccccgaccacctgagcgtgctggagaagaccgccttcgaggtggccctggactgcaagcacagagacctggtggactacctggaccccctgaccaccgtgagacccaagaccgacgaggagaagagaagacccgacatcttccacgccctgaagatgggcaacttccagctggtgaaggagatcgccgacgaggaccccagccacgtgaacctggtgaacggcgacggcgccacccccctgatgctggccgccgtgaccggccagctggccctggtgcagctgctggtggagagacacgccgacgtggacaagcaggacagcgtgcacggctggaccgccctgatgcaggccacctaccacggcaacaaggagatcgtgaagtacctgctgaaccagggcgccgacgtgaccctgagagccaagaacggctacaccgccttcgacctggtgatgctgctgaacgaccccgacaccgagctggtgagactgctggccagcgtgtgcatgcaggtgaacaaggacaagggcagacccagccaccagccccccctgccccacagcaaggtgagacagccctggagcatccccgtgctgcccgacgacaagggcggcctgaagagctggtggaacagaatgagcaacagattcagaaagctgaagctgatgcagaccctgcccagaggcctgagcagcaaccagcccctgcccttcagcgacgagcccgagcccgccctggacagcaccatgagagccgccccccaggacaagaccagcagaagcgccctgcccgacgccgcccccgtgaccaaggacaacggccccggcagcaccagaggcgagaaggaggacaccctgctgaccaccatgctgagaaacggcgcccccctgaccagactgcccagcgacaagctgaaggccgtgatcccccccttcctgccccccagcagcttcgagctgtggagcagcgacagaagcagaaccagacacaacggcaaggccgaccccatgaagaccgccctgccccagagagccagcagaggccaccccgtgggcggcggcggcaccgacaccacccccgtgagacccgtgaagttccccagcctgcccagaagccccgccagcagcgccaacagcggcaacttcaaccacagcccccacagcagcggcggcagcagcggcgtgggcgtgagcagacacggcggcgagctgctgaacagaagcggcggcagcatcgacaacgtgctgagccagatcgccgcccagagaaagaaggccgccggcctgctggagcagaagcccagccacagaagcagccccgtgggccccgcccccggcagcagccccagcgagctgcccgccagccccgccggcggcagcgcccccgtgggcaagaagctggagaccagcaagagaccccccagcggcaccagcaccaccagcaagagcaccagccccaccctgacccccagccccagccccaagggccacaccgccgagagcagcgtgagcagcagcagcagccacagacagagcaagagcagcggcggcagcagcagcggcaccatcaccgacgaggacgagctgaccggcatcctgaagaagctgagcctggagaagtaccagcccatcttcgaggagcaggaggtggacatggaggccttcctgaccctgaccgacggcgacctgaaggagctgggcatcaagaccgacggcagcagacagcagatcctggccgccatcagcgagctgaacgccggcaagggcagagagagacagatcctgcaggagaccatccacaacttccacagcagcttcgagagcagcgccagcaacaccagagcccccggcaacagcccctgcgcctag

SEQ ID NO: 13376 - DNA, 2319 bp, synthetic construct
  source 1..2319: mol_type = other DNA; note = Synthetic coding sequence
atgagacaccagaagagaaacgtgtaccactgcaacaagtgcagactgcagttcctgttcgccaaggacaagatcgagcacaagctgcagcaccacaagaccttcagaaagcccaagcagctggagggcctgaagcccggcaccaaggtgaccatcagagccagcagaggccagcccagaaccgtgcccgtgagcagcaacgacaccccccccagcgccctgcaggaggccgcccccctgaccagcagcatggaccccctgcccgtgttcctgtacccccccgtgcagagaagcatccagaagagagccgtgagaaagatgagcgtgatgggcagacagacctgcctggagtgcagcttcgagatccccgacttccccaaccacttccccacctacgtgcactgcagcctgtgcagatacagcacctgctgcagcagagcctacgccaaccacatgatcaacaaccacgtgcccagaaagagccccaagtacctggccctgttcaagaacagcgtgagcggcatcaagctggcctgcaccagctgcaccttcgtgaccagcgtgggcgacgccatggccaagcacctggtgttcaaccccagccacagaagcagcagcatcctgcccagaggcctgacctggatcgcccacagcagacacggccagaccagagacagagtgcacgacagaaacgtgaagaacatgtaccccccccccagcttccccaccaacaaggccgccaccgtgaagagcgccggcgccacccccgccgagcccgaggagctgctgacccccctggcccccgccctgcccagccccgccagcaccgccacccccccccccacccccacccacccccaggccctggccctgccccccctggccaccgagggcgccgagtgcctgaacgtggacgaccaggacgagggcagccccgtgacccaggagcccgagctggccagcggcggcggcggcagcggcggcgtgggcaagaaggagcagctgagcgtgaagaagctgagagtggtgctgttcgccctgtgctgcaacaccgagcaggccgccgagcacttcagaaacccccagagaagaatcagaagatggctgagaagattccaggccagccagggcgagaacctggagggcaagtacctgagcttcgaggccgaggagaagctggccgagtgggtgctgacccagagagagcagcagctgcccgtgaacgaggagaccctgttccagaaggccaccaagatcggcagaagcctggagggcggcttcaagatcagctacgagtgggccgtgagattcatgctgagacaccacctgaccccccacgccagaagagccgtggcccacaccctgcccaaggacgtggccgagaacgccggcctgttcatcgacttcgtgcagagacagatccacaaccaggacctgcccctgagcatgatcgtggccatcgacgagatcagcctgttcctggacaccgaggtgctgagcagcgacgacagaaaggagaacgccctgcagaccgtgggcaccggcgagccctggtgcgacgtggtgctggccatcctggccgacggcaccgtgctgcccaccctggtgttctacagaggccagatggaccagcccgccaacatgcccgacagcatcctgctggaggccaaggagagcggctacagcgacgacgagatcatggagctgtggagcaccagagtgtggcagaagcacaccgcctgccagagaagcaagggcatgctggtgatggactgccacagaacccacctgagcgaggaggtgctggccatgctgagcgccagcagcaccctgcccgccgtggtgcccgccggctgcagcagcaagatccagcccctggacgtgtgcatcaagagaaccgtgaagaacttcctgcacaagaagtggaaggagcaggccagagagatggccgacaccgcctgcgacagcgacgtgctgctgcagctggtgctggtgtggctgggcgaggtgctgggcgtgatcggcgactgccccgagctggtgcagagaagcttcctggtggccagcgtgctgcccggccccgacggcaacatcaacagccccaccagaaacgccgacatgcaggaggagctgatcgccagcctggaggagcagctgaagctgagcggcgagcacagcgagagcagcacccccagacccagaagcagccccgaggagaccatcgagcccgagagcctgcaccagctgttcgagggcgagagcgagaccgagagcttctacggcttcgaggaggccgacctggacctgatggagatctag

SEQ ID NO: 13377 - DNA, 285 bp, synthetic construct
  source 1..285: mol_type = other DNA; note = Synthetic coding sequence
atggccatgaccgccggcaccaccaccaccttccccatgagcaaccacaccagagagagagtgaccgtggccaagctgaccctggagaacttctacagcaacctgatcctgcagcacgaggagagagagaccagacagaagaagctggaggtggccatggaggaggagggcctggccgacgaggagaagaagctgagaagaagccagcacgccagaaaggagaccgagttcctgagactgaagagaaccagactgggcctggacgacttcgagagcctgaagtag

SEQ ID NO: 13378 - DNA, 1047 bp, synthetic construct; identical to SEQ ID NO: 9854
  source 1..1047: mol_type = other DNA; note = Synthetic coding sequence

SEQ ID NO: 13379 - DNA, 888 bp, synthetic construct; identical to SEQ ID NO: 9312
  source 1..888: mol_type = other DNA; note = Synthetic coding sequence

SEQ ID NO: 13380 - DNA, 258 bp, synthetic construct
  source 1..258: mol_type = other DNA; note = Synthetic coding sequence
atgccctacaacgaggccgagaacaagagaagctaccacctgtgcgacctgtgcgacagaatcatcatcggcgacagagagtgggccgcccacatcaagagcaagagccacctgaaccagctgaagaagagaagaagactggacagcgacgccgtgaacaccatcgagagccagagcgtgagccccgaccacaacaaggagcccaaggagaagggcagccccggccagaacgaccaggagctgaagtgcagcgtgtag

SEQ ID NO: 13381 - DNA, 396 bp, synthetic construct
  source 1..396: mol_type = other DNA; note = Synthetic coding sequence
atggccatgaccgccggcaccaccaccaccttccccatgagcaaccacaccagagagagagtgaccgtggccaagctgaccctggagaacttctacagcaacctgatcctgcagcacgaggagagagagaccagacagaagaagctggaggtggccatggaggaggagggcctggccgacgaggagaagaagctgagaagaagccagcacgccagaaaggagaccgagttcctgagactgaagagaaccagactgggcctggacgacttcgagagcctgaaggtgatcggcagaggcgccttcggcgaggtgagactggtgcagaagaaggacaccggccacatctacgccatgaagatcctgagaaagagcgacatgctggagaaggagcagtag

SEQ ID NO: 13382 - DNA, 21 bp, synthetic construct
  source 1..21: mol_type = other DNA; note = Synthetic coding sequence
atggcccacgagatgatctag

SEQ ID NO: 13383 - DNA, 2199 bp, synthetic construct
  source 1..2199: mol_type = other DNA; note = Synthetic coding sequence
atgggcttcagagacgaggccgccggctacttccacaaggccgtgaagctgaaccccgacttcagcgacgccaaggagaacttctacagagtggccaactggctggtggagagatggcacttcatcatgctgaacgacaccaagagaaacaccatctacaacgccgccatccagaaggccgtgtgcctgggcagcaagagcgtgctggacatcggcgccggcaccggcatcctgagcatgttcgccaagaaggccggcgcccacagcgtgtacgcctgcgagctgagcaagaccatgtacgagctggcctgcgacgtggtggccgccaacaagatggaggccggcatcaagctgctgcacaccaagagcctggacatcgagatccccaagcacatccccgagagagtgagcctggtggtgaccgagaccgtggacgccggcctgttcggcgagggcatcgtggagagcctgatccacgcctgggagcacctgctgctgcagcccaagaccaagggcgagagcgccaactgcgagaagtacggcaaggtgatccccgccagcgccgtgatcttcggcatggccgtggagtgcgccgagatcagaagacaccacagagtgggcatcaaggacatcgccggcatccacctgcccaccaacgtgaagttccagagccccgcctacagcagcgtggacaccgaggagaccatcgagccctacaccaccgagaagatgagcagagtgcccggcggctacctggccctgaccgagtgcttcgagatcatgaccgtggacttcaacaacctgcaggagctgaagagcctggccaccaagaagcccgacaagatcggcatccccgtgatcaaggagggcatcctggacgccatcatggtgtggttcgtgctgcagctggacgacgagcacagcctgagcaccagccccagcgaggagacctgctgggagcaggccgtgtaccccgtgcaggacctggccgactactggatcaagcccggcgaccacgtgatgatggaggtgagctgccaggactgctacctgagaatccagagcatcagcgtgctgggcctggagtgcgagatggacgtggccaagagcttcacccagaacaaggacctgctgagcctgggcaacgaggccgagctgtgcagcgccctggccaacctgcagaccagcaagcccgacgccgtggagcagacctgcatcctggagagcaccgagatcgccctgctgaacaacatcccctaccacgagggcttcaagatggccatgagcaaggtgctgagcagcctgacccccgagaagctgtaccagaccatggacacccactgccagaacgagatgagcagcggcaccggccagagcaacaccgtgcagaacatcctggagcccttctacgtgctggacgtgagcgagggcttcagcgtgctgcccgtgatcgccggcaccctgggccaggtgaagccctacagcagcgtggagaaggaccagcacagaatcgccctggacctgatcagcgaggccaaccacttccccaaggagaccctggagttctggctgagacacgtggaggacgagagcgccatgctgcagagacccaagagcgacaagctgtggagcatcatcatcctggacgtgatcgagcccagcggcctgatccagcaggagatcatggagaaggccgccatcagcagatgcctgctgcagagcggcggcaagatcttcccccagtacgtgctgatgttcggcctgctggtggagagccagaccctgctggaggagaacgccgtgcagggcaccgagagaaccctgggcctgaacatcgcccccttcatcaaccagttccaggtgcccatcagagtgttcctggacctgagcagcctgccctgcatccccctgagcaagcccgtggagctgctgagactggacctgatgaccccctacctgaacaccagcaacagagaggtgaaggtgtacgtgtgcaagagcggcagactgaccgccatccccttctggtaccacatgtacctggacgaggagatcagactggacaccagcagcgaggccagccactggaagcaggccgccgtggtgctggacaaccccatccaggtggagatgggcgaggagctggtgctgagcatccagcaccacaagagcaacgtgagcatcaccgtgaagcagtag

SEQ ID NO: 13384 - DNA, 1554 bp, synthetic construct
  source 1..1554: mol_type = other DNA; note = Synthetic coding sequence
atgtgcagcctggccagcggcgccaccggcggcagaggcgccgtggagaacgaggaggacctgcccgagctgagcgacagcggcgacgaggccgcctgggaggacgaggacgacgccgacctgccccacggcaagcagcagaccccctgcctgttctgcaacagactgttcaccagcgccgaggagaccttcagccactgcaagagcgagcaccagttcaacatcgacagcatggtgcacaagcacggcctggagttctacggctacatcaagctgatcaacttcatcagactgaagaaccccaccgtggagtacatgaacagcatctacaaccccgtgccctgggagaaggaggagtacctgaagcccgtgctggaggacgacctgctgctgcagttcgacgtggaggacctgtacgagcccgtgagcgtgcccttcagctaccccaacggcctgagcgagaacaccagcgtggtggagaagctgaagcacatggaggccagagccctgagcgccgaggccgccctggccagagccagagaggacctgcagaagatgaagcagttcgcccaggacttcgtgatgcacaccgacgtgagaacctgcagcagcagcaccagcgtgatcgccgacctgcaggaggacgaggacggcgtgtacttcagcagctacggccactacggcatccacgaggagatgctgaaggacaagatcagaaccgagagctacagagacttcatctaccagaacccccacatcttcaaggacaaggtggtgctggacgtgggctgcggcaccggcatcctgagcatgttcgccgccaaggccggcgccaagaaggtgctgggcgtggaccagagcgagatcctgtaccaggccatggacatcatcagactgaacaagctggaggacaccatcaccctgatcaagggcaagatcgaggaggtgcacctgcccgtggagaaggtggacgtgatcatcagcgagtggatgggctacttcctgctgttcgagagcatgctggacagcgtgctgtacgccaagaacaagtacctggccaagggcggcagcgtgtaccccgacatctgcaccatcagcctggtggccgtgagcgacgtgaacaagcacgccgacagaatcgccttctgggacgacgtgtacggcttcaagatgagctgcatgaagaaggccgtgatccccgaggccgtggtggaggtgctggaccccaagaccctgatcagcgagccctgcggcatcaagcacatcgactgccacaccaccagcatcagcgacctggagttcagcagcgacttcaccctgaagatcaccagaaccagcatgtgcaccgccatcgccggctacttcgacatctacttcgagaagaactgccacaacagagtggtgttcagcaccggcccccagagcaccaagacccactggaagcagaccgtgttcctgctggagaagcccttcagcgtgaaggccggcgaggccctgaagggcaaggtgaccgtgcacaagaacaagagagaggtgctgatcgtgggcatctag

SEQ ID NO: 13385 - DNA, 1560 bp, synthetic construct
  source 1..1560: mol_type = other DNA; note = Synthetic coding sequence
atggagcaggagaagttcgacctgcagaagcagcacaccgagaacatccaggagctgctggaggacaccaacgtgagactgaacaagatggagagcgagtacatggcccagacccagagcaccaaccacatgatcaaggagctggaggccagagtgcagcagctgaccggcgaggccgagaacagcaacctgcagagacagaagctgatccaggagaaggccgagctggagagatgctaccagatcacctgcagcgagctgcaggaggtgaaggccagaagaaacaccctgcacaaggagaaggaccacctggtgaacgactacgagcagaacatgaagctgctgcagaccaagtacgacgccgacatcaacctgctgaagcaggagcacgccctgagcgccagcaaggccagcagcatgatcgaggagctggagcagaacgtgtgccagctgaagcagcagctgcaggagagcgagctgcagagaaagcagcagctgagagaccaggagaacaagttccagatggagaagagccacctgaagcacatctacgagaagaaggcccacgacctgcagagcgagctggacaagggcaaggaggacacccagaagaagatccacaagttcgaggaggccctgaaggagaaggaggagcagctgaccagagtgaccgaggtgcagagactgcaggcccagcaggccgacgccgccctggaggagttcaagagacaggtggagctgaacagcgagaaggtgtacgccgagatgaaggagcagatggagaaggtggaggccgacctgaccagaagcaagagcctgagagagaagcagagcaaggagttcctgtggcagctggaggacatcagacagagatacgagcagcagatcgtggagctgaagctggagcacgagcaggagaagacccacctgctgcagcagcacaacgccgagaaggacagcctggtgagagaccacgagagagagatcgagaacctggagaagcagctgagagccgccaacatggagcacgagaaccagatccaggagttcaagaagagagacgcccaggtgatcgccgacatggaggcccaggtgcacaagctgagagaggagctgatcaacgtgaacagccagagaaagcagcagctggtggagctgggcctgctgagagaggaggagaagcagagagccaccagagagcacgagatcgtggtgaacaagctgaaggccgagagcgagaagatgaagatcgagctgaagaagacccacgccgccgagaccgagatgaccctggagaaggtgctgcaggacgagctggagaacagaagcaaccaggtgagatgcgccgagaagaagctgcagcacaaggagctggagagccaggagcagatcacctacatcagacaggagtacgagaccaagctgaagggcctgatgcccgccagcctgagacaggagctggaggacaccatcagcagcctgaagagccaggtgaacttcctgcagaagagagccagcatcctgcaggaggagctgaccacctaccagggcagaagatag

SEQ ID NO: 13386 - DNA, 1743 bp, synthetic construct
  source 1..1743: mol_type = other DNA; note = Synthetic coding sequence
atgaacaacatccacgtggagaacgagagcctggacaacttcctgaaggagaccaacaaggagaacctgctggacatcctgaccgagcccgagagaaagcccgaccccaagctgtacaccagaagcaagcccaagaccgacagctacaaccagaccaagaacagcctggtgcccaagcaggccctgggcaagagcagcgtgaacagcgccgtgctgaaggacagagtgaacaagcagttcgtgggcgagacccagagcagaaccttccccgtgaagagccagcagctgagcagaggcgccgacctggccagacccggcgtgaagcccagcagaaccgtgcccagccacttcatcagaaccctgagcaaggtgcagagcagcaagaagcccgtggtgaagaacatcaaggacatcaaggtgaacagaagccagtacgagagacccaacgagaccaagatcagaagctaccccgtgaccgagcagagagtgaagcacaccaagcccagaacctaccccagcctgctgcagggcgagtacaacaacagacaccccaacatcaagcaggaccagaagagcagccaggtgtgcatcccccagaccagctgcgtgctgcagaagagcaaggccatcagccagagacccaacctgaccgtgggcagattcaacagcgccatccccagcacccccagcatcagacccaacggcaccagcggcaacaagcacaacaacaacggcttccagcagaaggcccagaccctggacagcaagctgaagaaggccgtgccccagaaccacttcctgaacaagaccgcccccaagacccaggccgacgtgaccaccgtgaacggcacccagaccaaccccaacatcaagaagaaggccaccgccgaggacagaagaaagcagctggaggagtggcagaagagcaagggcaagacctacaagagaccccccatggagctgaagaccaagagaaaggtgatcaaggagatgaacatcagcttctggaagagcatcgagaaggaggaggaggagaagaaggcccagctggagctgagcagcaagatcaacaacaccctgaccgagtgcctgaacctgatcgagggcggcgtgcccagcaacgagatcctgaacatcctgagcagcatccccgaggccgagaagttcgccaagttctggatctgcaaggccaagctgctggccagcaagggcaccttcgacgtgatcggcctgtacgaggaggccatcaagaacggcgccacccccatccaggagctgagaaaggtggtgctgaacatcctgcaggacagcaacagaaccaccgagggcatcaccagcgacagcctggtggccgagaccagcatcaccagcgtggaggagctggccaagaagatggagagcgtgaagagctgcctgagccccaaggagagagagcaggtgaccgccacccccagaatcgccaaggccgagcagcacaactaccccggcatcaagctgcagatcggccccatccccagaatcaacggcatgcccgaggtgcaggacatgaagttcatcacccccgtgagaagaagcagcagaatcgagagagccgtgagcagataccccgagatgctgcaggagcacgacctggtggtggccagcctggacgagctgctggaggtggaggagaccaagtgcttcatcttcagaagaaacgaggccctgcccgtgaccctgggcttccagacccccgagagctag

SEQ ID NO: 13387 - DNA, 705 bp, synthetic construct
  source 1..705: mol_type = other DNA; note = Synthetic coding sequence
atgtacatggacctggtggacggcatcttcctgaaccagatcatgctgcagatcgaccccagacccaccaaccagagaatcaacaagcacgtgaacaacgacgtgaacctgagaatccagaacctgaccatcctggtgagaaacatcaagacctactaccaggaggtgctgcagcagctgatcgtgatgaacctgcccaacgtgctgatgatcggcagagaccccctgagcggcaagagcatggaggagatcaagaaggtgctgctgctggtgctgggctgcgccgtgcagtgcgagagaaaggaggagttcatcgagagaatcaagcagctggacatcgagacccaggccggcatcgtggcccacatccaggaggtgacccacaaccaggagaacgtgttcgacctgcagtggctggagctgcccgacgtggcccccgaggagctggaggccctgagcagaagcatggtgctgcacctgagaagactgatcgaccagagagacgagtgcaccgagctgatcgtggacctgacccaggagagagactacctgcaggcccagcacccccccagccccatcaagagcagcagcgccgacagcacccccagccccaccagcagcctgagcagcgaggacaagcagcacctggccgtggagctggccgacaccaaggccagactgagaagagtgagacaggagctgtag

SEQ ID NO: 13388 - DNA, 1161 bp, synthetic construct
  source 1..1161: mol_type = other DNA; note = Synthetic coding sequence
atgaccgacatcagaaagatcagactgggcgagagactggtggaggtgttcagcgccgagaaggtgtacatggtgagactgagaaaccccctgggcagacaggagtggagcggcccctggagcgagatcagcgaggagtggcagcagctgaccgccagcgacagaaagaacctgggcctggtgatgagcgacgacggcgagttctggatgagcctggaggacttctgcagaaacttccacaagctgaacgtgtgcagaaacgtgaacaaccccatcttcggcagaaaggagctggagagcgtgctgggctgctggaccgtggacgacgaccccctgatgaacagaagcggcggctgctacaacaacagagacaccttcctgcagaacccccagtacatcttcaccgtgcccgaggacggccacaaggtgatcatgagcctgcagcagaaggacctgagaacctacagaagaatgggcagacccgacaactacatcatcggcttcgagctgttcaaggtggagatgaacagaaagttcagactgcaccacctgtacatccaggagagagccggcaccagcacctacatcgacaccagaaccgtgttcctgagcaagtacctgaagaagggcaactacgtgctggtgcccaccatgttccagcacggcagaaccagcgagttcctgctgagaatcttcagcgaggtgcccgtgcagctgagagagctgaccctggacatgcccaagatgagctgctggaacctggccagaggctaccccaaggtggtgacccagatcaccgtgcacagcgccgaggacctggagaagaagtacgccaacgagaccgtgaacccctacctggtgatcaagtgcggcaaggaggaggtgagaagccccgtgcagaagaacaccgtgcacgccatcttcgacacccaggccatcttctacagaagaaccaccgacatccccatcatcgtgcaggtgtggaacagcagaaagttctgcgaccagttcctgggccaggtgaccctggacgccgaccccagcgactgcagagacctgaagagcctgtacctgagaaagaagggcggccccaccgccaaggtgaagcagggccacatcagcttcaaggtgatcagcagcgacgacctgaccgagctgtag

SEQ ID NO: 13389 - DNA, 966 bp, synthetic construct
  source 1..966: mol_type = other DNA; note = Synthetic coding sequence
atgaccgagctgagcctgcagaaggagcagctgcagctgaagatcatcgagatcgaggacgaggccgagaagtggcagaaggagaaggacagaatcaagagcttcaccaccaacgagaaggccatcctggagcagaacttcagagacctggtgagagacctggagaagcagaaggaggaggtgagagccgccctggagcagagagagcaggacgccgtggaccaggtgaaggtgatcatggacgccctggacgagagagccaaggtgctgcacgaggacaagcagaccagagagcagctgcacagcatcagcgacagcgtgctgttcctgcaggagttcggcgccctgatgagcaactacagcctgcccccccccctgcccacctaccacgtgctgctggagggcgagggcctgggccagagcctgggcaacttcaaggacgacctgctgaacgtgtgcatgagacacgtggagaagatgtgcaaggccgacctgagcagaaacttcatcgagagaaaccacatggagaacggcggcgaccacagatacgtgaacaactacaccaacagcttcggcggcgagtggagcgcccccgacaccatgaagagatacagcatgtacctgacccccaagggcggcgtgagaaccagctaccagcccagcagccccggcagattcaccaaggagaccacccagaagaacttcaacaacctgtacggcaccaagggcaactacaccagcagagtgtgggagtacagcagcagcatccagaacagcgacaacgacctgcccgtggtgcagggcagcagcagcttcagcctgaagggctaccccagcctgatgagaagccagagccccaaggcccagccccagacctggaagagcggcaagcagaccatgctgagccactacagacccttctacgtgaacaagggcaacggcatcggcagcaacgaggccccctag

SEQ ID NO: 13390 - DNA, 687 bp, synthetic construct
  source 1..687: mol_type = other DNA; note = Synthetic coding sequence
atgtacagacagagattcctgtacagcctgtacagacacacccactgggtgagatgcgccaagttcagccccgacggcagactgatcgtgagctgcagcgaggacaagaccatcaagatctgggacaccaccaacaagcagtgcgtgaacaacttcagcgacagcgtgggcttcgccaacttcgtggacttcaaccccagcggcacctgcatcgccagcgccggcagcgaccagaccgtgaaggtgtgggacgtgagagtgaacaagctgctgcagcactaccaggtgcacagcggcggcgtgaactgcatcagcttccaccccagcggcaactacctgatcaccgccagcagcgacggcaccctgaagatcctggacctgctggagggcagactgatctacaccctgcagggccacaccggccccgtgttcaccgtgagcttcagcaagggcggcgagctgttcgccagcggcggcgccgacacccaggtgctgctgtggagaaccaacttcgacgagctgcactgcaagggcctgaccaagagaaacctgaagagactgcacttcgacagccccccccacctgctggacatctaccccagaaccccccacccccacgaggagaaggtggagaccgtggaggacttcttcctgcacctgctgagactgatccagagcctgagatag

SEQ ID NO: 13391 - DNA, 1686 bp, synthetic construct
  source 1..1686: mol_type = other DNA; note = Synthetic coding sequence
atgagagccgtgagaagacacctgttcccccagcacagcgcccccggcagaggcgtggtgtgggagtggctgagcgacgacggcagctggaccgcctacgaggccagcgtgtgcgactacctggagcagcaggtggccagaggcaaccagctggtggacctggcccccctgggctacaactacaccgtgaactacaccacccacacccagaccaacaagaccagcagcttctgcagaagcgtgagaagacaggccggccccccctaccccgtgaccaccatcatcgccccccccggccacaccggcgtggcctgcagctgccaccagtgcctgagcggcagcagaaccggccccgtgagcggcagatacagacacagcatgaccaacctgcccgcctaccccgtgccccagcaccccccccacagaaccgccagcgtgttcggcacccaccaggccttcgccccctacaacaagcccagcctgagcggcgccagaagcgcccccagactgaacaccaccaacgcctggggcgccgccccccccagcctgggcagccagcccctgtacagaagcagcctgagccacctgggcccccagcacctgccccccggcagcagcaccagcggcgccgtgagcgccagcctgcccagcggccccagcagcagccccggcagcgtgcccgccaccgtgcccatgcagatgcccaagcccagcagagtgcagcaggccctggccggcatgaccagcgtgctgatgagcgccatcggcctgcccgtgtgcctgagcagagccccccagcccaccagcccccccgccagcagactggccagcaagagccacggcagcgtgaagagactgagaaagatgagcgtgaagggcgccacccccaagcccgagcccgagcccgagcaggtgatcaagaactacaccgaggagctgaaggtgccccccgacgaggactgcatcatctgcatggagaagctgagcaccgccagcggctacagcgacgtgaccgacagcaaggccatcggcagcctggccgtgggccacctgaccaagtgcagccacgccttccacctgctgtgcctgctggccatgtactgcaacggcaacaaggacggcagcctgcagtgccccagctgcaagaccatctacggcgagaagaccggcacccagccccagggcaagatggaggtgctgagattccagatgagcctgcccggccacgaggactgcggcaccatcctgatcgtgtacagcatcccccacggcatccagggccccgagcaccccaaccccggcaagcccttcaccgccagaggcttccccagacagtgctacctgcccgacaacgcccagggcagaaaggtgctggagctgctgaaggtggcctggaagagaagactgatcttcaccgtgggcaccagcagcaccaccggcgagaccgacaccgtggtgtggaacgagatccaccacaagaccgagatggacagaaacatcaccggccacggctaccccgaccccaactacctgcagaacgtgctggccgagctggccgcccagggcgtgaccgaggactgcctggagcagcagcacgccagactgtggtggccccccagatgccccatggccggctgggtggccagacaggaggtgcccagccccagaggctgggaggtgtgctag

SEQ ID NO: 13392 - DNA, 2565 bp, synthetic construct
  source 1..2565: mol_type = other DNA; note = Synthetic coding sequence
atgaaggtggaggcctgcacctgggccggctacagcggcctgtacgaggccatcgagagctgggacttcaagaagatcgagaagctggaggagtacagactgctgctgaagagactgcagcccgagttcaagaccagaatcatccccaccgacatcatcagcgacctgagcgagtgcctgatcaaccaggagtgcgaggagatcctgcagatctgcagcaccaagggcatgatggccggcgccgagaagctggtggagtgcctgctgagaagcgacaaggagaactggcccaagaccctgaagctggccctggagaaggagagaaacaagttcagcgagctgtggatcgtggagaagggcatcaaggacgtggagaccgaggacctggaggacaagatggagaccagcgacatccagatcttctaccaggaggaccccgagtgccagaacctgagcgagaacagctgcccccccagcgaggtgagcgacaccaacctgtacagccccttcaagcccagaaactaccagctggagctggccctgcccgccatgaagggcaagaacaccatcatctgcgcccccaccggctgcggcaagaccttcgtgagcctgctgatctgcgagcaccacctgaagaagttcccccagggccagaagggcaaggtggtgttcttcgccaaccagatccccgtgtacgagcagcagaagagcgtgttcagcaagtacttcgagagacacggctacagagtgaccggcatcagcggcgccaccgccgagaacgtgcccgtggagcagatcgtggagaacaacgacatcatcatcctgaccccccagatcctggtgaacaacctgaagaagggcaccatccccagcctgagcatcttcaccctgatgatcttcgacgagtgccacaacaccagcaagcagcacccctacaacatgatcatgttcaactacctggaccagaagctgggcggcagcagcggccccctgccccaggtgatcggcctgaccgccagcgtgggcgtgggcgacgccaagaacaccgacgaggccctggactacatctgcaagctgtgcgccagcctggacgccagcgtgatcgccaccgtgaagcacaacctggaggagctggagcaggtggtgtacaagccccagaagttcttcagaaaggtggagagcagaatcagcgacaagttcaagtacatcatcgcccagctgatgagagacaccgagagcctggccaagagaatctgcaaggacctggagaacctgagccagatccagaacagagagttcggcacccagaagtacgagcagtggatcgtgaccgtgcagaaggcctgcatggtgttccagatgcccgacaaggacgaggagagcagaatctgcaaggccctgttcctgtacaccagccacctgagaaagtacaacgacgccctgatcatcagcgagcacgccagaatgaaggacgccctggactacctgaaggacttcttcagcaacgtgagagccgccggcttcgacgagatcgagcaggacctgacccagagattcgaggagaagctgcaggagctggagagcgtgagcagagaccccagcaacgagaaccccaagctggaggacctgtgcttcatcctgcaggaggagtaccacctgaaccccgagaccatcaccatcctgttcgtgaagaccagagccctggtggacgccctgaagaactggatcgagggcaaccccaagctgagcttcctgaagcccggcatcctgaccggcagaggcaagaccaaccagaacaccggcatgaccctgcccgcccagaagtgcatcctggacgccttcaaggccagcggcgaccacaacatcctgatcgccaccagcgtggccgacgagggcatcgacatcgcccagtgcaacctggtgatcctgtacgagtacgtgggcaacgtgatcaagatgatccagaccagaggcagaggcagagccagaggcagcaagtgcttcctgctgaccagcaacgccggcgtgatcgagaaggagcagatcaacatgtacaaggagaagatgatgaacgacagcatcctgagactgcagacctgggacgaggccgtgttcagagagaagatcctgcacatccagacccacgagaagttcatcagagacagccaggagaagcccaagcccgtgcccgacaaggagaacaagaagctgctgtgcagaaagtgcaaggccctggcctgctacaccgccgacgtgagagtgatcgaggagtgccactacaccgtgctgggcgacgccttcaaggagtgcttcgtgagcagaccccaccccaagcccaagcagttcagcagcttcgagaagagagccaagatcttctgcgccagacagaactgcagccacgactggggcatccacgtgaagtacaagaccttcgagatccccgtgatcaagatcgagagcttcgtggtggaggacatcgccaccggcgtgcagaccctgtacagcaagtggaaggacttccacttcgagaagatccccttcgaccccgccgagatgagcaagtag

SEQ ID NO: 13393 - DNA, 813 bp, synthetic construct
  source 1..813: mol_type = other DNA; note = Synthetic coding sequence
atgcagatcgagcacatcatcgagaacatcgtggccgtgaccaagggcctgagcgagaagctgcccgagaagtgggagagcgtgaagctgctgttcgtgaagaccgagaagagcgccgccctgcccatcttcagcagcttcgtgagcaactgggacgaggccaccaagagaagcctgctgaacaagaagaagaaggaggccagaagaaagagaagagagagaaacttcgagaagcagaaggagagaaagaagaagagacagcaggccagaaagaccgccagcgtgctgagcaaggacgacgtggcccccgagagcggcgacaccaccgtgaagaagcccgagagcaagaaggagcagacccccgagcacggcaagaagaagagaggcagaggcaaggcccaggtgaaggccaccaacgagagcgaggacgagatcccccagctggtgcccatcggcaagaagacccccgccaacgagaaggtggagatccagaagcacgccaccggcaagaagagccccgccaagagccccaaccccagcacccccagaggcaagaagagaaaggccctgcccgccagcgagacccccaaggccgccgagagcgagacccccggcaagagccccgagaagaagcccaagatcaaggaggaggccgtgaaggagaagagccccagcctgggcaagaaggacgccagacagacccccaagaagcccgaggccaagttcttcaccacccccagcaagagcgtgagaaaggccagccacacccccaagaagtggcccaagaagcccaaggtgccccagagcacctag

SEQ ID NO: 13394 - DNA, 1059 bp, synthetic construct
  source 1..1059: mol_type = other DNA; note = Synthetic coding sequence
atgagcagcagaaagctgagcggccccaagggcagaagactgagcatccacgtggtgacctggaacgtggccagcgccgccccccccctggacctgagcgacctgctgcagctgaacaacagaaacctgaacctggacatctacgtgatcggcctgcaggagctgaacagcggcatcatcagcctgctgagcgacgccgccttcaacgacagctggagcagcttcctgatggacgtgctgagccccctgagcttcatcaaggtgagccacgtgagaatgcagggcatcctgctgctggtgttcgccaagtaccagcacctgccctacatccagatcctgagcaccaagagcacccccaccggcctgttcggctactggctgagcatcgccaagaagcacgaccccctgctgagagagttccaggagggcagactgctgttcccccccacctacaagttcgacagaaacagcaacgactacgacaccagcgagaagaagagaaagcccgcctggaccgacagaatcctgtggagactgaagagacagccctgcgccggccccgacacccccatcccccccgccagccacttcagcctgagcctgagaggctacagcagccacatgacctacggcatcagcgaccacaagcccgtgagcggcaccttcgacctggagctgaagcccctggtgagcgcccccctgatcgtgctgatgcccgaggacctgtggaccgtggagaacgacatgatggtgagctacagcagcaccagcgacttccccagcagcccctgggactggatcggcctgtacaaggtgggcctgagagacgtgaacgactacgtgagctacgcctgggtgggcgacagcaaggtgagctgcagcgacaacctgaaccaggtgtacatcgacatcagcaacatccccaccaccgaggacgagttcctgctgtgctactacagcaacagcctgagaagcgtggtgggcatcagcagacccttccagatcccccccggcagcctgagagaggaccccctgggcgaggcccagccccagatctag

SEQ ID NO: 13395 - DNA, 375 bp, synthetic construct
  source 1..375: mol_type = other DNA; note = Synthetic coding sequence
atgaccggcagctgctgcggcagcaccttcagcagcctgagctacggcggcggctgctgccagccctgctgctgcagagacccctgctgctgcagacccgtgacctgccagaccaccgtgtgcagacccgtgacctgcgtgcccagatgcaccagacccatctgcgagccctgcagaagacccgtgtgctgcgacccctgcagcctgcaggagggctgctgcagacccatcacctgctgccccagcagctgcaccgccgtggtgtgcagaccctgctgctgggccaccacctgctgccagccccccgtgagcgtgcagagcccctgcggccagcccaccccctgcagcaccacctgcagaaccagcagctgctag

SEQ ID NO: 13396 - DNA, 927 bp, synthetic construct; identical to SEQ ID NO: 10182
  source 1..927: mol_type = other DNA; note = Synthetic coding sequence

SEQ ID NO: 13397 - DNA, 2943 bp, synthetic construct
  source 1..2943: mol_type = other DNA; note = Synthetic coding sequence
atgaccgagggcagacactgccaggtgcacctgctggacgacagaagactggagctgctggtgcagcccaagctgctggccagagagctgctggacctggtggccagccacttcaacctgaaggagaaggagtacttcggcatcaccttcatcgacgacaccggccagcagaactggctgcagctggaccacagagtgctggaccacgacctgcccaagaagcccggccccaccatcctgcacttcgccgtgagattctacatcgagagcatcagcttcctgaaggacaagaccaccgtggagctgttcttcctgaacgccaaggcctgcgtgcacaagggccagatcgaggtggagagcgagaccatcttcaagctggccgccttcatcctgcagagccccaaggtgagcctgacccacgacgagaacgccagaaaggacctgaagaccctgcccgccttccccaccaagaccctgcaggagcaccccagcctggcctactgcgaggacagagtgatcgagcactacctgaagatcaagggcctgaccagaggccaggccgtggtgcagtacatgaagatcgtggaggccctgcccacctacggcgtgcactactacgccgtgaaggacaagcagggcctgccctggtggctgggcatcagctacaagggcatcggccagtacgacatccaggacaaggtgaagcccagaaagctgttccagtggaagcagctggagaacctgtacttcagagagaagaagttcgccgtggaggtgcacgaccccagaagaatcagcgtgagcagaagaaccttcggccagagcggcctgttcgtgcagacctggtacgccaacagcagcctgatcaagagcatctgggtgatggccatcagccagcaccagttctacctggacagaaagcagagcaaggccaagatccccagcgccagaagcctggacgagatcgccatggacctgaccgagaccggcacccagagagccagcaagctggtgaccctggagaccaagagccagttcatcatggccagcaacggcagcctgatcagcagcggcagccaggacagcgaggtgagcgaggagcagaagagagagaagatcctggagctgaagaagaaggagaagctgctgcaggagaagctgctgaagaaggtggaggagctgaagaagatctgcctgagagaggccgagctgaccggcaagatgcccaaggagtaccccctgaacatcggcgagaagcccccccaggtgagaagaagagtgggcaccgccttcaagctggacgacaacctgctgcccagcgaggaggaccccgccctgcaggagctggagagcaacttcctgatccagcagaagctggtggaggccgccaagaagctggccaacgagcccgacctgtgcaagaccgtgaagaagaagagaaagcaggactacaccgacgccatgaagaagctgcaggagatcgagaacgccatcaacgagtacagaatcagatgcggcaagaagcccagccagaaggccaccgtgctgcccgaggacatcatccccagcgagagcagcagcctgagcgacaccaccacctacgacgaccccagcgacgccttcaccttccccggccagagaagcagcagcgtgccccacagccccagaatcctgccccccaagagcctgggcatcgagagaatccacttcagaaagagcagcatcaacgagcagttcgtggacaccagacagagcagagagatgctgagcacccacagcagcccctacaagaccctggagagaagaccccagggcggcagaagcatgcccaccacccccgtgctgaccagaaacgcctacagcagcagccacctggagcccgagagcagcagccagcactgcagacagagaagcggcagcctggagagccagagccacctgctgagcgagatggacagcgacaagcccttcttcagcctgagcaagagccagagaagcagcagcaccgagatcctggacgacggcagcagctacaccagccagagcagcaccgagtactactgcgtgacccccgtgaccggcccctactacaccacccagaccctggacaccagaaccagaggcagaagaagaagcaagaagcagaacgtgagcaccagcaacagcggcagcatgcccaacctggcccagaaggacagcctgagaaacggcgtgtacagcaagagccaggagccccccagcagcagctactacatcgccggctacaccccctacgccgagtgcgacttctactacagcggcggctacgtgtacgagaacgacaccgagggccagtacagcgtgaaccccagctacagaagcagcgcccactacggctacgagagacagagagactacagcagaagcttccacgaggacgaggtggacagagtgccccacaacccctacgccaccctgagactgcccagaaaggccgccgccaagagcgagcacatcaccaagaacatccacaaggccctggtggccgagcacctgagaggctggtaccagagagccagcggccagaaggaccagggccacagcccccagaccagcttcgacagcgacagaggcagccagagatgcctgggcttcgccggcctgcaggtgccctgcagccccagcagcagagccagcagctacagcagcgtgagcagcaccaacgccagcggcaactggagaacccagctgaccatcggcctgagcgactacgagacccccgcccacagcagctacaccagctgctacggcaacgtgtacaaccccctgcccagccccagcagacagtacaccgagatcagccagctggacggcaccgacggcaaccagctggaggacaacctggagagcagcgagcagagactgttctggcacgaggacagcaagcccggcaccctggtgtag

SEQ ID NO: 13398 - DNA, 2979 bp, synthetic construct
  source 1..2979: mol_type = other DNA; note = Synthetic coding sequence
atgtacggcagcgccagaagcgtgggcaaggtggagcccagcagccagagccccggcagaagccccagactgcccagaagccccagactgggccacagaagaaccaacagcaccggcggcagcagcggcagcagcgtgggcggcggcagcggcaagaccctgagcatggagaacatccagagcctgaacgccgcctacgccaccagcggccccatgtacctgagcgaccacgagaacgtgggcagcgagacccccaagagcaccatgaccctgggcagaagcggcggcagactgccctacggcgtgagaatgaccgccatgggcagcagccccaacatcgccagcagcggcgtggccagcgacaccatcgccttcggcgagcaccacctgccccccgtgagcatggccagcaccgtgccccacagcctgagacaggccagagacaacaccatcatggacctgcagacccagctgaaggaggtgctgagagagaacgacctgctgagaaaggacgtggaggtgaaggagagcaagctgagcagcagcatgaacagcatcaagaccttctggagccccgagctgaagaaggagagagccctgagaaaggacgaggccagcaagatcaccatctggaaggagcagtacagagtggtgcaggaggagaaccagcacatgcagatgaccatccaggccctgcaggacgagctgagaatccagagagacctgaaccagctgttccagcaggacagcagcagcagaaccggcgagccctgcgtggccgagctgaccgaggagaacttccagagactgcacgccgagcacgagagacaggccaaggagctgttcctgctgagaaagaccctggaggagatggagctgagaatcgagacccagaagcagaccctgaacgccagagacgagagcatcaagaagctgctggagatgctgcagagcaagggcctgagcgccaaggccaccgaggaggaccacgagagaaccagaagactggccgaggccgagatgcacgtgcaccacctggagagcctgctggagcagaaggagaaggagaacagcatgctgagagaggagatgcacagaagattcgagaacgcccccgacagcgccaagaccaaggccctgcagaccgtgatcgagatgaaggacagcaagatcagcagcatggagagaggcctgagagacctggaggaggagatccagatgctgaagagcaacggcgccctgagcaccgaggagagagaggaggagatgaagcagatggaggtgtacagaagccacagcaagttcatgaagaacaagatcggccaggtgaagcaggagctgagcagaaaggacaccgagctgctggccctgcagaccaagctggagaccctgaccaaccagttcagcgacagcaagcagcacatcgaggtgctgaaggagagcctgaccgccaaggagcagagagccgccatcctgcagaccgaggtggacgccctgagactgagactggaggagaaggagaccatgctgaacaagaagaccaagcagatccaggacatggccgaggagaagggcacccaggccggcgagatccacgacctgaaggacatgctggacgtgaaggagagaaaggtgaacgtgctgcagaagaagatcgagaacctgcaggagcagctgagagacaaggagaagcagatgagcagcctgaaggagagagtgaagagcctgcaggccgacaccaccaacaccgacaccgccctgaccaccctggaggaggccctggccgagaaggagagaaccatcgagagactgaaggagcagagagacagagacgagagagagaagcaggaggagatcgacaactacaagaaggacctgaaggacctgaaggagaaggtgagcctgctgcagggcgacctgagcgagaaggaggccagcctgctggacctgaaggagcacgccagcagcctggccagcagcggcctgaagaaggacagcagactgaagaccctggagatcgccctggagcagaagaaggaggagtgcctgaagatggagagccagctgaagaaggcccacgaggccgccctggaggccagagccagccccgagatgagcgacagaatccagcacctggagagagagatcaccagatacaaggacgagagcagcaaggcccaggccgaggtggacagactgctggagatcctgaaggaggtggagaacgagaagaacgacaaggacaagaagatcgccgagctggagagcctgaccagcagacaggtgaaggaccagaacaagaaggtggccaacctgaagcacaaggagcaggtggagaagaagaagagcgcccagatgctggaggaggccagaagaagagaggacaacctgaacgacagcagccagcagctgcaggacagcctgagaaagaaggacgacagaatcgaggagctggaggaggccctgagagagagcgtgcagatcaccgccgagagagagatggtgctggcccaggaggagagcgccagaaccaacgccgagaagcaggtggaggagctgctgatggccatggagaaggtgaagcaggagctggagagcatgaaggccaagctgagcagcacccagcagagcctggccgagaaggagacccacctgaccaacctgagagccgagagaagaaagcacctggaggaggtgctggagatgaagcaggaggccctgctggccgccatcagcgagaaggacgccaacatcgccctgctggagctgagcagcagcaagaagaagacccaggaggaggtggccgccctgaagagagagaaggacagactggtgcagcagctgaagcagcagacccagaacagaatgaagctgatggccgacaactacgaggacgaccacttcaagagcagccacagcaaccagaccaaccacaagcccagccccgaccaggacgaggaggagggcatctgggcctag

SEQ ID NO: 13399 - DNA, 3138 bp, synthetic construct
  source 1..3138: mol_type = other DNA; note = Synthetic coding sequence
atgctgaccgtgcaggtgaagaccagcagcgccatcgagctgcccgacagcctggccttcctgtggatcatccccatgtggtactgcgagggcaaggagctggagaacagccccgacatccacatcgtgcaggccggcaacctgcacagcctgaccatcgccgaggccttcgaggaggacaccggcagatacagctgcttcgccagcaacatctacggcaccgacagcaccagcgccgagatctacatcgagggcgtgagcagcagcgacagcgagggcgaccccaacaaggaggagatgaacagaatccagaagcccaacgaggtgagcagcccccccaccaccagcgccgtgatcccccccgccgtgccccaggcccagcacctggtggcccagcccagagtggccaccatccagcagtgccagagccccaccaactacctgcagggcctggacggcaagcccatcatcgccgcccccgtgttcaccaagatgctgcagaacctgagcgccagcgagggccagctggtggtgttcgagtgcagagtgaagggcgcccccagccccaaggtggagtggtacagagagggcaccctgatcgaggacagccccgacttcagaatcctgcagaagagacccgtgtgcatggagcacatcgaggagatctgcaccctggtgatcgccgaggtgttcgccgaggacagcggctgcttcacctgcaccgccagcaacaagtacggcaccgtgagcagcatcgcccagctgcacgtgagaggcaacgaggacctgagcaacaacggcagcctgcacagcgccaacagcaccaccaacctggccgccatcgagccccagcccagccccccccacagcgagccccccagcgtggagcagccccccaagcccaagctggagggcgtgctggtgaaccacaacgagcccagaagcagcagcagaatcggcctgagagtgcacttcaacctgcccgaggacgacaagggcagcgaggccagcagcgaggccggcgtggtgaccaccagacagaccagacccgacagcttccaggagagattcaacggccaggccaccaagacccccgagcccagcagccccgtgaaggagcccccccccgtgctggccaagcccaagctggacagcacccagctgcagcagctgcacaaccaggtgctgctggagcagcaccagctgcagaaccccccccccagcagccccaaggagttccccttcagcatgaccgtgctgaacagcaacgccccccccgccgtgaccaccagcagcaagcaggtgaaggcccccagcagccagaccttcagcctggccagacccaagtacttcttccccagcaccaacaccaccgccgccaccgtggcccccagcagcagccccgtgttcaccctgagcagcaccccccagaccatccagagaaccgtgagcaaggagagcctgctggtgagccaccccagcgtgcagaccaagagccccggcggcctgagcatccagaacgagcccctgccccccggccccaccgagcccacccccccccccttcaccttcagcatccccagcggcaaccagttccagcccagatgcgtgagccccatccccgtgagccccaccagcagaatccagaaccccgtggccttcctgagcagcgtgctgcccagcctgcccgccatcccccccaccaacgccatgggcctgcccagaagcgcccccagcatgcccagccagggcctggccaagaagaacaccaagagcccccagcccgtgaacgacgacaacatcagagagaccaagaacgccgtgatcagagacctgggcaagaagatcaccttcagcgacgtgagacccaaccagcaggagtacaagatcagcagcttcgagcagagactgatgaacgagatcgagttcagactggagagaacccccgtggacgagagcgacgacgagatccagcacgacgagatccccaccggcaagtgcatcgcccccatcttcgacaagagactgaagcacttcagagtgaccgagggcagccccgtgaccttcacctgcaagatcgtgggcatccccgtgcccaaggtgtactggttcaaggacggcaagcagatcagcaagagaaacgagcactgcaagatgagaagagagggcgacggcacctgcagcctgcacatcgagagcaccaccagcgacgacgacggcaactacaccatcatggccgccaacccccagggcagaatcagctgcagcggccacctgatggtgcagagcctgcccatcagaagcagactgaccagcgccggccagagccacagaggcagaagcagagtgcaggagagagacaaggagcccctgcaggagagattcttcagaccccacttcctgcaggcccccggcgacatggtggcccacgagggcagactgtgcagactggactgcaaggtgagcggcctgcccccccccgagctgacctggctgctgaacggccagcccgtgctgcccgacgccagccacaagatgctggtgagagagaccggcgtgcacagcctgctgatcgaccccctgacccagagagacgccggcacctacaagtgcatcgccaccaacaagaccggccagaacagcttcagcctggagctgagcgtggtggccaaggaggtgaagaaggcccccgtgatcctggagaagctgcagaactgcggcgtgcccgagggccaccccgtgagactggagtgcagagtgatcggcatgcccccccccgtgttctactggaagaaggacaacgagaccatcccctgcaccagagagagaatcagcatgcaccaggacaccaccggctacgcctgcctgctgatccagcccgccaagaagagcgacgccggctggtacaccctgagcgccaagaacgaggccggcatcgtgagctgcaccgccagactggacatctacgcccagtggcaccaccagatccccccccccatgagcgtgagacccagcggcagcagatacggcagcctgaccagcaagggcctggacatcttcagcgccttcagcagcatggagagcaccatggtgtacagctgcagcagcagaagcgtggtggagagcgacgagctgtag

SEQ ID NO: 13400 - DNA, 72 bp, synthetic construct
  source 1..72: mol_type = other DNA; note = Synthetic coding sequence
gtgagactggcctggggcttcgtgagcgccctgggcagcttccacaccgccgaccccgagggcgccgcctag

SEQ ID NO: 13401 - DNA, 1608 bp, synthetic construct
  source 1..1608: mol_type = other DNA; note = Synthetic coding sequence
atggaggcccccaccgtggagaccccccccgaccccagcccccccagcgcccccgcccccgccctggtgcccctgagagcccccgacgtggccagactgagagaggagcaggagaaggtggtgaccaactgccaggagagaatccagcactggaagaaggtggacaacgactacaacgccctgagagagagactgagcaccctgcccgacaagctgagctacaacatcatggtgcccttcggccccttcgccttcatgcccggcaagctggtgcacaccaacgaggtgaccgtgctgctgggcgacaactggttcgccaagtgcagcgccaagcaggccgtgggcctggtggagcacagaaaggagcacgtgagaaagaccatcgacgacctgaagaaggtgatgaagaacttcgagagcagagtggagttcaccgaggacctgcagaagatgagcgacgccgccggcgacatcgtggacatcagagaggagatcaagtgcgacttcgagttcaaggccaagcacagaatcgcccacaagccccacagcaagcccaagaccagcgacatcttcgaggccgacatcgccaacgacgtgaagagcaaggacctgctggccgacaaggagctgtgggccagactggaggagctggagagacaggaggagctgctgggcgagctggacagcaagcccgacaccgtgatcgccaacggcgaggacaccaccagcagcgaggaggagaaggaggacagaaacaccaacgtgaacgccatgcaccaggtgaccgacagccacaccccctgccacaaggacgtggccagcagcgagcccttcagcggccaggtgaacagccagctgaactgcagcgtgaacggcagcagcagctaccacagcgacgacgacgacgacgacgacgacgacgacgacgacgacaacatcgacgacgacgacggcgacaacgaccacgaggccctgggcgtgggcgacaacagcatccccaccatctacttcagccacaccgtggagcccaagagagtgagaatcaacaccggcaagaacaccaccctgaagttcagcgagaagaaggaggaggccaagagaaagagaaagaacagcaccggcagcggccacagcgcccaggagctgcccaccatcagaacccccgccgacatctacagagccttcgtggacgtggtgaacggcgagtacgtgcccagaaagagcatcctgaagagcagaagcagagagaacagcgtgtgcagcgacaccagcgagagcagcgccgccgagttcgacgacagaagaggcgtgctgagaagcatcagctgcgaggaggccacctgcagcgacaccagcgagagcatcctggaggaggagccccaggagaaccagaagaagctgctgcccctgagcgtgacccccgaggccttcagcggcaccgtgatcgagaaggagttcgtgagccccagcctgacccccccccccgccatcgcccaccccgccctgcccaccatccccgagagaaaggaggtgctgctggaggccagcgaggagaccggcaagagagtgagcaagttcaaggccgccagactgcagcagaaggactag

SEQ ID NO: 13402 - DNA, 1731 bp, synthetic construct
  source 1..1731: mol_type = other DNA; note = Synthetic coding sequence
atggagggcctgagaagaagaagaggcagagaggccggccccccccagcccatggtgcccctggccgtggagaaccaggccggcggcgagggcgccggcggcgagctgggcatcagcctgaacatgtgcctgctgggcgccctggtgctgctgggcctgggcgtgctgctgttcagcggcggcctgagcgagagcgagaccggccccatggaggaggtggagagacaggtgctgcccgaccccgaggtgctggaggccgtgggcgacagacaggacggcctgagagagcagctgcaggcccccgtgccccccgacagcgtgcccagcctgcagaacatgggcctgctgctggacaagctggccaaggagaaccaggacatcagactgctgcaggcccagctgcaggcccagaaggaggagctgcagagcctgatgcaccagcccaagggcctggaggaggagaacgcccagctgagaggcgccctgcagcagggcgaggccttccagagagccctggagagcgagctgcagcagctgagagccagactgcagggcctggaggccgactgcgtgagaggccccgacggcgtgtgcctgagcggcggcagaggcccccagggcgacaaggccatcagagagcagggccccagagagcaggagcccgagctgagcttcctgaagcagaaggagcagctggaggccgaggcccaggccctgagacaggagctggagagacagagaagactgctgggcagcgtgcagcaggacctggagagaagcctgcaggacgccagcagaggcgaccccgcccacgccggcctggccgagctgggccacagactggcccagaagctgcagggcctggagaactggggccaggaccccggcgtgagcgccaacgccagcaaggcctggcaccagaagagccacttccagaacagcagagagtggagcggcaaggagaagtggtgggacggccagagagacagaaaggccgagcactggaagcacaagaaggaggagagcggcagagagagaaagaagaactggggcggccaggaggacagagagcccgccggcagatggaaggagggcagacccagagtggaggagagcggcagcaagaaggagggcaagagacagggccccaaggagccccccagaaagagcggcagcttccacagcagcggcgagaagcagaagcagcccagatggagagagggcaccaaggacagccacgaccccctgcccagctgggccgagctgctgagacccaagtacagagccccccagggctgcagcggcgtggacgagtgcgccagacaggagggcctgaccttcttcggcaccgagctggcccccgtgagacagcaggagctggccagcctgctgagaacctacctggccagactgccctgggccggccagctgaccaaggagctgcccctgagccccgccttcttcggcgaggacggcatcttcagacacgacagactgagattcagagacttcgtggacgccctggaggacagcctggaggaggtggccgtgcagcagaccggcgacgacgacgaggtggacgacttcgaggacttcatcttcagccacttcttcggcgacaaggccctgaagaagagaagcggcaagaaggacaagcacagccagagccccagagccgccggccccagagagggccacagccacagccaccaccaccaccacagaggctag

SEQ ID NO: 13403 - DNA, 2244 bp, synthetic construct
  source 1..2244: mol_type = other DNA; note = Synthetic coding sequence
atggccaagtacaacaccggcggcaaccccaccgaggacgtgagcgtgaacagcagacccttcagagtgaccggccccaacagcagcagcggcatccaggccagaaagaacctgttcaacaaccagggcaacgccagcccccccgccggccccagcaacgtgcccaagttcggcagccccaagccccccgtggccgtgaagcccagcagcgaggagaagcccgacaaggagcccaagccccccttcctgaagcccaccggcgccggccagagattcggcacccccgccagcctgaccaccagagaccccgaggccaaggtgggcttcctgaagcccgtgggccccaagcccatcaacctgcccaaggaggacagcaagcccaccttcccctggccccccggcaacaagcccagcctgcacagcgtgaaccaggaccacgacctgaagcccctgggccccaagagcggccccaccccccccaccagcgagaacgagcagaagcaggccttccccaagctgaccggcgtgaagggcaagttcatgagcgccagccaggacctggagcccaagcccctgttccccaagcccgccttcggccagaagccccccctgagcaccgagaacagccacgaggacgagagccccatgaagaacgtgagcagcagcaagggcagccccgcccccctgggcgtgagaagcaagagcggccccctgaagcccgccagagaggacagcgagaacaaggaccacgccggcgagatcagcagcctgcccttccccggcgtggtgctgaagcccgccgccagcagaggcggccccggcctgagcaagaacggcgaggagaagaaggaggacagaaagatcgacgccgccaagaacaccttccagagcaagatcaaccaggaggagctggccagcggcaccccccccgccagattccccaaggcccccagcaagctgaccgtgggcggcccctggggccagagccaggagaaggagaagggcgacaagaacagcgccacccccaagcagaagcccctgccccccctgttcaccctgggcccccccccccccaagcccaacagaccccccaacgtggacctgaccaagttccacaagaccagcagcggcaacagcaccagcaagggccagaccagctacagcaccaccagcctgcccccccccccccccagccaccccgccagccagccccccctgcccgccagccaccccagccagccccccgtgcccagcctgccccccagaaacatcaagccccccttcgacctgaagagccccgtgaacgaggacaaccaggacggcgtgacccacagcgacgtggtgatccccctggaccacgagcaggacagcgagggcgagacctacgaggacatcgaggccagcaaggagagagagaagaagagagagaaggaggagaagaagagactggagctggagaagaaggagcagaaggagaaggagaagaaggagcaggagatcaagaagaagttcaagctgaccggccccatccaggtgatccacctggccaaggcctgctgcgacgtgaagggcggcaagaacgagctgagcttcaagcagggcgagcagatcgagatcatcagaatcaccgacaaccccgagggcaagtggctgggcagaaccgccagaggcagctacggctacatcaagaccaccgccgtggagatcgactacgacagcctgaagctgaagaaggacagcctgggcgcccccagcagacccatcgaggacgaccaggaggtgtacgacgacgtggccgagcaggacgacatcagcagccacagccagagcggcagcggcggcatcttcccccccccccccgacgacgacatctacgacggcatcgaggaggaggacgccgacgacggcagcaccctgcaggtgcaggagaagagcaacacctggagctggggcatcctgaagatgctgaagggcaaggacgacagaaagaagagcatcagagagaagcccaaggtgagcgacagcgacaacaacgagggcagcagcttccccgccccccccaagcagctggacatgggcgacgaggtgtacgacgacgtggacaccagcgacttccccgtgagcagcgccgagatgagccagggcaccaacgtgggcaaggccaagaccgaggagaaggacctgaagaagctgaagaagcaggagaaggaggagaaggacttcagaaagaagttcaagaagtag

SEQ ID NO: 13404 - DNA, 1566 bp, synthetic construct; identical to SEQ ID NO: 12539
  source 1..1566: mol_type = other DNA; note = Synthetic coding sequence

SEQ ID NO: 13405 - DNA, 1710 bp, synthetic construct
  source 1..1710: mol_type = other DNA; note = Synthetic coding sequence
atgctgagagacatgaccggcctgccccacaacagaaagtgcttcgactgcgaccagagaggccccacctacgtgaacatgaccgtgggcagcttcgtgtgcaccagctgcagcggcagcctgagaggcctgaaccccccccacagagtgaagagcatcagcatgaccaccttcacccagcaggagatcgagttcctgcagaagcacggcaacgaggtgtgcaagcagatctggctgggcctgttcgacgacagaagcagcgccatccccgacttcagagacccccagaaggtgaaggagttcctgcaggagaagtacgagaagaagagatggtacgtgccccccgagcaggccaaggtggtggccagcgtgcacgccagcatcagcggcagcagcgccagcagcaccagcagcacccccgaggtgaagcccctgaagagcctgctgggcgacagcgcccccaccctgcacctgaacaagggcacccccagccagagccccgtggtgggcagaagccagggccagcagcaggagaagaagcagttcgacctgctgagcgacctgggcagcgacatcttcgccgcccccgccccccagagcaccgccaccgccaacttcgccaacttcgcccacttcaacagccacgccgcccagaacagcgccaacgccgacttcgccaacttcgacgccttcggccagagcagcggcagcagcaacttcggcggcttccccaccgccagccacagccccttccagccccagaccaccgccttcagaatgctgagcagcagctgcagcttcggcgagttcaccagcgccttccccctgcaggccacccacagcggcagcgccgccagcgtgaacgccaacttcgcccacttcgacaacttccccaagagcagcagcgccgacttcggcaccttcaacaccagccagagccaccagaccgccagcgccgtgagcaaggtgagcaccaacaaggccggcctgcagaccgccgacaagtacgccgccctggccaacctggacaacatcttcagcgccggccagggcggcgaccagggcagcggcttcggcaccaccggcaaggcccccgtgggcagcgtggtgagcgtgcccagccagagcagcgccagcagcgacaagtacgccgccctggccgagctggacagcgtgttcagcagcgccgccaccagcagcaacgcctacaccagcaccagcaacgccagcagcaacgtgttcggcaccgtgcccgtggtggccagcgcccagacccagcccgccagcagcagcgtgcccgcccccttcggcgccacccccagcaccaaccccttcgtggccgccgccggccccagcgtggccagcagcaccaaccccttccagaccaacgccagaggcgccaccgccgccaccttcggcaccgccagcatgagcatgcccaccggcttcggcacccccgccccctacagcctgcccaccagcttcagcggcagcttccagcagcccgccttccccgcccaggccgccttcccccagcagaccgccttcagccagcagcccaacggcttcgccgccttcggccagaccaagcccgtggtgacccccttcggccaggtggccgccgccggcgtgagcagcaaccccttcatgaccggcgcccccaccggccagttccccaccggcagcagcagcaccaaccccttcctgtag

SEQ ID NO: 13406 - DNA, 2007 bp, synthetic construct
  source 1..2007: mol_type = other DNA; note = Synthetic coding sequence
atgagcaagctggccgccgcccacagaggcgccatcagagccctgcagatgttcgtgacccagttcaccgacagaggcgagcaccccctgcccgccagatgcaaggagctgggcagcctgatcagacagctgagcctgtgcagcgtgaagctggacgccgaccccagcgtgcccgacgtggtgatcgacatcctgcagcagatcgaggccctggagagcctgctggagaagaagctgagccccaagaaggtgaagaagtgcttcagcgagatcagaagcagattccccatcggcagccagaaggccctggagagatggcccagcaccagccccaagggcgagagaagacccctgaccgccaaggacaccttcccccaggagaccagcagacccagcgtggccaagcagctgctggccgacaagtaccagcccgacaccgagctgcccgagacccagagactgcagagcgagctggacgtgctggacgccgacatcgtgctggaggagggccccttcatcctggaccagagcgccagcttcaaggacgaggtgctggccgtggccaagaccaaggccggcaagaagaagcccgtgaccgagaacgtgcccttcagaaagaaggacaccctggcccccgccagacagcagggcctgagaaaggccgagagaggcagacagagccagccccacagcaagagcagagtgcagcagaccaccgtgagcagcagactgaagatgaacagacagcccgtgaaggacagaaaggccccctggatcccccccaaccccaccagcccccccgccagccccaagtgcgccgcctggctgaaggtgaagaccagccccagagacgccaccaaggagcccctgcagcaggaggacccccaggaggagagccacctgaccggcgccgtggagcacgaggccgccagactggcctggctggacgccgagaccagcaagagactgaaggagctggaggagctgaaggccaaggagatcgacagcatgcagaagcagagactggactggctggacgccgagaccagcagaagaaccaaggagctgaacgagctgaaggccgaggagatgtacagactgcagcagctgagcgtgagcgccacccacctggccgacaaggtggaggaggccgtgctggacagactgaagcccctgctggtgaaggcccagagagtgaacagcaccaccgaggccaacatccacctgaaggacggcagcagcgtgaacaccgccaaggcccagcccgcccaggaggtggccgccgtggacttcgagagcaacaacatcagacagctggacgacttcctggaggactgcgccagcgagctgtgggccgtgacccacgccaagatcctgggcagcgagaccctggccaccgtggaggacagcaaggacagccccgacctggagatcatgatgagaagaatggaggagatggagaagtaccaggagagcgtgagacagagatacaacaagatcgcctacgccgaccccagactgtggatgcaggaggagaacaacgaccagaagatcagcgccatcagcgagaagcccctgagcccccaccccatcagaatcaccaagaccgtggacagaaaggaccccgccgtgaacatcatgctggagagaccctgcaacggcaacagcctggacgagagcgtgggcaccgaggagggcagcgagaagagagaggcccccctgctgagcctggccgaggacagccagcagaaggagggcagagcccccctgttcgtgccccccggcatgcagcacagcatcggcgactactgcagcagattcgagcagtacctgagaatcatcagccacgaggccgtgggcagcttcaacccctggctgatcgccgagagcttcagcgaggagctggtggacgaggccctgggcgccgtggccgccgagctgcaggacatgtgcgaggactacgccgaggccgtgttcaccagcgagttcctggaggccgccacctag

SEQ ID NO: 13407 - DNA, 3612 bp, synthetic construct
  source 1..3612: mol_type = other DNA; note = Synthetic coding sequence
atgcccgccagaatcggctactacgagatcgacagaaccatcggcaagggcaacttcgccgtggtgaagagagccacccacctggtgaccaaggccaaggtggccatcaagatcatcgacaagacccagctggacgaggagaacctgaagaagatcttcagagaggtgcagatcatgaagatgctgtgccacccccacatcatcagactgtaccaggtgatggagaccgagagaatgatctacctggtgaccgagtacgccagcggcggcgagatcttcgaccacctggtggcccacggcagaatggccgagaaggaggccagaagaaagttcaagcagatcgtgaccgccgtgtacttctgccactgcagaaacatcgtgcacagagacctgaaggccgagaacctgctgctggacgccaacctgaacatcaagatcgccgacttcggcttcagcaacctgttcacccccggccagctgctgaagacctggtgcggcagccccccctacgccgcccccgagctgttcgagggcaaggagtacgacggccccaaggtggacatctggagcctgggcgtggtgctgtacgtgctggtgtgcggcgccctgcccttcgacggcagcaccctgcagaacctgagagccagagtgctgagcggcaagttcagaatccccttcttcatgagcaccgagtgcgagcacctgatcagacacatgctggtgctggaccccaacaagagactgagcatggagcagatctgcaagcacaagtggatgaagctgggcgacgccgaccccaacttcgacagactgatcgccgagtgccagcagctgaaggaggagagacaggtggaccccctgaacgaggacgtgctgctggccatggaggacatgggcctggacaaggagcagaccctgcaggccgagcaggccggcaccgccatgaacatcagcgtgccccaggtgcagctgatcaaccccgagaaccagatcgtggagcccgacggcaccctgaacctggacagcgacgagggcgaggagcccagccccgaggccctggtgagatacctgagcatgagaagacacaccgtgggcgtggccgaccccagaaccgaggtgatggaggacctgcagaagctgctgcccggcttccccggcgtgaacccccaggcccccttcctgcaggtggcccccaacgtgaacttcatgcacaacctgctgcccatgcagaacctgcagcccaccggccagctggagtacaaggagcagagcctgctgcagccccccaccctgcagctgctgaacggcatgggccccctgggcagaagagccagcgacggcggcgccaacatccagctgcacgcccagcagctgctgaagagacccagaggccccagccccctggtgaccatgacccccgccgtgcccgccgtgacccccgtggacgaggagagcagcgacggcgagcccgaccaggaggccgtgcagagatacctggccaacagaagcaagagacacaccctggccatgaccaaccccaccgccgagatcccccccgacctgcagagacagctgggccagcagcccttcagaagcagagtgtggcccccccacctggtgcccgaccagcacagaagcacctacaaggacagcaacaccctgcacctgcccaccgagagattcagccccgtgagaagattcagcgacggcgccgccagcatccaggccttcaaggcccacctggagaagatgggcaacaacagcagcatcaagcagctgcagcaggagtgcgagcagctgcagaagatgtacggcggccagatcgacgagagaaccctggagaagacccagcagcagcacatgctgtaccagcaggagcagcaccaccagatcctgcagcagcagatccaggacagcatctgccccccccagcccagcccccccctgcaggccgcctgcgagaaccagcccgccctgctgacccaccagctgcagagactgagaatccagcccagcagccccccccccaaccaccccaacaaccacctgttcagacagcccagcaacagccccccccccatgagcagcgccatgatccagccccacggcgccgccagcagcagccagttccagggcctgcccagcagaagcgccatcttccagcagcagcccgagaactgcagcagcccccccaacgtggccctgacctgcctgggcatgcagcagcccgcccagagccagcaggtgaccatccaggtgcaggagcccgtggacatgctgagcaacatgcccggcaccgccgccggcagcagcggcagaggcatcagcatcagccccagcgccggccagatgcagatgcagcacagaaccaacctgatggccaccctgagctacggccacagacccctgagcaagcagctgagcgccgacagcgccgaggcccacagcgcccaccagcagcccccccactacaccaccagcgccctgcagcaggccctgctgagccccaccccccccgactacaccagacaccagcaggtgccccacatcctgcagggcctgctgagccccagacacagcctgaccggccacagcgacatcagactgccccccaccgagttcgcccagctgatcaagagacagcagcagcagagacagcagcagcagcagcagcagcagcagcaggagtaccaggagctgttcagacacatgaaccagggcgacgccggcagcctggcccccagcctgggcggccagagcatgaccgagagacaggccctgagctaccagaacgccgacagctaccaccaccacaccagcccccagcacctgctgcagatcagagcccaggagtgcgtgagccaggccagcagccccacccccccccacggctacgcccaccagcccgccctgatgcacagcgagagcatggaggaggactgcagctgcgagggcgccaaggacggcttccaggacagcaagagcagcagcaccctgaccaagggctgccacgacagccccctgctgctgagcaccggcggccccggcgaccccgagagcctgctgggcaccgtgagccacgcccaggagctgggcatccacccctacggccaccagcccaccgccgccttcagcaagaacaaggtgcccagcagagagcccgtgatcggcaactgcatggacagaagcagccccggccaggccgtggagctgcccgaccacaacggcctgggctaccccgccagacccagcgtgcacgagcaccacagacccagagccctgcagagacaccacaccatccagaacagcgacgacgcctacgtgcagctggacaacctgcccggcatgagcctggtggccggcaaggccctgagcagcgccagaatgagcgacgccgtgctgagccagagcagcctgatgggcagccagcagttccaggacggcgagaacgaggagtgcggcgccagcctgggcggccacgagcaccccgacctgagcgacggcagccagcacctgaacagcagctgctaccccagcacctgcatcaccgacatcctgctgagctacaagcaccccgaggtgagcttcagcatggagcaggccggcgtgtag

SEQ ID NO: 13408 - DNA, 2046 bp, synthetic construct
  source 1..2046: mol_type = other DNA; note = Synthetic coding sequence
atgatcgagaagatgcagggcagcagaatggacgagcagagatgcagcttccccccccccctgaagaccgaggaggactacatcccctaccccagcgtgcacgaggtgctgggcagagagggccccttccccctgatcctgctgccccagttcggcggctactggatcgagggcaccaaccacgagatcaccagcatccccgagaccgagcccctgcagagccccaccaccaaggtgaagctggagtgcaaccccaccgccagaatctacagaaagcacttcctgggcaaggagcacttcaactactacagcctggacgccgccctgggccacctggtgttcagcctgaagtacgacgtgatcggcgaccaggagcacctgagactgctgctgagaaccaagtgcagaacctaccacgacgtgatccccatcagctgcctgaccgagttccccaacgtggtgcagatggccaagctggtgtgcgaggacgtgaacgtggacagattctaccccgtgctgtaccccaaggccagcagactgatcgtgaccttcgacgagcacgtgatcagcaacaacttcaagttcggcgtgatctaccagaagctgggccagaccagcgaggaggagctgttcagcaccaacgaggagagccccgccttcgtggagttcctggagttcctgggccagaaggtgaagctgcaggacttcaagggcttcagaggcggcctggacgtgacccacggccagaccggcaccgagagcgtgtactgcaacttcagaaacaaggagatcatgttccacgtgagcaccaagctgccctacaccgagggcgacgcccagcagctgcagagaaagagacacatcggcaacgacatcgtggccgtggtgttccaggacgagaacacccccttcgtgcccgacatgatcgccagcaacttcctgcacgcctacgtggtggtgcaggccgagggcggcggccccgacggccccctgtacaaggtgagcgtgaccgccagagacgacgtgcccttcttcggcccccccctgcccgaccccgccgtgttcagaaagggccccgagttccaggagttcctgctgaccaagctgatcaacgccgagtacgcctgctacaaggccgagaagttcgccaagctggaggagagaaccagagccgccctgctggagaccctgtacgaggagctgcacatccacagccagagcatgatgggcctgggcggcgacgaggacaagatggagaacggcagcggcggcggcggcttcttcgagagcttcaagagagtgatcagaagcagaagccagagcatggacgccatgggcctgagcaacaagaagcccaacaccgtgagcaccagccacagcggcagcttcgcccccaacaaccccgacctggccaaggccgccggcatcagcctgctgatccccggcaagagcgccagcagattcggcagaagaggcagcgccatcggcatcggcaccgtggaggagagcctgatcgtgcccggcaagagccccaccagaaagaagagcggccccttcggcagcagaagaagcagcgccatcggcatcgagaacatccaggaggtgcaggagaagagagagagcccccccgccggccagaagacccccgacagcggccacgtgagccaggagcccaagagcgagaacagcagcacccagagcagccccgagatgcccaccaccaagaacagagccgagaccgccgcccagagagccgaggccctgaaggacttcagcagaagcagcagcagcgccagcagcttcgccagcgtggtggaggagaccgagggcgtggacggcgaggacaccggcctggagagcgtgagcagcagcggcaccccccacaagagagacagcttcatctacagcacctggctggaggacagcgtgagcaccaccagcggcggcagcagccccgacgccggcaagctgggcgaccccgcctgccccgagatcaagatccagctggaggccagcgagcagcacatgccccagctgggctgctag

SEQ ID NO: 13409 - DNA, 675 bp, synthetic construct
  source 1..675: mol_type = other DNA; note = Synthetic coding sequence
atgagcgtgggctacgccaacggcatcagagtgatgagcatgacccacaccggcgagcccggcttcatgctgtacatccccatcgagtacgccctgcacgtgtacaacgaggtgatgagcgtgggccagaagtacggcatcagaaacgccggctactacgccctgagaagcctgagaatcgagaagttcttcgccttctggggccaggacatcaacaacctgaccacccccctggagtgcggcagagagagcagagtgaagctggagaagggcatggacttcatcggcagagacgccctgctgcagcagaagcagaacggcgtgtacaagagactgaccatgttcatcctggacgaccacgacagcgacctggacctgtggccctggtggggcgagcccatctacagaaacggccagtacgtgggcaagaccaccagcagcgcctacagctacagcctggagagacacgtgtgcctgggcttcgtgcacaacttcagcgaggacaccggcgaggagcaggtggtgaccgccgacttcatcaacagaggcgagtacgagatcgacatcgccggctacagattccaggccaaggccaagctgtaccccgtggccagcctgttcacccagaagagaagaaaggacgacatggagctgagcgacctgcacggcaagtag

SEQ ID NO: 13410 - DNA, 1590 bp, synthetic construct
  source 1..1590: mol_type = other DNA; note = Synthetic coding sequence
atgcacttcagcggcctggaggaggccgtgtacagaaacatccaggcctgcaaggagctggcccagaccaccagaaccgcctacggccccaacggcatgaacaagatggtgatcaaccacctggagaagctgttcgtgaccaacgacgccgccaccatcctgagagagctggaggtgcagcaccccgccgccaagatgatcgtgatggccagccacatgcaggagcaggaggtgggcgacggcaccaacttcgtgctggtgttcgccggcgccctgctggagctggccgaggagctgctgagaatcggcctgagcgtgagcgaggtgatcgagggctacgagatcgcctgcagaaaggcccacgagatcctgcccaacctggtgtgctgcagcgccaagaacctgagagacatcgacgaggtgagcagcctgctgagaaccagcatcatgagcaagcagtacggcaacgaggtgttcctggccaagctgatcgcccaggcctgcgtgagcatcttccccgacagcggccacttcaacgtggacaacatcagagtgtgcaagatcctgggcagcggcatcagcagcagcagcgtgctgcacggcatggtgttcaagaaggagaccgagggcgacgtgaccagcgtgaaggacgccaagatcgccgtgtacagctgccccttcgacggcatgatcaccgagaccaagggcaccgtgctgatcaagaccgccgaggagctgatgaacttcagcaagggcgaggagaacctgatggacgcccaggtgaaggccatcgccgacaccggcgccaacgtggtggtgaccggcggcaaggtggccgacatggccctgcactacgccaacaagtacaacatcatgctggtgagactgaacagcaagtgggacctgagaagactgtgcaagaccgtgggcgccaccgccctgcccagactgaccccccccgtgctggaggagatgggccactgcgacagcgtgtacctgagcgaggtgggcgacacccaggtggtggtgttcaagcacgagaaggaggacggcgccatcagcaccatcgtgctgagaggcagcaccgacaacctgatggacgacatcgagagagccgtggacgacggcgtgaacaccttcaaggtgctgaccagagacaagagactggtgcccggcggcggcgccaccgagatcgagctggccaagcagatcaccagctacggcgagacctgccccggcctggagcagtacgccatcaagaagttcgccgaggccttcgaggccatccccagagccctggccgagaacagcggcgtgaaggccaacgaggtgatcagcaagctgtacgccgtgcaccaggagggcaacaagaacgtgggcctggacatcgaggccgaggtgcccgccgtgaaggacatgctggaggccggcatcctggacacctacctgggcaagtactgggccatcaagctggccaccaacgccgccgtgaccgtgctgagagtggaccagatcatcatggccaagcccgccggcggccccaagccccccagcggcaagaaggactgggacgacgaccagaacgactag

SEQ ID NO: 13411 - DNA, 2193 bp, synthetic construct; identical to SEQ ID NO: 9353
  source 1..2193: mol_type = other DNA; note = Synthetic coding sequence

SEQ ID NO: 13412 - DNA, 2271 bp, synthetic construct
  source 1..2271: mol_type = other DNA; note = Synthetic coding sequence
atggtggcccccgtgctggagaccagccacgtgttctgctgccccaacagagtgagaggcgtgctgaactggagcagcggccccagaggcctgctggccttcggcaccagctgcagcgtggtgctgtacgaccccctgaagagagtggtggtgaccaacctgaacggccacaccgccagagtgaactgcatccagtggatctgcaagcaggacggcagccccagcaccgagctggtgagcggcggcagcgacaaccaggtgatccactgggagatcgaggacaaccagctgctgaaggccgtgcacctgcagggccacgagggccccgtgtacgccgtgcacgccgtgtaccagagaagaaccagcgaccccgccctgtgcaccctgatcgtgagcgccgccgccgacagcgccgtgagactgtggagcaagaagggccccgaggtgcccatcctggcctgcggcaacgacgactgcagaatccacatcttcgcccagcagaacgaccagttccagaaggtgctgagcctgtgcggccacgaggactggatcagaggcgtggagtgggccgccttcggcagagacctgttcctggccagctgcagccaggactgcctgatcagaatctggaagctgtacatcaagagcaccagcctggagacccaggacgacgacaacatcagactgaaggagaacaccttcaccatcgagaacgagagcgtgaagatcgccttcgccgtgaccctggagaccgtgctggccggccacgagaactgggtgaacgccgtgcactggcagcccgtgttctacaaggacggcgtgctgcagcagcccgtgagactgctgagcgccagcatggacaagaccatgatcctgtgggcccccgacgaggagagcggcgtgtggctggagcagagagagtggacccccgagatcgtgatcagcggccacttcgacggcgtgcaggacctggtgtgggaccccgagggcgagttcatcatcaccgtgggcaccgaccagaccaccagactgttcgccccctggaagagaaaggaccagagccaggtgacctggcacgagatcgccagaccccagatccacggctacgacctgaagtgcctggccatgatcaacagattccagttcgtgagcggcgccgacgagaaggtgctgagagtgttcagcgcccccagaaacttcgtggagaacttctgcgccatcaccggccagagcctgaaccacgtgctgtgcaaccaggacagcgacctgcccgagggcgccaccgtgcccgccctgggcctgagcaacaaggccgtgttccagggcgacatcgccagccagcccagcgacgaggaggagctgctgaccagcaccggcttcgagtaccagcaggtggccttccagcccagcatcctgaccgagccccccaccgaggaccacctgctgcagaacaccctgtggcccgaggtgcagaagctgtacggccacggctacgagatcttctgcgtgacctgcaacagcagcaagaccctgctggccagcgcctgcaaggccgccaagaaggagcacgccgccatcatcctgtggaacaccaccagctggaagcaggtgcagaacctggtgttccacagcctgaccgtgacccagatggccttcagccccaacgagaagttcctgctggccgtgagcagagacagaacctggagcctgtggaagaagcaggacaccatcagccccgagttcgagcccgtgttcagcctgttcgccttcaccaacaagatcaccagcgtgcacagcagaatcatctggagctgcgactggagccccgacagcaagtacttcttcaccggcagcagagacaagaaggtggtggtgtggggcgagtgcgacagcaccgacgactgcatcgagcacaacatcggcccctgcagcagcgtgctggacgtgggcggcgccgtgaccgccgtgagcgtgtgccccgtgctgcaccccagccagagatacgtggtggccgtgggcctggagtgcggcaagatctgcctgtacacctggaagaagaccgaccaggtgcccgagatcaacgactggacccactgcgtggagaccagccagagccagagccacaccctggccatcagaaagctgtgctggaagaactgcagcggcaagaccgagcagaaggaggccgagggcgccgagtggctgcacttcgccagctgcggcgaggaccacaccgtgaagatccacagagtgaacaagtgcgccctgtag

SEQ ID NO: 13413 - DNA, 1272 bp, synthetic construct
  source 1..1272: mol_type = other DNA; note = Synthetic coding sequence
atgaacagacagcccgtgaaggacagaaaggccccctggatcccccccaaccccaccagcccccccgccagccccaagtgcgccgcctggctgaaggtgaagaccagccccagagacgccaccaaggagcccctgcagcaggaggacccccaggaggagagccacctgaccggcgccgtggagcacgaggccgccagactggcctggctggacgccgagaccagcaagagactgaaggagctggaggagctgaaggccaaggagatcgacagcatgcagaagcagagactggactggctggacgccgagaccagcagaagaaccaaggagctgaacgagctgaaggccgaggagatgtacagactgcagcagctgagcgtgagcgccacccacctggccgacaaggtggaggaggccgtgctggacagactgaagcccctgctggtgaaggcccagagagtgaacagcaccaccgaggccaacatccacctgaaggacggcagcagcgtgaacaccgccaaggcccagcccgcccaggaggtggccgccgtggacttcgagagcaacaacatcagacagctggacgacttcctggaggactgcgccagcgagctgtgggccgtgacccacgccaagatcctgggcagcgagaccctggccaccgtggaggacagcaaggacagccccgacctggagatcatgatgagaagaatggaggagatggagaagtaccaggagagcgtgagacagagatacaacaagatcgcctacgccgaccccagactgtggatgcaggaggagaacaacgaccagaagatcagcgccatcagcgagaagcccctgagcccccaccccatcagaatcaccaagaccgtggacagaaaggaccccgccgtgaacatcatgctggagagaccctgcaacggcaacagcctggacgagagcgtgggcaccgaggagggcagcgagaagagagaggcccccctgctgagcctggccgaggacagccagcagaaggagggcagagcccccctgttcgtgccccccggcatgcagcacagcatcggcgactactgcagcagattcgagcagtacctgagaatcatcagccacgaggccgtgggcagcttcaacccctggctgatcgccgagagcttcagcgaggagctggtggacgaggccctgggcgccgtggccgccgagctgcaggacatgtgcgaggactacgccgaggccgtgttcaccagcgagttcctggaggccgccacctag

SEQ ID NO: 13414 - DNA, 777 bp, synthetic construct
  source 1..777: mol_type = other DNA; note = Synthetic coding sequence
atggccagactgcaggaggagcacggcgaccagctgctgagcatcagatgccagcaccaggagcaggtggaggacctgaccgccagccacgacgccgccctgctggagatggagaacaaccacaccgtggccatcaccatcctgcaggacgaccacgaccacaaggtgcaggagctgatgagcacccacgagctggagaagaaggagctggaggagaacttcgagaagctgagactgagcctgcaggaccaggtggacaccctgaccttccagagccagagcctgagagacagagccagaagattcgaggaggccctgagaaagaacaccgaggagcagctggagatcgccctggccccctaccagcacctggaggaggacatgaagagcctgaagcaggtgctggagatgaagaaccagcagatccacgagcaggagaagaagatcctggagctggagaagctggccgagaagaacatcatcctggaggagaagatccaggtgctgcagcagcagaacgaggacctgaaggccagaatcgaccagaacaccgtggtgaccagacagctgagcgaggagaacgccaacctgcaggagtacgtggagaaggagacccaggagaagaagagactgagcagaaccaacgaggagctgctgtggaagctgcagaccggcgaccccaccagccccatcaagctgagccccaccagccccgtgtacagaggcagcagcagcggccccagcagccccgccagagtgagcaccacccccagatag

SEQ ID NO: 13415 - DNA, 1053 bp, synthetic construct
  source 1..1053: mol_type = other DNA; note = Synthetic coding sequence
atgtgccccaccaccacctggcccagaggcagaagatggagcagaaacctgagagacacccaggccgtgagacactacaagatctggagaagagccggcggcagactgcacctgaacgaggccgtgagcttcctgagcctgcccgagctggtgaactaccacagagcccagagcctgagccacggcctgagactggccgccccctgcagaaagcacgagcccgagcccctgccccactgggacgactgggagagacccagagaggagttcaccctgtgcagaaagctgggcagcggctacttcggcgaggtgttcgagggcctgtggaaggacagagtgcaggtggccatcaaggtgatcagcagagacaacctgctgcaccagcagatgctgcagagcgagatccaggccatgaagaagctgagacacaagcacatcctggccctgtacgccgtggtgagcgtgggcgaccccgtgtacatcatcaccgagctgatggccaagggcagcctgctggagctgctgagagacagcgacgagaaggtgctgcccgtgagcgagctgctggacatcgcctggcaggtggccgagggcatgtgctacctggagagccagaactacatccacagagacctggccgccagaaacatcctggtgggcgagaacaccctgtgcaaggtgggcgacttcggcctggccagactgatcaaggaggacgtgtacctgagccacgaccacaacatcccctacaagtggaccgcccccgaggccctgagcagaggccactacagcaccaagagcgacgtgtggagcttcggcatcctgctgcacgagatgttcagcagaggccaggtgccctaccccggcatgagcaaccacgaggccttcctgagagtggacgccggctacagaatgccctgccccctggagtgcccccccagcgtgcacaagctgatgctgacctgctggtgcagagaccccgagcagagaccctgcttcaaggccctgagagagagactgagcagcttcaccagctacgagaaccccacctag

SEQ ID NO: 13416 - DNA, 3480 bp, synthetic construct
  source 1..3480: mol_type = other DNA; note = Synthetic coding sequence
atggtgagcagcagccccagcacccccagcaacatcccccagaagcccagccagcccgccgccaaggagcccagcgccaccccccccatcagcaacctgaccaagaccgccagcgagagcatcagcaacctgagcgaggccggcagcatcaagaagggcgagagagagctgaagatcggcgacagagtgctggtgggcggcaccaaggccggcgtggtgagattcctgggcgagaccgacttcgccaagggcgagtggtgcggcgtggagctggacgagcccctgggcaagaacgacggcgccgtggccggcaccagatacttccagtgccagcccaagtacggcctgttcgcccccgtgcacaaggtgaccaagatcggcttccccagcaccacccccgccaaggccaaggccaacgccgtgagaagagtgatggccaccaccagcgccagcctgaagagaagccccagcgccagcagcctgagcagcatgagcagcgtggccagcagcgtgagcagcagacccagcagaaccggcctgctgaccgagaccagcagcagatacgccagaaagatcagcggcaccaccgccctgcaggaggccctgaaggagaagcagcagcacatcgagcagctgctggccgagagagacctggagagagccgaggtggccaaggccaccagccacgtgggcgagatcgagcaggagctggccctggccagagacggccacgaccagcacgtgctggagctggaggccaagatggaccagctgagaaccatggtggaggccgccgacagagagaaggtggagctgctgaaccagctggaggaggagaagagaaaggtggaggacctgcagttcagagtggaggaggagagcatcaccaagggcgacctggagacccagaccaagctggagcacgccagaatcaaggagctggagcagagcctgctgttcgagaagaccaaggccgacaagctgcagagagagctggaggacaccagagtggccaccgtgagcgagaagagcagaatcatggagctggagaaggacctggccctgagagtgcaggaggtggccgagctgagaagaagactggagagcaacaagcccgccggcgacgtggacatgagcctgagcctgctgcaggagatcagcagcctgcaggagaagctggaggtgaccagaaccgaccaccagagagagatcaccagcctgaaggagcacttcggcgccagagaggagacccaccagaaggagatcaaggccctgtacaccgccaccgagaagctgagcaaggagaacgagagcctgaagagcaagctggagcacgccaacaaggagaacagcgacgtgatcgccctgtggaagagcaagctggagaccgccatcgccagccaccagcaggccatggaggagctgaaggtgagcttcagcaagggcctgggcaccgagaccgccgagttcgccgagctgaagacccagatcgagaagatgagactggactaccagcacgagatcgagaacctgcagaaccagcaggacagcgagagagccgcccacgccaaggagatggaggccctgagagccaagctgatgaaggtgatcaaggagaaggagaacagcctggaggccatcagaagcaagctggacaaggccgaggaccagcacctggtggagatggaggacaccctgaacaagctgcaggaggccgagatcaagaaggagaagttcgccgaggccagcgaggaggccgtgagcgtgcagagaagcatgcaggagaccgtgaacaagctgcaccagaaggaggagcagttcaacatgctgagcagcgacctggagaagctgagagagaacctggccgacatggaggccaagttcagagagaaggacgagagagaggagcagctgatcaaggccaaggagaagctggagaacgacatcgccgagatcatgaagatgagcggcgacaacagcagccagctgaccaagatgaacgacgagctgagactgaaggagagagacgtggaggagctgcagctgaagctgaccaaggccaacgagaacgccagcttcctgcagaagagcatcgaggacatgaccgtgaaggccgagcagagccagcaggaggccgccaagaagcacgaggaggagaagaaggagctggagagaaagctgagcgacctggagaagaagatggagaccagccacaaccagtgccaggagctgaaggccagatacgagagagccaccagcgagaccaagaccaagcacgaggagatcctgcagaacctgcagaagaccctgctggacaccgaggacaagctgaagggcgccagagaggagaacagcggcctgctgcaggagctggaggagctgagaaagcaggccgacaaggccaaggccgcccagaccgccgaggacgccatgcagatcatggagcagatgaccaaggagaagaccgagaccctggccagcctggaggacaccaagcagaccaacgccaagctgcagaacgagctggacaccctgaaggagaacaacctgaagaacgtggaggagctgaacaagagcaaggagctgctgaccgtggagaaccagaagatggaggagttcagaaaggagatcgagaccctgaagcaggccgccgcccagaagagccagcagctgagcgccctgcaggaggagaacgtgaagctggccgaggagctgggcagaagcagagacgaggtgaccagccaccagaagctggaggaggagagaagcgtgctgaacaaccagctgctggagatgaagaagagagagagcaagttcatcaaggacgccgacgaggagaaggccagcctgcagaagagcatcagcatcaccagcgccctgctgaccgagaaggacgccgagctggagaagctgagaaacgaggtgaccgtgctgagaggcgagaacgccagcgccaagagcctgcacagcgtggtgcagaccctggagagcgacaaggtgaagctggagctgaaggtgaagaacctggagctgcagctgaaggagaacaagagacagctgagcagcagcagcggcaacaccgacacccaggccgacgaggacgagagagcccaggagagccagaaccagatcgacttcctgaacagcgtgatcgtggacctgcagagaaagaaccaggacctgaagatgaaggtggagatgatgagcgaggccgccctgaacggcaacggcgacgacctgaacaactacgacagcgacgaccaggagaagcagagcaagaagaagcccagactgttctgcgacatctgcgactgcttcgacctgcacgacaccgaggactgccccacccaggcccagatgagcgaggaccccccccacagcacccaccacggcagcagaggcgaggagagaccctactgcgagatctgcgagatgttcggccactgggccaccaactgcaacgacgacgagaccttctag

SEQ ID NO: 13417 - DNA, 756 bp, synthetic construct
  source 1..756: mol_type = other DNA; note = Synthetic coding sequence
atgaccaccgagcagagaagaagcctgcaggccttccaggactacatcagaaagaccctggaccccacctacatcctgagctacatggccccctggttcagagaggaggaggtgcagtacatccaggccgagaagaacaacaagggccccatggaggccgccaccctgttcctgaagttcctgctggagctgcaggaggagggctggttcagaggcttcctggacgccctggaccacgccggctacagcggcctgtacgaggccatcgagagctgggacttcaagaagatcgagaagctggaggagtacagactgctgctgaagagactgcagcccgagttcaagaccagaatcatccccaccgacatcatcagcgacctgagcgagtgcctgatcaaccaggagtgcgaggagatcctgcagatctgcagcaccaagggcatgatggccggcgccgagaagctggtggagtgcctgctgagaagcgacaaggagaactggcccaagaccctgaagctggccctggagaaggagagaaacaagttcagcgagctgtggatcgtggagaagggcatcaaggacgtggagaccgaggacctggaggacaagatggagaccagcgacatccagatcttctaccaggaggaccccgagtgccagaacctgagcgagaacagctgcccccccagcgaggtgagcgacaccaacctgtacagccccttcaagcccatcaagaagaagaagaagaagaagtag

SEQ ID NO: 13418 - DNA, 3189 bp, synthetic construct; identical to SEQ ID NO: 12499
  source 1..3189: mol_type = other DNA; note = Synthetic coding sequence

SEQ ID NO: 13419 - DNA, 363 bp, synthetic construct
  source 1..363: mol_type = other DNA; note = Synthetic coding sequence
atgtggagcatcgagaacatcgccttcggcagcggcggcggcctgctgcagaagctgaccagagacctgctgaactgcagcttcaagtgcagctacgtggtgaccaacggcctgggcatcaacgtgttcaaggaccccgtggccgaccccaacaagagaagcaagaagggcagactgagcctgcacagaacccccgccggcaacttcgtgaccctggaggagggcaagggcgacctggaggagtacggccaggacctgctgcacaccgtgttcaagaacggcaaggtgaccaagagctacagcttcgacgagatcagaaagaacgcccagctgaacatcgagctggaggccgcccaccactag

SEQ ID NO: 13420 - DNA, 936 bp, synthetic construct
  source 1..936: mol_type = other DNA; note = Synthetic coding sequence
atgtaccacctggacaaccaccccgagaagcagttcagcaccgacgtgctgaagcaggccatcgagctgagccccgacaaccagtacgtgaaggtgctgctgggcctgaagctgcagaagatgaacaaggaggccgagggcgagcagttcgtggaggaggccctggagaagagcccctgccagaccgacgtgctgagaagcgccgccaagttctacagaagaaagggcgacctggacaaggccatcgagctgttccagagagtgctggagagcacccccaacaacggctacctgtaccaccagatcggctgctgctacaaggccaaggtgagacagatgcagaacaccggcgagagcgaggccagcggcaacaaggagatgatcgaggccctgaagcagtacgccatggactacagcaacaaggccctggagaagggcctgaaccccctgaacgcctacagcgacctggccgagttcctggagaccgagtgctaccagacccccttcaacaaggaggtgcccgacgccgagaagcagcagagccaccagagatactgcaacctgcagaagtacaacggcaagagcgaggacaccgccgtgcagcacggcctggagggcctgagcatcagcaagaagagcaccgacaaggaggagatcaaggaccagccccagaacgtgagcgagaacctgctgccccagaacgcccccaactactggtacctgcagggcctgatccacaagcagaacggcgacctgctgcaggccgccaagtgctacgagaaggagctgggcagactgctgagagacgcccccagcggcatcggcagcatcttcctgagcgccagcgagctggaggacggcagcgaggagatgggccagggcgccgtgagcagcagccccagagagctgctgagcaacagcgagcagctgaactag

SEQ ID NO: 13421 - DNA, 3267 bp, synthetic construct
  source 1..3267: mol_type = other DNA; note = Synthetic coding sequence
atgtacggcagcgccagaagcgtgggcaaggtggagcccagcagccagagccccggcagaagccccagactgcccagaagccccagactgggccacagaagaaccaacagcaccggcggcagcagcggcagcagcgtgggcggcggcagcggcaagaccctgagcatggagaacatccagagcctgaacgccgcctacgccaccagcggccccatgtacctgagcgaccacgagaacgtgggcagcgagacccccaagagcaccatgaccctgggcagaagcggcggcagactgccctacggcgtgagaatgaccgccatgggcagcagccccaacatcgccagcagcggcgtggccagcgacaccatcgccttcggcgagcaccacctgccccccgtgagcatggccagcaccgtgccccacagcctgagacaggccagagacaacaccatcatggacctgcagacccagctgaaggaggtgctgagagagaacgacctgctgagaaaggacgtggaggtgaaggagagcaagctgagcagcagcatgaacagcatcaagaccttctggagccccgagctgaagaaggagagagccctgagaaaggacgaggccagcaagatcaccatctggaaggagcagtacagagtggtgcaggaggagaaccagcacatgcagatgaccatccaggccctgcaggacgagctgagaatccagagagacctgaaccagctgttccagcaggacagcagcagcagaaccggcgagccctgcgtggccgagctgaccgaggagaacttccagagactgcacgccgagcacgagagacaggccaaggagctgttcctgctgagaaagaccctggaggagatggagctgagaatcgagacccagaagcagaccctgaacgccagagacgagagcatcaagaagctgctggagatgctgcagagcaagggcctgagcgccaaggccaccgaggaggaccacgagagaaccagaagactggccgaggccgagatgcacgtgcaccacctggagagcctgctggagcagaaggagaaggagaacagcatgctgagagaggagatgcacagaagattcgagaacgcccccgacagcgccaagaccaaggccctgcagaccgtgatcgagatgaaggacagcaagatcagcagcatggagagaggcctgagagacctggaggaggagatccagatgctgaagagcaacggcgccctgagcaccgaggagagagaggaggagatgaagcagatggaggtgtacagaagccacagcaagttcatgaagaacaagatcggccaggtgaagcaggagctgagcagaaaggacaccgagctgctggccctgcagaccaagctggagaccctgaccaaccagttcagcgacagcaagcagcacatcgaggtgctgaaggagagcctgaccgccaaggagcagagagccgccatcctgcagaccgaggtggacgccctgagactgagactggaggagaaggagaccatgctgaacaagaagaccaagcagatccaggacatggccgaggagaagggcacccaggccggcgagatccacgacctgaaggacatgctggacgtgaaggagagaaaggtgaacgtgctgcagaagaagatcgagaacctgcaggagcagctgagagacaaggagaagcagatgagcagcctgaaggagagagtgaagagcctgcaggccgacaccaccaacaccgacaccgccctgaccaccctggaggaggccctggccgagaaggagagaaccatcgagagactgaaggagcagagagacagagacgagagagagaagcaggaggagatcgacaactacaagaaggacctgaaggacctgaaggagaaggtgagcctgctgcagggcgacctgagcgagaaggaggccagcctgctggacctgaaggagcacgccagcagcctggccagcagcggcctgaagaaggacagcagactgaagaccctggagatcgccctggagcagaagaaggaggagtgcctgaagatggagagccagctgaagaaggcccacgaggccgccctggaggccagagccagccccgagatgagcgacagaatccagcacctggagagagagatcaccagatacaaggacgagagcagcaaggcccaggccgaggtggacagactgctggagatcctgaaggaggtggagaacgagaagaacgacaaggacaagaagatcgccgagctggagagacaggtgaaggaccagaacaagaaggtggccaacctgaagcacaaggagcaggtggagaagaagaagagcgcccagatgctggaggaggccagaagaagagaggacaacctgaacgacagcagccagcagctgcaggacagcctgagaaagaaggacgacagaatcgaggagctggaggaggccctgagagagagcgtgcagatcaccgccgagagagagatggtgctggcccaggaggagagcgccagaaccaacgccgagaagcaggtggaggagctgctgatggccatggagaaggtgaagcaggagctggagagcatgaaggccaagctgagcagcacccagcagagcctggccgagaaggagacccacctgaccaacctgagagccgagagaagaaagcacctggaggaggtgctggagatgaagcaggaggccctgctggccgccatcagcgagaaggacgccaacatcgccctgctggagctgagcagcagcaagaagaagacccaggaggaggtggccgccctgaagagagagaaggacagactggtgcagcagctgaagcagcagacccagaacagaatgaagctgatggccgacaactacgaggacgaccacttcaagagcagccacagcaaccagaccaaccacaagcccagccccgaccagatcatccagcccctgctggagctggaccagaacagaagcaagctgaagctgtacatcggccacctgaccaccctgtgccacgacagagaccccctgatcctgagaggcctgaccccccccgccagctacaacctggacgacgaccaggccgcctgggagaacgagctgcagaagatgaccagaggccagctgcaggacgagctggagaagggcgagagagacaacgccgagctgcaggagttcgccaacgccatcctgcagcagatcgccgaccactgccccgacatcctggagcaggtggtgaacgccctggaggagagcagctag

SEQ ID NO: 13422 - DNA, 1485 bp, synthetic construct
  source 1..1485: mol_type = other DNA; note = Synthetic coding sequence
atgaagctggtgaacctgtacaagggcgccgtgctgtacctgctgagaggcagaaagaccttcctgatccccgtgctgttcaacaactacatcaccgccgccctgaagctgctggagaagctgtacaaggtgaacctgaaggtgaagcacgtggagtacgacaccttctacatccccgagatcagcaacctggtggacatccaggaggactacctgatgtggttcctgcaccaggccggcatgaaggccagacccagcatcatccaggacaccgtgaccctgtgcagctaccccttcatcttcgacgcccaggccaagaccaagatgctgcagaccgacgccgagctgcagatgcaggtggccgtgaacggcgccaacctgcagaacgtgttcatgctgctgaccctggagcccctgctggccagaagccccttcctggtgctgcacgtgagaagaaacaacctggtgggcgacgccctgagagagctgagcatccacagcgacatcgacctgaagaagcccctgaaggtgatcttcgacggcgaggaggccgtggacgccggcggcgtgaccaaggagttcttcctgctgctgctgaaggagctgctgaaccccatctacggcatgttcacctactaccaggacagcaacctgctgtggttcagcgacacctgcttcgtggagcacaactggttccacctgatcggcatcacctgcggcctggccatctacaacagcaccgtggtggacctgcacttccccctggccctgtacaagaagctgctgaacgtgaagcccggcctggaggacctgaaggagctgagccccaccgagggcagaagcctgcaggagctgctggactaccccggcgaggacgtggaggagaccttctgcctgaacttcaccatctgcagagagagctacggcgtgatcgagcagaagaagctgatccccggcggcgacaacgtgaccgtgtgcaaggacaacagacaggagttcgtggacgcctacgtgaactacgtgttccagatcagcgtgcacgagtggtacaccgccttcagcagcggcttcctgaaggtgtgcggcggcaaggtgctggagctgttccagcccagcgagctgagagccatgatggtgggcaacagcaactacaactgggaggagctggaggagaccgccatctacaagggcgactacagcgccacccaccccaccgtgaagctgttctgggagaccttccacgagttccccctggagaagaagaagaagttcctgctgttcctgaccggcagcgacagaatccccatctacggcatggccagcctgcagatcgtgatccagagcaccgccagcggcgaggagtacctgcccgtggcccacacctgctacaacctgctggacctgcccaagtacagcagcaaggagatcctgagcgccagactgacccaggccctggacaactacgagggcttcagcctggcctag

SEQ ID NO: 13423 - DNA, 2370 bp, synthetic construct
  source 1..2370: mol_type = other DNA; note = Synthetic coding sequence
atgtgccccagcagccagagccccagaccccccctgctgagacccccctgcagctacagagaggtgcccagcagcgtgcagagccccgcccagcagcaggtgcccgccagacccggcgcccccagcgtgcaggtgcccagccccttcctgctgcagaaccagtacgagcccgtgcagccccactggttctactgcaaggaggtggagtacaagcagctgtggatgcccttcagcgtgttcgacagcctgaacctggaggagatctacaacagcgtgcagcccgaccccgagagcgtggtgctgggcaccgacggcggcagatacgacgtgtacctgtacgacagaatcagaaaggccgcctactgggaggaggagcccgccgaggtgagaagatgcacctggttctacaagggcgacaccgacagcagattcatcccctacaccgaggagttcagcgagaagctggaggccgagtacaagaaggccgtgaccaccaaccagtggcacagaagactggagttccccagcggcgagaccatcgtgatgcacaaccccaaggtgatcgtgcagttccagcccagcagcgtgcccgacgagtggggcaccacccaggacggccagaccagacccagagtggtgaagagaggcatcgacgacaacctggacgagatccccgacggcgagatgccccaggtggaccacctggtgttcgtggtgcacggcatcggccccgtgtgcgacctgagattcagaagcatcatcgagtgcgtggacgacttcagagtggtgagcctgaagctgctgagaacccacttcaagaagagcctggacgacggcaaggtgagcagagtggagttcctgcccgtgcactggcacagcagcctgggcggcgacgccaccggcgtggacagaaacatcaagaagatcaccctgcccagcatcggcagattcagacacttcaccaacgagaccctgctggacatcctgttctacaacagccccacctactgccagaccatcgtggagaaggtgggcatggagatcaaccacctgcacgccctgttcatgagcagaaaccccgacttcaagggcggcgtgagcgtggccggccacagcctgggcagcctgatcctgttcgacatcctgagcaaccagaaggacctgaacctgagcaagtgccccggccccctggccgtggccaacggcgtggtgaagcagctgcacttccaggagaagcagatgcccgaggagcccaagctgaccctggacgagagctacgacctggtggtggagaacaaggaggtgctgaccctgcaggagaccctggaggccctgagcctgagcgagtacttcagcaccttcgagaaggagaagatcgacatggagagcctgctgatgtgcaccgtggacgacctgaaggagatgggcatccccctgggccccagaaagaagatcgccaacttcgtggagcacaaggccgccaagctgaagaaggccgccagcgagaagaaggccgtggccgccaccagcaccaagggccaggagcagagcgcccagaagaccaaggacatggccagcctgcccagcgagagcaacgagcccaagagaaagctgcccgtgggcgcctgcgtgagcagcgtgtgcgtgaactacgagagcttcgaggtgggcgccggccaggtgagcgtggcctacaacagcctggacttcgagcccgagatcttcttcgccctgggcagccccatcgccatgttcctgaccatcagaggcgtggacagaatcgacgagaactacagcctgcccacctgcaagggcttcttcaacatctaccaccccctggaccccgtggcctacagactggagcccatgatcgtgcccgacctggacctgaaggccgtgctgatcccccaccacaagggcagaaagagactgcacctggagctgaaggagagcctgagcagaatgggcagcgacctgaagcagggcttcatcagcagcctgaagagcgcctggcagaccctgaacgagttcgccagagcccacaccagcagcacccagctgcaggaggagctggagaaggtggccaaccagatcaaggaggaggaggagaagcaggtggtggaggccgagaaggtggtggagagccccgacttcagcaaggacgaggactacctgggcaaggtgggcatgctgaacggcggcagaagaatcgactacgtgctgcaggagaagcccatcgagagcttcaacgagtacctgttcgccctgcagagccacctgtgctactgggagagcgaggacaccgccctgctgctgctgaaggagatctacagaaccatgaacatcagccccgagcagccccagcactag

SEQ ID NO: 13424 - DNA, 828 bp, synthetic construct; identical to SEQ ID NO: 12370
  source 1..828: mol_type = other DNA; note = Synthetic coding sequence

SEQ ID NO: 13425 - DNA, 240 bp, synthetic construct
  source 1..240: mol_type = other DNA; note = Synthetic coding sequence
atgaacggcaccctggaccaccccgaccagcccgacctggacgccatcaagatgttcgtgggccaggtgcccagaacctggagcgagaaggacctgagagagctgttcgagcagtacggcgccgtgtacgagatcaacgtgctgagagacagaagccagaaccccccccagagcaagggctgctgcttcgtgaccttctacaccagaaaggccgccctggaggcccagaacgccctgtag

SEQ ID NO: 13426 - DNA, 738 bp, synthetic construct
  source 1..738: mol_type = other DNA; note = Synthetic coding sequence
atggtgctgctgcacgtgaagagaggcgacgagagccagttcctgctgcaggcccccggcagcaccgagctggaggagctgaccgtgcaggtggccagagtgtacaacggcagactgaaggtgcagagactgtgcagcgagatggaggagctggccgagcacggcatcttcctgccccccaacatgcagggcctgaccgacgaccagatcgaggagctgaagctgaaggacgagtggggcgagaagtgcgtgcccagcggcggcgccgtgttcaagaaggacgacatcggcagaagaaacggccaggcccccaacgagaagatgaagcaggtgctgaagaagaccatcgaggaggccaaggccatcatcagcaagaagcaggtggaggccggcgtgtgcgtgaccatggagatggtgaaggacgccctggaccagctgagaggcgccgtgatgatcgtgtaccccatgggcctgcccccctacgaccccatcagaatggagttcgagaacaaggaggacctgagcggcacccaggccggcctgaacgtgatcaaggaggccgaggcccagctgtggtgggccgccaaggagctgagaagaaccaagaagctgagcgactacgtgggcaagaacgagaagaccaagatcatcgccaagatccagcaggtgagcaccttctgcttcaacgtgagcgtggtgttcgtgatcagcctgcagaccgacaagaacgtgcagtag

SEQ ID NO: 13427 - DNA, 396 bp, synthetic construct; identical to SEQ ID NO: 13381
  source 1..396: mol_type = other DNA; note = Synthetic coding sequence

SEQ ID NO: 13428 - DNA, 2517 bp, synthetic construct; identical to SEQ ID NO: 10075
  source 1..2517: mol_type = other DNA; note = Synthetic coding sequence

SEQ ID NO: 13429 - DNA, 1215 bp, synthetic construct
  source 1..1215: mol_type = other DNA; note = Synthetic coding sequence
atggacttcaacatgaagaagctggccagcgacgccggcatcttcttcaccagagccgtgcagttcaccgaggagaagttcggccaggccgagaagaccgagctggacgcccacttcgagaacctgctggccagagccgacagcaccaagaactggaccgagaagatcctgagacagaccgaggtgctgctgcagcccaaccccagcgccagagtggaggagttcctgtacgagaagctggacagaaaggtgcccagcagagtgaccaacggcgagctgctggcccagtacatggccgacgccgccagcgagctgggccccaccaccccctacggcaagaccctgatcaaggtggccgaggccgagaagcagctgggcgccgccgagagagacttcatccacaccgccagcatcagcttcctgacccccctgagaaacttcctggagggcgactggaagaccatcagcaaggagagaagactgctgcagaacagaagactggacctggacgcctgcaaggccagactgaagaaggccaaggccgccgaggccaaggccaccgccgagggccccaccgtgcccgacttccaggagaccagacccagaaactacatcctgagcgccagcgccagcgccctgtggaacgacgaggtggacaaggccgagcaggagctgagagtggcccagaccgagttcgacagacaggccgaggtgaccagactgctgctggagggcatcagcagcacccacgtgaaccacctgagatgcctgcacgagttcgtgaagagccagaccacctactacgcccagtgctacagacacatgctggacctgcagaagcagctgggcagcagccagggcgccatcttccccggcaccttcgtgggcaccaccgagcccgccagcccccccctgagcagcaccagccccaccaccgccgccgccaccatgcccgtggtgcccagcgtggccagcctggccccccccggcgaggccagcctgtgcctggaggaggtggccccccccgccagcggcaccagaaaggccagagtgctgtacgactacgaggccgccgacagcagcgagctggccctgctggccgacgagctgatcaccgtgtacagcctgcccggcatggaccccgactggctgatcggcgagagaggcaacaagaagggcaaggtgcccgtgacctacctggagctgctgagctag

SEQ ID NO: 13430 - DNA, 495 bp, synthetic construct
  source 1..495: mol_type = other DNA; note = Synthetic coding sequence
atgacctgctgccagaccagcttctgcggctaccccagcttcagcatcagcggcacctgcggcagcagctgctgccagcccagctgctgcgagaccagctgctgccagcccagaagctgccagaccagcttctgcggcttccccagcttcagcaccagcggcacctgcagcagcagctgctgccagcccagctgctgcgagaccagctgctgccagcccagctgctgccagatcagcagctgcggcaccggctgcggcatcggcggcggcatcagctacggccaggagggcagcagcggcgccgtgagcaccagaatcagatggtgcagacccgacagcagagtggagggcacctacctgcccccctgctgcgtggtgagctgcaccccccccagctgctgccagctgcaccacgcccaggccagctgctgcagacccagctactgcggccagagctgctgcagacccgtgtgctgctgcgagcccacctgctag

SEQ ID NO: 13431 - DNA, 846 bp, synthetic construct
  source 1..846: mol_type = other DNA; note = Synthetic coding sequence
atgctgaccaagctgcagatcaagcagatgatggaggccgccaccagacagatcgaggagagaaagaagcagctgagcttcatcagcccccccaccccccagcccaagacccccagcagcagccagcccgagagactgcccatcggcaacaccatccagcccagccaggccgccaccttcatgaacgacgccatcgagaaggccagaaaggccgccgagctgcaggccagaatccaggcccagctggccctgaagcccggcctgatcggcaacgccaacatggtgggcctggccaacctgcacgccatgggcatcgccccccccaaggtggagctgaaggaccagaccaagcccacccccctgatcctggacgagcagggcagaaccgtggacgccaccggcaaggagatcgagctgacccacagaatgcccaccctgaaggccaacatcagagccgtgaagagagagcagttcaagcagcagctgaaggagaagcccagcgaggacatggagagcaacaccttcttcgaccccagagtgagcatcgcccccagccagagacagagaagaaccttcaagttccacgacaagggcaagttcgagaagatcgcccagagactgagaaccaaggcccagctggagaagctgcaggccgagatcagccaggccgccagaaagaccggcatccacaccagcaccagactggccctgatcgcccccaagaaggagctgaaggagggcgacatccccgagatcgagtggtgggacagctacatcatccccaacggcttcgacctgggcaagagccaggagagaagactgttctggaaccacaagagctgctag

SEQ ID NO: 13432 - DNA, 693 bp, synthetic construct
  source 1..693: mol_type = other DNA; note = Synthetic coding sequence
atgagaggccacgagagcagcgtgttcagcatcagcgtgcacgccagcggcaagtacgccatcaccaccagcagcgacaccgcccagctgtgggacctggacaccttccagagaaagagaaagctgaacatcagacagagcgtgggcatccagaaggtgttcttcctgcccctgagcaacaccatcctgagctgcttcaaggacaacagcatcttcgcctgggagtgcgacaccctgttctgcaagtaccagctgcccgccccccccgagagcagcagcatcctgtacaaggtgttcgccgtgaccagagacggcagaatcctggccgccggcggcaagagcaaccacctgcacctgtggtgcctggaggccagacagctgttcagaatcatccagatgcccaccaaggtgagagccatcagacacctggagttcctgcccgacagcttcgacgccggcagcaaccaggtgctgggcgtgctgagccaggacggcatcatgagattcatcaacatgcagacctgcaagctgctgttcgagatcggcagcctggacgagggcatcagcagcagcgccatcagcccccacggcagatacatcgccagcatcatggagaacggcagcctgaacatctacagcgtgcaggccctgacccaggagatcaacaaggaggaggtgagagcccagaactag

SEQ ID NO: 13433 - DNA, 1212 bp, synthetic construct
  source 1..1212: mol_type = other DNA; note = Synthetic coding sequence
atggacagcaccatggacgacgccgtggccggcgacttcgccctgatcaacaagctggacatccagtgcgacctgaagaccctgagcgacgacatcaaggagagcctggagagcgagggcaagaacagcaagaaggaggagccccaggagctgctgcagagccaggacttcgtgggcgagaagctgggcagcggcgagcccagccacagcgtgaaggtgcacaccgtgcccaagcccggcaagggcgccgacctgagcaagcccccctgcagaaaggccaaggagatcagaaaggagagaaagagactgaagctgatgcagcagaaccccgccggcgagctggagggcttccaggcccagggccacccccccagcctgttcccccccaaggccaagagcaaccagcccaagagcctggaggacctgatcttcgagagcctgcccgagaacgccagccacaagctggaggtgagagtggtgagaagcagcccccccagcagccagttcaaggccaccctgctggagagctaccaggtgtacaagagataccagatggtgatccacaagaacccccccgacacccccaccgagagccagttcaccagattcctgtgcagcagccccctggaggccgagaccccccccaacggccccgactgcggctacggcagcttccaccagcagtactggctggacggcaagatcatcgccgtgggcgtgatcgacatcctgcccaactgcgtgagcagcgtgtacctgtactacgaccccgactacagcttcctgagcctgggcgtgtacagcgccctgagagagatcgccttcaccagacagctgcacgagaagaccagccagctgagctactactacatgggcttctacatccacagctgccccaagatgaagtacaagggccagtacagacccagcgacctgctgtgccccgagacctacgtgtgggtgcccatcgagcagtgcctgcccagcctggagaacagcaagtactgcagattcaaccaggaccccgaggccgtggacgaggacagaagcaccgagcccgacagactgcaggtgttccacaagagagccatcatgccctacggcgtgtacaagaagcagcagaaggaccccagcgaggaggccgccgtgctgcagtacgccagcctggtgggccagaagtgcagcgagagaatgctgctgttcagaaactag

SEQ ID NO: 13434 - DNA, 909 bp, synthetic construct
  source 1..909: mol_type = other DNA; note = Synthetic coding sequence
atgcccctgtacgagggcctgggcagcggcggcgagaagaccgccgtggtgatcgacctgggcgaggccttcaccaagtgcggcttcgccggcgagaccggccccagatgcatcatccccagcgtgatcaagagagccggcatgcccaagcccgtgagagtggtgcagtacaacatcaacaccgaggagctgtacagctacctgaaggagttcatccacatcctgtacttcagacacctgctggtgaaccccagagacagaagagtggtgatcatcgagagcgtgctgtgccccagccacttcagagagaccctgaccagagtgctgttcaagtacttcgaggtgcccagcgtgctgctggcccccagccacctgatggccctgctgaccctgggcatcaacagcgccatggtgctggactgcggctacagagagagcctggtgctgcccatctacgagggcatccccgtgctgaactgctggggcgccctgcccctgggcggcaaggccctgcacaaggagctggagacccagctgctggagcagtgcaccgtggacaccagcgtggccaaggagcagagcctgcccagcgtgatgggcagcgtgcccgagggcgtgctggaggacatcaaggccagaacctgcttcgtgagcgacctgaagagaggcctgaagatccaggccgccaagttcaacatcgacggcaacaacgagagacccagccccccccccaacgtggactaccccctggacggcgagaagatcctgcacatcctgggcagcatcagagacagcgtggtggagatcctgttcgagcaggacaacgaggagcagagcgtggccaccctgatcctggacagcctgatccagtgctgcagctgctgccccggctggagcgccatggcctag

SEQ ID NO: 13435 - DNA, 378 bp, synthetic construct
  source 1..378: mol_type = other DNA; note = Synthetic coding sequence
atgagcagctgcgtgagcagccagcccagcagcaacagagccgccccccaggacgagctgggcggcagaggcagcagcagcagcgagagccagaagccctgcgaggccctgagaggcctgagcagcctgagcatccacctgggcatggagagcttcatcgtggtgaccgagtgcgagcccggctgcgccgtggacctgggcctggccagagacagacccctggaggccgacggccaggaggtgcccctggacaccagcggcagccaggccagaccccacctgagcggcagaaagctgagcctgcaggagagaagccagggcggcctggccgccggcggcagcctggacatgaacggcagatgcatctgccccagctag

SEQ ID NO: 13436 - DNA, 1161 bp, synthetic construct
  source 1..1161: mol_type = other DNA; note = Synthetic coding sequence
atggccgacagcctggagagcacccccctgcccagccccgaggacagactggccaagctgcaccccagcaaggagctgctggagtactaccagaagaagatggccgagtgcgaggccgagaacgaggacctgctgaagaagctggagctgtacaaggaggcctgcgagggccagcacaagctggagtgcgacctgcagcagagagaggaggagatcgccgagctgcagaaggccctgagcgacatgcaggtgtgcctgttccaggagagagagcacgtgctgagactgtacagcgagaacgacagactgagaatcagagagctggaggacaagaagaagatccagaacctgctggccctggtgggcaccgacgccggcgaggtgacctacttctgcaaggagcccccccacaaggtgaccatcctgcagaagaccatccaggccgtgggcgagtgcgagcagagcgagagcagcgccttcaaggccgaccccaagatcagcaagagaagacccagcagagagagaaaggagagcagcgagcactaccagagagacatccagaccctgatcctgcaggtggaggccctgcaggcccagctgggcgagcagaccaagctgagcagagagcagatcgagggcctgatcgaggacagaagaatccacctggaggagatccaggtgcagcaccagagaaaccagaacaagatcaaggagctgaccaagaacctgcaccacacccaggagctgctgtacgagagcaccaaggacttcctgcagctgagaagcgagaaccagaacaaggagaagagctggatgctggagaaggacaacctgatgagcaagatcaagcagtacagagtgcagtgcaagaagaaggaggacaagatcggcaaggtgctgcccgtgatgcacgagagccaccacgcccagagcgagtacatcaagagcctgaaggacaagctggtgcaggagaagaagctgagcaacatgtaccaggagcagtgcatcagcctggaggaggagctggccagaatcagagaggaggagggcatgagaagagagatcttcaaggacagaaccaacaagatgggcaagagactgcagatcatgaccaagagatacgaggccctggagagaagaagaatcctggaggtggagtag

SEQ ID NO: 13437 - DNA, 999 bp, synthetic construct; identical to SEQ ID NO: 13186
  source 1..999: mol_type = other DNA; note = Synthetic coding sequence

SEQ ID NO: 13438 - DNA, 1524 bp, synthetic construct
  source 1..1524: mol_type = other DNA; note = Synthetic coding sequence
atggaggaggtggagagacaggtgctgcccgaccccgaggtgctggaggccgtgggcgacagacaggacggcctgagagagcagctgcaggcccccgtgccccccgacagcgtgcccagcctgcagaacatgggcctgctgctggacaagctggccaaggagaaccaggacatcagactgctgcaggcccagctgcaggcccagaaggaggagctgcagagcctgatgcaccagcccaagggcctggaggaggagaacgcccagctgagaggcgccctgcagcagggcgaggccttccagagagccctggagagcgagctgcagcagctgagagccagactgcagggcctggaggccgactgcgtgagaggccccgacggcgtgtgcctgagcggcggcagaggcccccagggcgacaaggccatcagagagcagggccccagagagcaggagcccgagctgagcttcctgaagcagaaggagcagctggaggccgaggcccaggccctgagacaggagctggagagacagagaagactgctgggcagcgtgcagcaggacctggagagaagcctgcaggacgccagcagaggcgaccccgcccacgccggcctggccgagctgggccacagactggcccagaagctgcagggcctggagaactggggccaggaccccggcgtgagcgccaacgccagcaaggcctggcaccagaagagccacttccagaacagcagagagtggagcggcaaggagaagtggtgggacggccagagagacagaaaggccgagcactggaagcacaagaaggaggagagcggcagagagagaaagaagaactggggcggccaggaggacagagagcccgccggcagatggaaggagggcagacccagagtggaggagagcggcagcaagaaggagggcaagagacagggccccaaggagccccccagaaagagcggcagcttccacagcagcggcgagaagcagaagcagcccagatggagagagggcaccaaggacagccacgaccccctgcccagctgggccgagctgctgagacccaagtacagagccccccagggctgcagcggcgtggacgagtgcgccagacaggagggcctgaccttcttcggcaccgagctggcccccgtgagacagcaggagctggccagcctgctgagaacctacctggccagactgccctgggccggccagctgaccaaggagctgcccctgagccccgccttcttcggcgaggacggcatcttcagacacgacagactgagattcagagacttcgtggacgccctggaggacagcctggaggaggtggccgtgcagcagaccggcgacgacgacgaggtggacgacttcgaggacttcatcttcagccacttcttcggcgacaaggccctgaagaagagaagcggcaagaaggacaagcacagccagagccccagagccgccggccccagagagggccacagccacagccaccaccaccaccacagaggctag

SEQ ID NO: 13439 - DNA, 2472 bp, synthetic construct
  source 1..2472: mol_type = other DNA; note = Synthetic coding sequence
atgaccctgctgagcagccagagcagcagcctggtggcccccagcggcagcgtgagcgccgagaaccccgagcagagaatgctggagaagagagccaaggtgatcgaggagctgctgcagaccgagagagactacatcagagacctggagatgtgcatcgagagaatcatggtgcccatgcagcaggcccaggtgcccaacatcgacttcgagggcctgttcggcaacatgcagatggtgatcaaggtgagcaagcagctgctggccgccctggagatcagcgacgccgtgggccccgtgttcctgggccacagagacgagctggagggcacctacaagatctactgccagaaccacgacgaggccatcgccctgctggagatctacgagaaggacgagaagatccagaagcacctgcaggacagcctggccgacctgaagagcctgtacaacgagtggggctgcaccaactacatcaacctgggcagcttcctgatcaagcccgtgcagagagtgatgagataccccctgctgctgatggagctgctgaacagcacccccgagagccaccccgacaaggtgcccctgaccaacgccgtgctggccgtgaaggagatcaacgtgaacatcaacgagtacaagagaagaaaggacctggtgctgaagtacagaaagggcgacgaggacagcctgatggagaagatcagcaagctgaacatccacagcatcatcaagaagagcaacagagtgagcagccacctgaagcacctgaccggcttcgccccccagatcaaggacgaggtgttcgaggagaccgagaagaacttcagaatgcaggagagactgatcaagagcttcatcagagacctgagcctgtacctgcagcacatcagagagagcgcctgcgtgaaggtggtggccgccgtgagcatgtgggacgtgtgcatggagagaggccacagagacctggagcagttcgagagagtgcacagatacatcagcgaccagctgttcaccaacttcaaggagagaaccgagagactggtgatcagccccctgaaccagctgctgagcatgttcaccggcccccacaagctggtgcagaagagattcgacaagctgctggacttctacaactgcaccgagagagccgagaagctgaaggacaagaagaccctggaggagctgcagagcgccagaaacaactacgaggccctgaacgcccagctgctggacgagctgcccaagttccaccagtacgcccagggcctgttcaccaactgcgtgcacggctacgccgaggcccactgcgacttcgtgcaccaggccctggagcagctgaagcccctgctgagcctgctgaaggtggccggcagagagggcaacctgatcgccatcttccacgaggagcacagcagagtgctgcagcagctgcaggtgttcaccttcttccccgagagcctgcccgccaccaagaagcccttcgagagaaagaccatcgacagacagagcgccagaaagcccctgctgggcctgcccagctacatgctgcagagcgaggagctgagagccagcctgctggccagatacccccccgagaagctgttccaggccgagagaaacttcaacgccgcccaggacctggacgtgagcctgctggagggcgacctggtgggcgtgatcaagaagaaggaccccatgggcagccagaacagatggctgatcgacaacggcgtgaccaagggcttcgtgtacagcagcttcctgaagccctacaaccccagaagaagccacagcgacgccagcgtgggcagccacagcagcaccgagagcgagcacggcagcagcagccccagattccccagacagaacagcggcagcaccctgaccttcaaccccagcagcatggccgtgagcttcaccagcggcagctgccagaagcagccccaggacgccagccccccccccaaggagtgcgaccagggcaccctgagcgccagcctgaaccccagcaacagcgagagcagccccagcagatgccccagcgaccccgacagcaccagccagcccagaagcggcgacagcgccgacgtggccagagacgtgaagcagcccaccgccacccccagaagctacagaaacttcagacaccccgagatcgtgggctacagcgtgcccggcagaaacggccagagccaggacctggtgaagggctgcgccagaaccgcccaggcccccgaggacagaagcaccgagcccgacggcagcgaggccgagggcaaccaggtgtacttcgccgtgtacaccttcaaggccagaaaccccaacgagctgagcgtgagcgccaaccagaagctgaagatcctggagttcaaggacgtgaccggcaacaccgagtggtggctggccgaggtgaacggcaagaagggctacgtgcccagcaactacatcagaaagaccgagtacacctag

SEQ ID NO: 13440 - DNA, 492 bp, synthetic construct
  source 1..492: mol_type = other DNA; note = Synthetic coding sequence
tgagacaagttcagagccagccccgactgcatcaccatcctgtgcaagcccaacggccaggccatcgcctggtacacccccatccactggaagcaggcctgggagaagctggacgccgacgtggagttcaacagatgcagcgtggtgagccccaccttcagaaagagagtgttccagtggaccgccagcaccgccaccatcaccaaggagaagcaggaccagcccaagaaggacatcagcaactaccaggtggagcaggcccaggtgctgctgaagagagagaaggagatcccccccaccgtgttccccaacagaagcccctggtgccagaacccctacgtgagcgcccacccctactgccccctgatcgagccccacaacaccagcaccgccggcggcagactggacagacagcccagaaccagaagcaccagacccaacagagccagcggcagcaagaagaagaagaccagcgagagccagaagcagtag

SEQ ID NO: 13441 - DNA, 771 bp, synthetic construct; identical to SEQ ID NO: 10157
  source 1..771: mol_type = other DNA; note = Synthetic coding sequence

SEQ ID NO: 13442 - DNA, 2793 bp, synthetic construct
  source 1..2793: mol_type = other DNA; note = Synthetic coding sequence
atgagcgagttcagaatccaccacgacgtgaacgagctgctgagcctgctgagagtgcacggcggcgacggcgccgaggtgtacatcgacctgctgcagaagaacagaaccccctacgtgaccaccaccgtgagcgcccacagcgccaaggtgaagatcgccgagttcagcagaacccccgaggacttcctgaagaagtacgacgagctgaagagcaagaacaccagaaacctggaccccctggtgtacctgctgagcaagctgaccgaggacaaggagaccctgcagtacctgcagcagaacgccaaggagagagccgagctggccgccgccgccgtgggcagcagcaccaccagcatcaacgtgcccgccgccgccagcaagatcagcatgcaggagctggaggagctgagaaagcagctgggcagcgtggccaccggcagcaccctgcagcagagcctggagctgaagagaaagatgctgagagacaagcagaacaagaagaacagcggccagcacctgcccatcttccccgcctgggtgtacgagagacccgccctgatcggcgacttcctgatcggcgccggcatcagcaccgacaccgccctgcccatcgtgctgctgagatggaacctggccctgagccccagactgaagtgcagcggcgtgatcagcgcccactgcaacctgcacctgcccggcaccctgcccctggccagccaggagagcgccgtggtggaggacctgctgtacgtgctggtgggcgtggacggcagatacgtgagcgcccagcccctggccggcagacagagcagaaccttcctggtggaccccaacctggacctgagcatcagagagctggtgcacagaatcctgcccgtggccgccagctacagcgccgtgaccagattcatcgaggagaagagcagcttcgagtacggccaggtgaaccacgccctggccgccgccatgagaaccctggtgaaggagcacctgatcctggtgagccagctggagcagctgcacagacagggcctgctgagcctgcagaagctgtggttctacatccagcccgccatgagaaccatggacatcctggccagcctggccaccagcgtggacaagggcgagtgcctgggcggcagcaccctgagcctgctgcacgacagaagcttcagctacaccggcgacagccaggcccaggagctgtgcctgtacctgaccaaggccgccagcgccccctacttcgaggtgctggagaagtggatctacagaggcatcatccacgacccctacagcgagttcatggtggaggagcacgagctgagaaaggagagaatccaggaggactacaacgacaagtactgggaccagagatacaccatcgtgcagcagcagatccccagcttcctgcagaagatggccgacaagatcctgagcaccggcaagtacctgaacgtggtgagagagtgcggccacgacgtgacctgccccgtggccaaggagatcatctacaccctgaaggagagagcctacgtggagcagatcgagaaggccttcaactacgccagcaaggtgctgctggacttcctgatggaggagaaggagctggtggcccacctgagaagcatcaagagatacttcctgatggaccagggcgacttcttcgtgcacttcatggacctggccgaggaggagctgagaaagcccgtggaggacatcaccccccccagactggaggccctgctggagctggccctgagaatgagcaccgccaacaccgaccccttcaaggacgacctgaagatcgacctgatgccccacgacctgatcacccagctgctgagagtgctggccatcgagaccaagcaggagaaggccatggcccacgccgaccccaccgagctggccctgagcggcctggaggccttcagcttcgactacatcgtgaagtggcccctgagcctgatcatcaacagaaaggccctgaccagataccagatgctgttcagacacatgttctactgcaagcacgtggagagacagctgtgcagcgtgtggatcagcaacaagaccgccaagcagcacagcctgcacagcgcccagtggttcgccggcgccttcaccctgagacagagaatgctgaacttcgtgcagaacatccagtactacatgatgttcgaggtgatggagcccacctggcacatcctggagaagaacctgaagagcgccagcaacatcgacgacgtgctgggccaccacaccggcttcctggacacctgcctgaaggactgcatgctgaccaaccccgagctgctgaaggtgttcagcaagctgatgagcgtgtgcgtgatgttcaccaactgcatgcagaagttcacccagagcatgaagctggacggcgagctgggcggccagaccctggagcacagcaccgtgctgggcctgcccgccggcgccgaggagagagccagaaaggagctggccagaaagcacctggccgagcacgccgacaccgtgcagctggtgagcggcttcgaggccaccatcaacaagttcgacaagaacttcagcgcccacctgctggacctgctggccagactgagcatctacagcaccagcgactgcgagcacggcatggccagcgtgatcagcagactggacttcaacggcttctacaccgagagactggagagactgagcgccgagagaagccagaaggccaccccccaggtgcccgtgctgagaggcccccccgcccccgcccccagagtggccgtgaccgcccagtag

SEQ ID NO: 13443 - DNA, 129 bp, synthetic construct
  source 1..129: mol_type = other DNA; note = Synthetic coding sequence
atgtgcctgctgcccatcagagtgaaggaggccgaggaggtgtgcagacagaagaagggcaagagcctgtacaagatcaagcccagacacgacagcggcatcaaggccaagatcagcatgaagacctag

SEQ ID NO: 13444 - DNA, 456 bp, synthetic construct
  source 1..456: mol_type = other DNA; note = Synthetic coding sequence
atggactgcagagagatggacctgtacgaggactaccagagccccttcgacttcgacgccggcgtgaacaagagctacctgtacctgagccccagcggcaacagcagcccccccggcagccccaccctgcagaagttcggcctgctgagaaccgaccccgtgcccgaggagggcgaggacgtggccgccaccatcagcgccaccgagaccctgagcgaggaggagcaggaggagctgagaagagagctggccaaggtggaggaggagatccagaccctgagccaggtgctggccgccaaggagaagcacctggccgagatcaagagaaagctgggcatcaacagcctgcaggagctgaagcagaacatcgccaagggctggcaggacgtgaccgccaccagcgccagaagcaagctgctggccgccgagaccgagctgctgtgcctgctgtactag

SEQ ID NO: 13445 - DNA, 627 bp, synthetic construct; identical to SEQ ID NO: 9606
  source 1..627: mol_type = other DNA; note = Synthetic coding sequence

SEQ ID NO: 13446 - DNA, 1575 bp, synthetic construct
  source 1..1575: mol_type = other DNA; note = Synthetic coding sequence
atgaagagaagcagcgtgagcagcggcggcgccggcagactgagcatgcaggagctgagaagccaggacgtgaacaagcagggcctgtacaccccccagaccaaggagaagcccaccttcggcaagctgagcatcaacaagcccaccagcgagagaaaggtgagcctgttcggcaagagaaccagcggccacggcagcagaaacagccagctgggcatcttcagcagcagcgagaagatcaaggaccccagacccctgaacgacaaggccttcatccagcagtgcatcagacagctgtgcgagttcctgaccgagaacggctacgcccacaacgtgagcatgaagagcctgcaggcccccagcgtgaaggacttcctgaagatcttcaccttcctgtacggcttcctgtgccccagctacgagctgcccgacaccaagttcgaggaggaggtgcccagaatcttcaaggacctgggctaccccttcgccctgagcaagagcagcatgtacaccgtgggcgccccccacacctggccccacatcgtggccgccctggtgtggctgatcgactgcatcaagatccacaccgccatgaaggagagcagccccctgttcgacgacggccagccctggggcgaggagaccgaggacggcatcatgcacaacaagctgttcctggactacaccatcaagtgctacgagagcttcatgagcggcgccgacagcttcgacgagatgaacgccgagctgcagagcaagctgaaggacctgttcaacgtggacgccttcaagctggagagcctggaggccaagaacagagccctgaacgagcagatcgccagactggagcaggagagagagaaggagcccaacagactggagagcctgagaaagctgaaggccagcctgcagggcgacgtgcagaagtaccaggcctacatgagcaacctggagagccacagcgccatcctggaccagaagctgaacggcctgaacgaggagatcgccagagtggagctggagtgcgagaccatcaagcaggagaacaccagactgcagaacatcatcgacaaccagaagtacagcgtggccgacatcgagagaatcaaccacgagagaaacgagctgcagcagaccatcaacaagctgaccaaggacctggaggccgagcagcagaagctgtggaacgaggagctgaagtacgccagaggcaaggaggccatcgagacccagctggccgagtaccacaagctggccagaaagctgaagctgatccccaagggcgccgagaacagcaagggctacgacttcgagatcaagttcaaccccgaggccggcgccaactgcctggtgaagtacagagcccaggtgtacgtgcccctgaaggagctgctgaacgagaccgaggaggagatcaacaaggccctgaacaagaagatgggcctggaggacaccctggagcagctgaacgccatgatcaccgagagcaagagaagcgtgagaaccctgaaggaggaggtgcagaagctggacgacctgtaccagcagaagatcaagaaggagagaaagaagtag

SEQ ID NO: 13447 - DNA, 1248 bp, synthetic construct; identical to SEQ ID NO: 10184
  source 1..1248: mol_type = other DNA; note = Synthetic coding sequence

SEQ ID NO: 13448 - DNA, 1512 bp, synthetic construct
  source 1..1512: mol_type = other DNA; note = Synthetic coding sequence
atggccagcaaccacaagagcagcgccgccagacccgtgagcagaggcggcgtgggcctgaccggcagaccccccagcggcatcagacccctgagcggcaacatcagagtggccaccgccatgccccccggcaccgccagacccggcagcagaggctgccccatcggcaccggcggcgtgctgagcagccagatcaaggtggcccacagacccgtgacccagcagggcctgaccggcatgaagaccggcaccaagggcccccagagacagatcctggacaagagctactacctgggcctgctgagaagcaagatcagcgagctgaccaccgaggtgaacaagctgcagaagggcatcgagatgtacaaccaggagaacagcgtgtacctgagctacgagaagagagccgagaccctggccgtggagatcaaggagctgcagggccagctggccgactacaacatgctggtggacaagctgaacaccaacaccgagatggaggaggtgatgaacgactacaacatgctgaaggcccagaacgacagagagacccagagcctggacgtgatcttcaccgagagacaggccaaggagaagcagatcagaagcgtggaggaggagatcgagcaggagaagcaggccaccgacgacatcatcaagaacatgagcttcgagaaccaggtgaagtacctggagatgaagaccaccaacgagaagctgctgcaggagctggacaccctgcagcagcagctggacagccagaacatgaagaaggagagcctggaggccgagatcgcccacagccaggtgaagcaggaggccgtgctgctgcacgagaagctgtacgagctggagagccacagagaccagatgatcgccgaggacaagagcatcggcagccccatggaggagagagagaagctgctgaagcagatcaaggacgacaaccaggagatcgccagcatggagagacagctgaccgacaccaaggagaagatcaaccagttcatcgaggagatcagacagctggacatggacctggaggagcaccagggcgagatgaaccagaagtacaaggagctgaagaagagagaggagcacatggacaccttcatcgagaccttcgaggagaccaagaaccaggagctgaagagaaaggcccagatcgaggccaacatcgtggccctgctggagcactgcagcagaaacatcaacagaatcgagcagatcagcagcatcaccaaccaggagctgaagatgatgcaggacgacctgaacttcaagagcaccgaggtgcagaagagccagagcaccgcccagaacctgaccagcgacatccagagactgcagctggacctgcagaagatggagctgctggagagcaagatgaccgaggagcagcacagcctgaagagcaagatcaagcagatgaccaccgacctggagatctacaacgacctgcccgccctgaagagcagcggcgagaagaagaagaagaagaagaagaagtag

SEQ ID NO: 13449 - DNA, 1461 bp, synthetic construct; identical to SEQ ID NO: 9652
  source 1..1461: mol_type = other DNA; note = Synthetic coding sequence

SEQ ID NO: 13450 - DNA, 1011 bp, synthetic construct
  source 1..1011: mol_type = other DNA; note = Synthetic coding sequence
atgtgcaccatgcacaaggacgagaaggccaagagagaggtgagcagctggaccgtggagggcgacatcaacaccgacccctgggccggctacagatacaccggcaagctgagaccccactaccccctgatgcccaccagacccgtgcccagctacatccagagacccgactacgccgaccaccccctgggcatgagcgagagcgagcaggccctgaagggcaccagccagatcaagctgctgagcagcgaggacatcgagggcatgagactggtgtgcagactggccagagaggtgctggacgtggccgccggcatgatcaagcccggcgtgaccaccgaggagatcgaccacgccgtgcacctggcctgcatcgccagaaactgctaccccagccccctgaactactacaacttccccaagagctgctgcaccagcgtgaacgaggtgatctgccacggcatccccgacagaagacccctgcaggagggcgacatcgtgaacgtggacatcaccctgtacagaaacggctaccacggcgacctgaacgagaccttcttcgtgggcgaggtggacgacggcgccagaaagctggtgcagaccacctacgagtgcctgatgcaggccatcgacgccgtgaagcccggcgtgagatacagagagctgggcaacatcatccagaagcacgcccaggccaacggcttcagcgtggtgagaagctactgcggccacggcatccacaagctgttccacaccgcccccaacgtgccccactacgccaagaacaaggccgtgggcgtgatgaagagcggccacgtgttcaccatcgagcccatgatctgcgagggcggctggcaggacgagacctggcccgacggctggaccgccgtgaccagagacggcaagagaagcgcccagttcgagcacaccctgctggtgaccgacaccggctgcgagatcctgaccagaagactggacagcgccagaccccacttcatgagccagttctag

SEQ ID NO: 13451 - DNA, 3102 bp, synthetic construct
  source 1..3102: mol_type = other DNA; note = Synthetic coding sequence
atggccggcatgatcgacagattcagccccgccaacaccggcatcagaagctgggacgtggaccccggcgtgtgcaacctggacgagcagctgaaggtgttcgtgagcagacacagcgccaccttcagcagcatcgtgaagggccagagaagcctgcaccacagaggcgacaacctggagaccctggtgctgctgaaccccagcgacaagagcctgtacgacgagctgagaaacctgctgctggaccccgccagccacaagctgctggtgctggccggcccctgcctggaggagaccggcgagctgctgctgcagaccggcggcttcagcccccaccacttcctgcaggtgctgaaggacagagagatcagagacatcctggccaccacccccccccccgtgcagccccccatcctgaccatcacctgccccaccttcggcgactgggcccagctggcccccgccgtgcccggcctgcagggcgccctgagactgcagctgagactgaacccccccgcccagctgcccaacagcgagggcctgtgcgagttcctggagtacgtggccgagagcctggagccccccagccccttcgagctgctggagccccccaccagcggcggcttcctgagactgggcagaccctgctgctacatcttccccggcggcctgggcgacgccgccttcttcgccgtgaacggcttcaccgtgctggtgaacggcggcagcaaccccaagagcagcttctggaagctggtgagacacctggacagagtggacgccgtgctggtgacccaccccggcgccgacagcctgcccggcctgaacagcctgctgagaagaaagctggccgagagaagcgaggtggccgccggcggcggcagctgggacgacagactgagaagactgatcagccccaacctgggcgtggtgttcttcaacgcctgcgaggccgccagcagactggccagaggcgaggacgaggccgagctggccctgagcctgctggcccagctgggcatcacccccctgcccctgagcagaggccccgtgcccgccaagcccaccgtgctgttcgagaagatgggcgtgggcagactggacatgtacgtgctgcacccccccagcgccggcgccgagagaaccctggccagcgtgtgcgccctgctggtgtggcaccccgccggccccggcgagaaggtggtgagagtgctgttccccggctgcaccccccccgcctgcctgctggacggcctggtgagactgcagcacctgagattcctgagagagcccgtggtgaccccccaggacctggagggccccggcagagccgagagcaaggagagcgtgggcagcagagacagcagcaagagagagggcctgctggccacccaccccagacccggccaggagagacccggcgtggccagaaaggagcccgccagagccgaggcccccagaaagaccgagaaggaggccaagacccccagagagctgaagaaggaccccaagcccagcgtgagcagaacccagcccagagaggtgagaagagccgccagcagcgtgcccaacctgaagaagaccaacgcccaggccgcccccaagcccagaaaggcccccagcaccagccacagcggcttcccccccgtggccaacggccccagaagcccccccagcctgagatgcggcgaggccagcccccccagcgccgcctgcggcagccccgccagccagctggtggccacccccagcctggagctgggccccatccccgccggcgaggagaaggccctggagctgcccctggccgccagcagcatccccagacccagaacccccagccccgagagccacagaagccccgccgagggcagcgagagactgagcctgagccccctgagaggcggcgaggccggccccgacgccagccccaccgtgaccacccccaccgtgaccacccccagcctgcccgccgaggtgggcagcccccacagcaccgaggtggacgagagcctgagcgtgagcttcgagcaggtgctgccccccagcgcccccaccagcgaggccggcctgagcctgcccctgagaggccccagagccagaagaagcgccagcccccacgacgtggacctgtgcctggtgagcccctgcgagttcgagcacagaaaggccgtgcccatggcccccgcccccgccagccccggcagcagcaacgacagcagcgccagaagccaggagagagccggcggcctgggcgccgaggagaccccccccaccagcgtgagcgagagcctgcccaccctgagcgacagcgaccccgtgcccctggcccccggcgccgccgacagcgacgaggacaccgagggcttcggcgtgcccagacacgaccccctgcccgaccccctgaaggtgcccccccccctgcccgaccccagcagcatctgcatggtggaccccgagatgctgccccccaagaccgccagacagaccgagaacgtgagcagaaccagaaagcccctggccagacccaacagcagagccgccgcccccaaggccacccccgtggccgccgccaagaccaagggcctggccggcggcgacagagccagcagacccctgagcgccagaagcgagcccagcgagaagggcggcagagcccccctgagcagaaagagcagcacccccaagaccgccaccagaggccccagcggcagcgccagcagcagacccggcgtgagcgccaccccccccaagagccccgtgtacctggacctggcctacctgcccagcggcagcagcgcccacctggtggacgaggagttcttccagagagtgagagccctgtgctacgtgatcagcggccaggaccagagaaaggaggagggcatgagagccgtgctggacgccctgctggccagcaagcagcactgggacagagacctgcaggtgaccctgatccccaccttcgacagcgtggccatgcacacctggtacgccgagacccacgccagacaccaggccctgggcatcaccgtgctgggcagcaacagcatggtgagcatgcaggacgacgccttccccgcctgcaaggtggagttctag

SEQ ID NO: 13452 - DNA, 2223 bp, synthetic construct
  source 1..2223: mol_type = other DNA; note = Synthetic coding sequence
atgagagacctggagggctacagagagaccagataccagctgctgcagctgagacccgcccagagagccagctggatcggctacgccatcgcctaccacctgctggaggactacgagatggccgccaagatcctggaggagttcagaaagacccagcagaccagccccgacaaggtggactacgagtacagcgagctgctgctgtaccagaaccaggtgctgagagaggccggcctgtacagagaggccctggagcacctgtgcacctacgagaagcagatctgcgacaagctggccgtggaggagaccaagggcgagctgctgctgcagctgtgcagactggaggacgccgccgacgtgtacagaggcctgcaggagagaaaccccgagaactgggcctactacaagggcctggagaaggccctgaagcccgccaacatgctggagagactgaagatctacgaggaggcctggaccaagtaccccagaggcctggtgcccagaagactgcccctgaacttcctgagcggcgagaagttcaaggagtgcctggacaagttcctgagaatgaacttcagcaagggctgcccccccgtgttcaacaccctgagaagcctgtacaaggacaaggagaaggtggccatcatcgaggagctggtggtgggctacgagaccagcctgaagagctgcagactgttcaaccccaacgacgacggcaaggaggagccccccaccaccctgctgtgggtgcagtactacctggcccagcactacgacaagatcggccagcccagcatcgccctggagtacatcaacaccgccatcgagagcacccccaccctgatcgagctgttcctggtgaaggccaagatctacaagcacgccggcaacatcaaggaggccgccagatggatggacgaggcccaggccctggacaccgccgacagattcatcaacagcaagtgcgccaagtacatgctgaaggccaacctgatcaaggaggccgaggagatgtgcagcaagttcaccagagagggcaccagcgccgtggagaacctgaacgagatgcagtgcatgtggttccagaccgagtgcgcccaggcctacaaggccatgaacaagttcggcgaggccctgaagaagtgccacgagatcgagagacacttcatcgagatcaccgacgaccagttcgacttccacacctactgcatgagaaagatcaccctgagaagctacgtggacctgctgaagctggaggacgtgctgagacagcaccccttctacttcaaggccgccagaatcgccatcgagatctacctgaagctgcacgacaaccccctgaccgacgagaacaaggagcacgaggccgacaccgccaacatgagcgacaaggagctgaagaagctgagaaacaagcagagaagagcccagaagaaggcccagatcgaggaggagaagaagaacgccgagaaggagaagcagcagagaaaccagaagaagaagaaggacgacgacgacgaggagatcggcggccccaaggaggagctgatccccgagaagctggccaaggtggagacccccctggaggaggccatcaagttcctgacccccctgaagaacctggtgaagaacaagatcgagacccacctgttcgccttcgagatctacttcagaaaggagaagttcctgctgatgctgcagagcgtgaagagagccttcgccatcgacagcagccacccctggctgcacgagtgcatgatcagactgttcaacaccgccgtgtgcgagagcaaggacctgagcgacaccgtgagaaccgtgctgaagcaggagatgaacagactgttcggcgccaccaaccccaagaacttcaacgagaccttcctgaagagaaacagcgacagcctgccccacagactgagcgccgccaagatggtgtactacctggaccccagcagccagaagagagccatcgagctggccaccaccctggacgagagcctgaccaacagaaacctgcagacctgcatggaggtgctggaggccctgtacgacggcagcctgggcgactgcaaggaggccgccgagatctacagagccaactgccacaagctgttcccctacgccctggccttcatgccccccggctacgaggaggacatgaagatcaccgtgaacggcgacagcagcgccgaggccgaggagctggccaacgagatctag

SEQ ID NO: 13453 - DNA, 183 bp, synthetic construct
  source 1..183: mol_type = other DNA; note = Synthetic coding sequence
atgagctgcaccatcgagaaggccctggccgacgccaaggccctggtggagagactgagagaccacgacgacgccgccgagagcctgatcgagcagaccaccgccctgaacaagagagtggaggccatgaagcagtaccaggaggagatccaggagctgaacgaggtggccagacacagatag

SEQ ID NO: 13454 - DNA, 1419 bp, synthetic construct
  source 1..1419: mol_type = other DNA; note = Synthetic coding sequence
atgggcaaggagcaggagctgctggaggccgccagaaccggccacctgcccgccgtggagaagctgctgagcggcaagagactgagcagcggcttcggcggcggcggcggcggcggcagcggcggcggcggcggcggcagcggcggcggcggcggcggcctgggcagcagcagccaccccctgagcagcctgctgagcatgtggagaggccccaacgtgaactgcgtggacagcaccggctacacccccctgcaccacgccgccctgaacggccacaaggacgtggtggaggtgctgctgagaaacgacgccctgaccaacgtggccgacagcaagggctgctaccccctgcacctggccgcctggaagggcgacgcccagatcgtgagactgctgatccaccagggccccagccacaccagagtgaacgagcagaacaacgacaacgagaccgccctgcactgcgccgcccagtacggccacaccgaggtggtgaaggtgctgctggaggagctgaccgaccccaccatgagaaacaacaagttcgagacccccctggacctggccgccctgtacggcagactggaggtggtgaagatgctgctgaacgcccaccccaacctgctgagctgcaacaccaagaagcacacccccctgcacctggccgccagaaacggccacaaggccgtggtgcaggtgctgctggacgccggcatggacagcaactaccagaccgagatgggcagcgccctgcacgaggccgccctgttcggcaagaccgacgtggtgcagatcctgctggccgccggcaccgacgtgaacatcaaggacaaccacggcctgaccgccctggacaccgtgagagagctgcccagccagaagagccagcagatcgccgccctgatcgaggaccacatgaccggcaagagaagcaccaaggaggtggacaagaccccccccccccagccccccctgatcagcagcatggacagcatcagccagaagagccagggcgacgtggagaaggccgtgaccgagctgatcatcgacttcgacgccaacgccgaggaggagggcccctacgaggccctgtacaacgccatcagctgccacagcctggacagcatggccagcggcagaagcagcgaccaggacagcaccaacaaggaggccgaggccgccggcgtgaagcccgccggcgtgagacccagagagagaccccccccccccgccaagcccccccccgacgaggaggaggaggaccacatcgacaagaagtacttccccctgaccgccagcgaggtgctgagcatgagacccagaatccacggcagcgccgccagagaggaggacgagcacccctacgagctgctgctgaccgccgagaccaagaagaagaagaagaagaagaagaagtag

SEQ ID NO: 13455 - DNA, 1392 bp, synthetic construct
  source 1..1392: mol_type = other DNA; note = Synthetic coding sequence
atgagcggcggcaccccctacatcggcagcaagatcagcctgatcagcaaggccgagatcagatacgagggcatcctgtacaccatcgacaccgagaacagcaccgtggccctggccaaggtgagaagcttcggcaccgaggacagacccaccgacagacccatcccccccagagacgaggtgttcgagtacatcatcttcagaggcagcgacatcaaggacctgaccgtgtgcgagccccccaagccccagtgcagcctgccccaggaccccgccatcgtgcagagcagcctgggcagcagcaccagcagcttccagagcatgggcagctacggccccttcggcagaatgcccacctacagccagttcagccccagcagcctggtgggccagcagttcggcgccgtgggcgtggccggcagcagcctgaccagcttcggcaccgagaccagcaacagcggcaccctgccccagagcagcgccgtgggcagcgccttcacccaggacaccagaagcctgaagacccagctgagccagggcagaagcagcccccagctggaccccctgagaaagagccccaccatggagcaggccgtgcagaccgccagcgcccacctgcccgcccccgccgccgtgggcagaagaagccccgtgagcaccagacccctgcccagcgccagccagaaggccggcgagaaccaggagcacagaagagccgaggtgcacaaggtgagcagacccgagaacgagcagctgagaaacgacaacaagagacaggtggcccccggcgcccccagcgcccccagaagaggcagaggcggccacagaggcggcagaggcagattcggcatcagaagagacggccccatgaagttcgagaaggacttcgacttcgagagcgccaacgcccagttcaacaaggaggagatcgacagagagttccacaacaagctgaagctgaaggaggacaagctggagaagcaggagaagcccgtgaacggcgaggacaagggcgacagcggcgtggacacccagaacagcgagggcaacgccgacgaggaggaccccctgggccccaactgctactacgacaagaccaagagcttcttcgacaacatcagctgcgacgacaacagagagagaagacccacctgggccgaggagagaagactgaacgccgagaccttcggcatccccctgagacccaacagaggcagaggcggctacagaggcagaggcggcctgggcttcagaggcggcagaggcagaggcggcggcagaggcggcaccttcaccgcccccagaggcttcagaggcggcttcagaggcggcagaggcggcagagagttcgccgacttcgagtacagaaaggacaacaaggtggccgcctag

SEQ ID NO: 13456 - DNA, 1287 bp, synthetic construct
  source 1..1287: mol_type = other DNA; note = Synthetic coding sequence
atgggcggcggcgtgggcgccagcagcagcggcggcggccccggcggcagcggcggcggcggcagcggcggccccggcgccggcaccagcttccccccccccggcgtgaagctgggcagagacagcggcaaggtgaccaccgtggtggccaccctgggccagggccccgagagaagccaggaggtggcctacaccgacatcaaggtgatcggcaacggcagcttcggcgtggtgtaccaggccagactggccgagaccagagagctggtggccatcaagaaggtgctgcaggacaagagattcaagaacagagagctgcagatcatgagaaagctggaccactgcaacatcgtgagactgagatacttcttctacagcagcggcgagaagaaggacgagctgtacctgaacctggtgctggagtacgtgcccgagaccgtgtacagagtggccagacacttcaccaaggccaagctgaccatccccatcctgtacgtgaaggtgtacatgtaccagctgttcagaagcctggcctacatccacagccagggcgtgtgccacagagacatcaagccccagaacctgctggtggaccccgacaccgccgtgctgaagctgtgcgacttcggcagcgccaagcagctggtgagaggcgagcccaacgtgagctacatctgcagcagatactacagagcccccgagctgatcttcggcgccaccgactacaccagcagcatcgacgtgtggagcgccggctgcgtgctggccgagctgctgctgggccagcccatcttccccggcgacagcggcgtggaccagctggtggagatcatcaaggtgctgggcacccccaccagagagcagatcagagagatgaaccccaactacaccgagttcaagttcccccagatcaaggcccacccctggaccaaggtgttcaagagcagaaccccccccgaggccatcgccctgtgcagcagcctgctggagtacacccccagcagcagactgagccccctggaggcctgcgcccacagcttcttcgacgagctgagatgcctgggcacccagctgcccaacaacagacccctgccccccctgttcaacttcagcgccggcgagctgagcatccagcccagcctgaacgccatcctgatccccccccacctgagaagccccgccggcaccaccaccctgacccccagcagccaggccctgaccgagacccccaccagcagcgactggcagagcaccgacgccacccccaccctgaccaacagcagctag

SEQ ID NO: 13457 - DNA, 657 bp, synthetic construct
  source 1..657: mol_type = other DNA; note = Synthetic coding sequence
atggacgccgagcaccccgagctgagaagctacgcccagagccagggctggtggaccggcgagggcgagttcaacttcagcgaggtgttcagccccgtggaggaccacctggactgcggcgccggcaaggacagcctggagaagcaggaggagagcatcaccgtgcagaccatgatgaacaccctgagagacaaggccagcggcgtgtgcatcgacagcgagttcttcctgaccaccgccagcggcgtgagcgtgctgccccagaacagaagcagcccctgcatccactacttcaccggcacccccgaccccagcagaagcatcttcaagcccttcatcttcgtggacgacgtgaagctggtgcccaagacccagagcccctgcttcggcgacgacgaccccgccaagaaggagcccagattccaggagaagcccgacagaagacacgagctgtacaaggcccacgagtgggccagagccatcatcgagagcgaccaggagcagggcagaaagctgagaagcaccatgctggagctggagaagcagggcctggaggccatggaggagatcctgaccagcagcgagcccctggaccccgccgaggtgggcgacctgttctacgactgcgtggacaccgagatcaagttcttcaagtag

SEQ ID NO: 13458 - DNA, 573 bp, synthetic construct
  source 1..573: mol_type = other DNA; note = Synthetic coding sequence
atggccctgctggccgagcacctgctgaagcccctgcccgccgacaagcagatcgagaccggccccttcctggaggccgtgagccacctgccccccttcttcgactgcctgggcagccccgtgttcacccccatcaaggccgacatcagcggcaacatcaccaagatcaaggccgtgtacgacaccaaccccgccaagttcagaaccctgcagaacatcctggaggtggagaaggagatcggcctgagattcatccaggtgttcctgcagagcatctgcgacggcgagagagacgagaaccaccccaacctgatcagagtgaacgccaccaaggcctacgagatggccctgaagaagtaccacggctggatcgtgcagaagatcttccaggccgccctgtacgccgccccctacaagagcgacttcctgaaggccctgagcaagggccagaacgtgaccgaggaggagtgcctggagaagatcagactgttcctggtgaactacaccgccaccatcgacgtgatctacgagatgtacacccagatgaacgccgagctgaactacaaggtgtag

SEQ ID NO: 13459 - DNA, 762 bp, synthetic construct
  source 1..762: mol_type = other DNA; note = Synthetic coding sequence
atgagcatctgcagcagcctggccagaaagttccccaagctgaccatcatcggcgaggaggacctgcccagcgaggaggtggaccaggagctgatcgaggacagccagtgggaggagatcctgaagcagccctgccccagccagtacagcgccatcaaggaggaggacctggtggtgtgggtggaccccctggacggcaccaaggagtacaccgagggcctgctggacaacgtgaccgtgctgatcggcatcgcctacgagggcaaggccatcgccggcgtgatcaaccagccctactacaactacgaggccggccccgacgccgtgctgggcagaaccatctggggcgtgctgggcctgggcgccttcggcttccagctgaaggaggtgcccgccggcaagcacatcatcaccaccaccagaagccacagcaacaagctggtgaccgactgcgtggccgccatgaaccccgacgccgtgctgagagtgggcggcgccggcaacaagatcatccagctgatcgagggcaaggccagcgcctacgtgttcgccagccccggctgcaagaagtgggacacctgcgcccccgaggtgatcctgcacgccgtgggcggcaagctgaccgacatccacggcaacgtgctgcagtaccacaaggacgtgaagcacatgaacagcgccggcgtgctggccaccctgagaaactacgactactacgccagcagagtgcccgagagcatcaagaacgccctggtgccctag

SEQ ID NO: 13460 - DNA, 1590 bp, synthetic construct
  source 1..1590: mol_type = other DNA; note = Synthetic coding sequence
atgggcgcctacctgagccagcccaacaccgtgaagtgcagcggcgacggcgtgggcgtgagcatggaggacgcccacaactgcatccccgagctggacagcgagaccgccatgttcagcgtgtacgacggccacggcggcgaggaggtggccctgtactgcgccaagtacctgcccgacatcatcaaggaccagaaggcctacaaggagggcaagctgcagaaggccctggaggacgccttcctggccatcgacgccaagctgaccaccgaggaggtgatcaaggagctggcccagatcgccggcagacccaccgaggacgaggacgagaaggagaaggtggccgacgaggacgacgtggacaacgaggaggccgccctgctgcacgaggaggccaccatgaccatcgaggagctgctgaccagatacggccagaactgccacaagggccccccccacagcaagagcggcggcggcaccggcgaggagcccggcagccagggcctgaacggcgaggccggccccgaggacagcaccagagagacccccagccaggagaacggccccaccgccaaggcctacaccggcttcagcagcaacagcgagagaggcaccgaggccggccaggtgggcgagcccggcatccccaccggcgaggccggccccagctgcagcagcgccagcgacaagctgcccagagtggccaagagcaagttcttcgaggacagcgaggacgagagcgacgaggccgaggaggaggaggaggacagcgaggagtgcagcgaggaggaggacggctacagcagcgaggaggccgagaacgaggaggacgaggacgacaccgaggaggccgaggaggacgacgaggaggaggaggaggagatgatggtgcccggcatggagggcaaggaggagcccggcagcgacagcggcaccaccgccgtggtggccctgatcagaggcaagcagctgatcgtggccaacgccggcgacagcagatgcgtggtgagcgaggccggcaaggccctggacatgagctacgaccacaagcccgaggacgaggtggagctggccagaatcaagaacgccggcggcaaggtgaccatggacggcagagtgaacggcggcctgaacctgagcagagccatcggcgaccacttctacaagagaaacaagaacctgccccccgaggagcagatgatcagcgccctgcccgacatcaaggtgctgaccctgaccgacgaccacgagttcatggtgatcgcctgcgacggcatctggaacgtgatgagcagccaggaggtggtggacttcatccagagcaagatcagccagagagacgagaacggcgagctgagactgctgagcagcatcgtggaggagctgctggaccagtgcctggcccccgacaccagcggcgacggcaccggctgcgacaacatgacctgcatcatcatctgcttcaagcccagaaacaccgccgagctgcagcccgagagcggcaagagaaagctggaggaggtgctgagcaccgagggcgccgaggagaacggcaacagcgacaagaagaagaaggccaagagagactag

SEQ ID NO: 13461 - DNA, 1293 bp, synthetic construct
  source 1..1293: mol_type = other DNA; note = Synthetic coding sequence
atgaccttcgagctgtacgacgagtggatccaggccagcaacgtgcaggagcaggacaagaagctgcaggccctgtggaacgcctgcgagaagctgcccaaggccaaccacaacaacatcagatacctgatcaagttcctgagcaagctgagcgagtaccaggacgtgaacaagatgacccccagcaacatggccatcgtgctgggccccaacctgctgtggccccaggccgagggcaacatcaccgagatgatgaccaccgtgagcctgcagatcgtgggcatcatcgagcccatcatccagcacgccgactggttcttccccggcgagatcgagttcaacatcaccggcaactacggcagccccgtgcacgtgaaccacaacgccaactacagcagcatgcccagccccgacatggaccccgccgacagaagacagcccgagcaggccagaagacccctgagcgtggccaccgacaacatgatgctggagttctacaagaaggacggcatgggcgtgagagtgatggacaccaactgggtggccagaagaggcagcagcgccggcagaaaggtgagctgcgccccccccagcatgcagccccccgccccccccgccgagctggccgcccccctgcccagccccctgcccgagcagcccctggacagccccgccgcccccgccctgagccccagcggcctgggcctgcagcccggccccgagagaaccagcaccaccaagagcaaggagctgagccccggcagcgcccagaagggcagccccggcagcagccagggcaccgcctgcgccggcacccagcccggcgcccagcccggcgcccagcccggcgccagccccagccccagccagccccccgccgaccagagcccccacaccctgagaaaggtgagcaagaagctggcccccatcccccccaaggtgcccttcggccagcccggcgccatggccgaccagagcgccggccagcccagccccgtgagcctgagccccaccccccccagcacccccagcccctacggcctgagctacccccagggctacagcctggccagcggccagctgagccccgccgccgccccccccctggccagccccagcgtgttcaccagcaccctgagcaagagcagacccacccccaagcccagacagagacccaccctgccccccccccagccccccaccgtgaacctgagcgccagcagcccccagagcaccgaggcccccatgctggacggcatgagccccggcgagagcatgagcaccgccgtgtag

SEQ ID NO: 13462 - DNA, 846 bp, synthetic construct
  source 1..846: mol_type = other DNA; note = Synthetic coding sequence
atgcccggccccagaagactgagaagccccggcggcagcggctgcagcagcagaggcagcggccccagactgagcaccagaagatggagaccctgctgctactgcggcggcagcggcgtgtggctgctgagaaccccccccagccccagcgcctggcccgccagaagatgccccagacacagattcgagttctgcgagcccgccttcgtggtgggcaactgcctgcagatcgccagcgacagccaccagtacgacagaatctactgcggcgccggcgtgcagaaggaccacgagaactacatgaagatcctgctgaaggtgggcggcatcctggtgatgcccatcgaggaccagctgacccagatcatgagaaccggccagaacacctgggagagcaagaacatcctggccgtgagcttcgcccccctggtgcagcccagcaagaacgacaacggcaagcccgacagcgtgggcctgcccccctgcgccgtgagaaacctgcaggacctggccagaatctacatcagaagaaccctgagaaacttcatcaacgacgagatgcaggccaagggcatcccccagagagccccccccaagagaaagagaaagagagtgaagcagagaatcaacacctacgtgttcgtgggcaaccagctgatcccccagcccctggacagcgaggaggacgagaagatggaggaggacaacaaggaggaggaggagaaggaccacaacgaggccatgaagcccgaggagcccccccagaacctgctgagagagaagatcatgaagctgcccctgcccgagagcctgaaggcctacctgacctacttcagagacaagtag

SEQ ID NO: 13463 - DNA, 1251 bp, synthetic construct
  source 1..1251: mol_type = other DNA; note = Synthetic coding sequence
atgagccccgccatgctgagcgtgctggtgaagatgatgctggcccaggcccaggagagcgtgttcgagaagatcagcctgcccggcatcagaaacgagttcttcatgctggtgaaggtggcccaggaggccgccaaggtgggcgaggtgtaccagcagctgcacgccgccatgagccaggcccccgtgaaggagaacatcccctacagctgggccagcctggcctgcgtgaaggcccaccactacgccgccctggcccactacttcaccgccatcctgctgatcgaccaccaggtgaagcccggcaccgacctggaccaccaggagaagtgcctgagccagctgtacgaccacatgcccgagggcctgacccccctggccaccctgaagaacgaccagcagagaagacagctgggcaagagccacctgagaagagccatggcccaccacgaggagagcgtgagagaggccagcctgtgcaagaagctgagaagcatcgaggtgctgcagaaggtgctgtgcgccgcccaggagagaagcagactgacctacgcccagcaccaggaggaggacgacctgctgaacctgatcgacgcccccagcgtggtggccaagaccgagcaggaggtggacatcatcctgccccagttcagcaagctgaccgtgaccgacttcttccagaagctgggccccctgagcgtgttcagcgccaacaagagatggaccccccccagaagcatcagattcaccgccgaggagggcgacctgggcttcaccctgagaggcaacgcccccgtgcaggtgcacttcctggacccctactgcagcgccagcgtggccggcgccagagagggcgactacatcgtgagcatccagctggtggactgcaagtggctgaccctgagcgaggtgatgaagctgctgaagagcttcggcgaggacgagatcgagatgaaggtggtgagcctgctggacagcaccagcagcatgcacaacaagagcgccacctacagcgtgggcatgcagaagacctacagcatgatctgcctggccatcgacgacgacgacaagaccgacaagaccaagaagatcagcaagaagctgagcttcctgagctggggcaccaacaagaacagacagaagagcgccagcaccctgtgcctgcccagcgtgggcgccgccagaccccaggtgaagaagaagctgcccagccccttcagcctgctgaacagcgacagcagctggtactag

SEQ ID NO: 13464 - DNA, 6201 bp, synthetic construct
  source 1..6201: mol_type = other DNA; note = Synthetic coding sequence
atgtgcagcacccccggcatgcccgcccccggcgccagcctggccctgagagtgagcttcgtggacgtgcaccccgacgtgatccccgtgcagctgtggggcctggtgggcgagagaagaggcgagtacctgagactgagcagagagatccaggaggccgccgccaccagaggccagtgggccctgggcagcgccagcgccagccccggcgagctgtgcctggtgcaggtgggcctgctgtggcacagatgcagagtggtgagcagacaggcccaggagagcagagtgttcctgctggacgagggcagaaccatcaccgccggcgccggcagcctggcccccggcagaagagagttcttcaacctgcccagcgaggtgctgggctgcgtgctggccggcctggtgcccgccggctgcggcgccggcagcggcgagcccccccagcactggcccgccgacgccgtggacttcctgagcaacctgcagggcaaggaggtgcacggctgcgtgctggacgtgctgctgctgcacagactggtgctgctggaggtgcccgacgtgttccagcagatgagagagctgggcctggccagaagagtgcccgacagcctgttcagaagcctgctggagagatacctgaccgccgccaccgccagcgtgggcagcggcgtgcccgtgctgagcagagtgcccctgaagcagaagcagcccggcctggactacttctacccccagctgcagctgggcgtgaccgaggccgtggtgatcacccaggtgtgccacccccacagaatccactgccagctgagaagcgtgagccaggagatccacagactgagcgagagcatggcccaggtgtacagaggcagcaccggcaccggcgacgagaacagcaccagcgccacctgggaggagagagaggagagccccgacaagcccggcagcccctgcgccagctgcggcctggacggccactggtacagagccctgctgctggagaccttcagaccccagagatgcgcccaggtgctgcacgtggactacggcagaaaggagctggtgagctgcagcagcctgagatacctgctgcccgagtacttcagaatgcccgtggtgacctacccctgcgccctgtacggcctgtgggacggcggcagaggctggagcagaagccaggtgggcgacctgaagaccctgatcctgggcaaggccgtgaacgccaagatcgagttctactgcagcttcgagcacgtgtactacgtgagcctgtacggcgaggacggcatcaacctgaacagagtgttcggcgtgcagagctgctgcctggccgacagagtgctgcagagccaggccaccgaggaggaggagcccgagaccagccagagccagagccccgccgaggaggtggacgaggagatcagcctgcccgccctgagaagcatcagactgaagatgaacgccttctacgacgcccaggtggagttcgtgaagaaccccagcgagttctggatcagactgagaaagcacaacgtgaccttcagcaagctgatgagaagaatgtgcggcttctacagcagcgccagcaagctggacggcgtggtgctgaagcccgagcccgacgacctgtgctgcgtgaagtggaaggagaacggctactacagagccatcgtgaccaagctggacgacaagagcgtggacgtgttcctggtggacagaggcaacagcgagaacgtggactggtacgacgtgagaatgctgctgccccagttcagacagctgcccatcctggccgtgaagtgcaccctggccgacatctggcccctgggcaagacctggagccaggaggccgtgagcttcttcaagaagaccgtgctgcacaaggagctggtgatccacatcctggacaagcaggaccaccagtacgtgatcgagatcctggacgagagcagaaccggcgaggagaacatcagcaaggtgatcgcccaggccggctacgccaagtaccaggagttcgagaccaaggagaacatcctggtgaacgcccacagccccggccacgtgagcaaccacttcaccaccgagagcaacaagatccccttcgccaagaccggcgagggcgagcagaaggccaagagagagaacaagaccaccagcgtgagcaaggccctgagcgacaccaccgtggtgaccaacggcagcaccgagctggtggtgcaggagaaggtgaagagagccagcgtgtacttccccctgatgcagaactgcctggagatcaagcccggcagcagcagcaagggcgagctggaggtgggcagcaccgtggaggtgagagtgagctacgtggagaaccccggctacttctggtgccagctgaccagaaacatccagggcctgaagaccctgatgagcgacatccagtactactgcaagaacaccgccgccccccaccagagaaacaccctggcctgcctggccaagagaaccgtgaacagacagtggagcagagccctgatcagcggcatccagagcgtggagcacgtgaacgtgaccttcgtggactacggcgacagagagatggtgagcgtgaagaacatctacagcatcagcgaggagttcctgaaggtgaaggcccaggccttcagatgcagcctgtacaacctgatccagcccgtgggccagaaccccttcgtgtgggacgtgaaggccatccaggccttcaacgagttcatcgacaacgcctggcagaagaacctggagctgaagtgcaccatcttcgccctggccagcatcaacgaggagctgttcaacatcgtggacctgctgacccccttccagagcgcctgccacttcctggtggagaagagactggccagacccgtgaagctgcagaagcccctggagagcagcgtgcagctgcacagctacttctacagcacccacgacatgaagatcggcagcgaggagctggtgtacatcacccacatcgacgacccctggaccttctactgccagctggccagaaacgccaacatcctggagcagctgagctgcagcatcacccagctgagcaaggtgctgctgaacctgaagaccagccccctgaaccccggcaccctgtgcctggccaagtacaccgacggcaactggtacagaggcatcgtgatcgagaaggagcccaagaaggtgttcttcgtggacttcggcaacatctacgtggtgaccagcgacgacctgctgcccatccccagcgacgcctacgacgtgctgctgctgcccatgcaggccgtgagatgcagcctgagcgacatccccgaccacatccccgaggaggtggtggtgtggttccaggagaccatcctggacaagagcctgaaggccctggtggtggccaaggaccccgacggcaccctgatcatcgagctgtacggcgacaacatccagatcagcgccagcatcaacaagaagctgggcctgctgagctacaaggacagaatcagaaagaaggagagcgaggtgctgtgcagcaccaccgagaccctggaggagaagaacgagaacatgaagctgccctgcaccgagtacctgagcaagagcgtgggctacaagctgcccaacaaggagatcctggaggagagctacaagccccagatcaacagcagctacaaggagctgaagctgctgcagagcctgaccaagaccaacctggtgacccagtaccaggacagcgtgggcaacaagaacagccaggtgttccccctgaccaccgagaagaaggaggagatcagcgccgagacccccctgaagaccgccagagtggaggccaccctgagcgagagaaagatcggcgacagctgcgacaaggacctgcccctgaagttctgcgagttcccccagaagaccatcatgcccggcttcaagaccaccgtgtacgtgagccacatcaacgacctgagcgacttctacgtgcagctgatcgaggacgaggccgagatcagccacctgagcgagagactgaacagcgtgaagaccagacccgagtactacgtgggcccccccctgcagagaggcgacatgatctgcgccgtgttccccgaggacaacctgtggtacagagccgtgatcaaggagcagcagcccaacgacctgctgagcgtgcagttcatcgactacggcaacgtgagcgtggtgcacaccaacaagatcggcagactggacctggtgaacgccatcctgcccggcctgtgcatccactgcagcctgcagggcttcgaggtgcccgacaacaagaacagcaagaagatgatgcactacttcagccagagaaccagcgaggccgccatcagatgcgagttcgtgaagttccaggacagatgggaggtgatcctggccgacgagcacggcatcatcgccgacgacatgatcagcagatacgccctgagcgagaagagccaggtggagctgagcacccaggtgatcaagagcgccagcagcaagagcgtgaacaagagcgacatcgacaccagcgtgttcctgaactggtacaaccccgagaagaagatgatcagagcctacgccaccgtgatcgacggccccgagtacttctggtgccagttcgccgacaccgagaagctgcagtgcctggaggtggaggtgcagaccgccggcgagcaggtggccgacagaagaaactgcatcccctgcccctacatcggcgacccctgcatcgtgagatacagagaggacggccactactacagagccctgatcaccaacatctgcgaggactacctggtgagcgtgagactggtggacttcggcaacatcgaggactgcgtggaccccaaggccctgtgggccatccccagcgagctgctgagcgtgcccatgcaggccttcccctgctgcctgagcggcttcaacatcagcgagggcctgtgcagccaggagggcaacgactacttctacgagatcatcaccgaggacgtgctggagatcaccatcctggagatcagaagagacgtgtgcgacatccccctggccatcgtggacctgaagagcaagggcaagagcatcaacgagaagatggagaagtacagcaagaccggcatcaagagcgccctgccctacgagaacatcgacagcgagatcaagcagaccctgggcagctacaacctggacgtgggcctgaagaagctgagcaacaaggccgtgcagaacaagatctacatggagcagcagaccgacgagctggccgagatcaccgagaaggacgtgaacatcatcggcaccaagcccagcaacttcagagaccccaagaccgacaacatctgcgagggcttcgagaacccctgcaaggacaagatcgacaccgaggagctggagggcgagctggagtgccacctggtggacaaggccgagttcgacgacaagtacctgatcaccggcttcaacaccctgctgccccacgccaacgagaccaaggagatcctggagctgaacagcctggaggtgcccctgagccccgacgacgagagcaaggagttcctggagctggagagcatcgagctgcagaacagcctggtggtggacgaggagaagggcgagctgagccccgtgccccccaacgtgcccctgagccaggagtgcgtgaccaagggcgccatggagctgttcaccctgcagctgcccctgagctgcgaggccgagaagcagcccgagctggagctgcccaccgcccagctgcccctggacgacaagatggaccccctgagcctgggcgtgagccagaaggcccaggagagcatgtgcaccgaggacatgagaaagagcagctgcgtggagagcttcgacgaccagagaagaatgagcctgcacctgcacggcgccgactgcgaccccaagacccagaacgagatgaacatctgcgaggaggagttcgtggagtacaagaacagagacgccatcagcgccctgatgcccctgttcagcgaggaggagagcagcgacggcagcaagcacaacaacggcctgcccgaccacatcagcgcccagctgcagaacacctacaccctgaaggccttcaccgtgggcagcaagtgcgtggtgtggagcagcctgagaaacacctggagcaagtgcgagatcctggagaccgccgaggagggcaccagaaagagaggcctggaggtgatggagatctag

SEQ ID NO: 13465 - DNA, 264 bp, synthetic construct
  source 1..264: mol_type = other DNA; note = Synthetic coding sequence
atgagcagctgcgtgagcagccagcccagcagcaacagagccgccccccaggacgagctgggcggcagaggcagcagcagcagcgagagccagaagccctgcgaggccctgagaggcctgagcagcctgagcatccacctgggcatggagagcttcatcgtggtgaccgagtgcgagcccggctgcgccgtggacctgggcctggccagagacagacccctggaggccgacggccaggaggtgcccctggacaccagcggctag

SEQ ID NO: 13466 - DNA, 2469 bp, synthetic construct
  source 1..2469: mol_type = other DNA; note = Synthetic coding sequence
atggccgccgagggcgaccccgagtggggccccaccccccccagcaccagcgccaccaccgccgccagaagagccgtgaacaaggtggtgtacgacgaccacgagagcgaggaggaggaggaggaggaggacatggtgagcgaggaggaggaggaggaggacggcgacgccgaggagacccaggacagcgaggacgacgaggaggacgagatggaggaggacgacgacgacagcgactaccccgaggagatggaggacgacgacgacgacgccagctactgcaccgagagcagcttcagaagccacagcacctacagcagcacccccggcagaagaaagcccagagtgcacagacccagaagccccatcctggaggagaaggacatcccccccctggagttccccaagagcagcgaggacctgatggtgcccaacgagcacatcatgaacgtgatcgccatctacgaggtgctgagaaacttcggcaccgtgctgagactgagccccttcagattcgaggacttctgcgccgccctggtgagccaggagcagtgcaccctgatggccgagatgcacgtggtgctgctgaaggccgtgctgagagaggaggacaccagcaacaccaccttcggccccgccgacctgaaggacagcgtgaacagcaccctgtacttcatcgacggcatgacctggcccgaggtgctgagagtgtactgcgagagcgacaaggagtaccaccacgtgctgccctaccaggaggccgaggactacccctacggccccgtggagaacaagatcaaggtgctgcagttcctggtggaccagttcctgaccaccaacatcgccagagaggagctgatgagcgagggcgtgatccagtacgacgaccactgcagagtgtgccacaagctgggcgacctgctgtgctgcgagacctgcagcgccgtgtaccacctggagtgcgtgaagccccccctggaggaggtgcccgaggacgagtggcagtgcgaggtgtgcgtggcccacaaggtgcccggcgtgaccgactgcgtggccgagatccagaagaacaagccctacatcagacacgagcccatcggctacgacagaagcagaagaaagtactggttcctgaacagaagactgatcatcgaggaggacaccgagaacgagaacgagaagaagatctggtactacagcaccaaggtgcagctggccgagctgatcgactgcctggacaaggactactgggaggccgagctgtgcaagatcctggaggagatgagagaggagatccacagacacatggacatcaccgaggacctgaccaacaaggccagaggcagcaacaagagcttcctggccgccgccaacgaggagatcctggagagcatcagagccaagaagggcgacatcgacaacgtgaagagccccgaggagaccgagaaggacaagaacgagaccgagaacgacagcaaggacgccgagaagaacagagaggagttcgaggaccagagcctggagaaggacagcgacgacaagacccccgacgacgaccccgagcagggcaagagcgaggagcccaccgaggtgggcgacaagggcaacagcgtgagcgccaacctgggcgacaacaccaccaacgccaccagcgaggagaccagccccagcgagggcagaagccccgtgggctgcctgagcgagacccccgacagcagcaacatggccgagaagaaggtggccagcgagctgccccaggacgtgcccgaggagcccaacaagacctgcgagagcagcaacaccagcgccaccaccaccagcatccagcccaacctggagaacagcaacagcagcagcgagctgaacagcagccagagcgagagcgccaaggccgccgacgaccccgagaacggcgagagagagagccacacccccgtgagcatccaggaggagatcgtgggcgacttcaagagcgagaagagcaacggcgagctgagcgagagccccggcgccggcaagggcgccagcggcagcaccagaatcatcaccagactgagaaaccccgacagcaagctgagccagctgaagagccagcaggtggccgccgccgcccacgaggccaacaagctgttcaaggagggcaaggaggtgctggtggtgaacagccagggcgagatcagcagactgagcaccaagaaggaggtgatcatgaagggcaacatcaacaactacttcaagctgggccaggagggcaagtacagagtgtaccacaaccagtacagcaccaacagcttcgccctgaacaagcaccagcacagagaggaccacgacaagagaagacacctggcccacaagttctgcctgacccccgccggcgagttcaagtggaacggcagcgtgcacggcagcaaggtgctgaccatcagcaccctgagactgaccatcacccagtacggcgagaacctgtag

SEQ ID NO: 13467 - DNA, 552 bp, synthetic construct
  source 1..552: mol_type = other DNA; note = Synthetic coding sequence
atgctgcagcagacctggaccagcagatgcctgatgaagttctacgccgtggtggccaccagccccgccagctgggagagccacaagatcgccgagagaatcgagcagagaatcctgaacagcaaccccgtgatggaggccttcggcaacgcctgcaccctgagaaacaacaacagcagcagattcggcaagttcatccagctgcagctgaacagagcccagcagatgaccggcgccgccgtgcagacctacctgctggagaagaccagagtggcctgccaggccagcagcgagagaaacttccacatcttctaccagatctgcaagggcgccagcgaggacgagagactgcagtggcacctgcccgagggcgccgccttcagctggctgcccaaccccgagagaagcctggaggaggactgcttcgaggtgaccagagaggccatgctgcacctgggcatcgacacccccacccagaacaacatcttcaaggtgagaagaaaggccacccccctgaagttcggcagagacgacggccagcccttcgcctag

SEQ ID NO: 13468 - DNA, 744 bp, synthetic construct; identical to SEQ ID NO: 10972
  source 1..744: mol_type = other DNA; note = Synthetic coding sequence

SEQ ID NO: 13469 - DNA, 981 bp, synthetic construct
  source 1..981: mol_type = other DNA; note = Synthetic coding sequence
atgctgggcggcgtgggcgaggagaacgagaagctgtggagcttcaccaagaaggccagccacatccagctggacagcctgcccgaggtgcccctgctggtggacgtgccctgcctgagcgcccagctggacgacagcatcctgaacatcgtgaaggaccacatcttcaagcacggcaccgtggccagcagaccccccgtgcagatcgaggagctgatcgagaagcccggcggcatcatcgtgagatggtgcaaggtggacgacgacttcaccgcccaggactacagactgcagttcagaaagtgcaccagcaaccacttcgaggacgtgtacgtgggcagcgagaccgagttcatcgtgctgcacatcgaccccaacgtggactaccagttcagagtgtgcgccagaggcgacggcagacaggagtggagcccctggagcgtgccccagatcggccacagcaccctggtgccccacgagtggaccgccggcttcgagggctacagcctgagcagcagaagaaacatcgccctgagaaacgacagcgagagcagcggcgtgctgtacagcagagcccccacctacttctgcggccagaccctgaccttcagagtggagaccgtgggccagcccgacagaagagacagcatcggcgtgtgcgccgagaagcaggacggctacgacagcctgcagagagaccaggccgtgtgcatcagcaccaacggcgccgtgttcgtgaacggcaaggagatgaccaaccagctgcccgccgtgaccagcggcagcaccgtgaccttcgacatcgaggccgtgaccctgggcaccaccagcaacaacgagggcggccacttcaagctgagagtgaccatcagcagcaacaacagagaggtggtgttcgactggctgctggaccagagctgcggcagcctgtacttcggctgcagcttcttctaccccggctggaaggtgctggtgttctag

SEQ ID NO: 13470 - DNA, 2436 bp, synthetic construct
  source 1..2436: mol_type = other DNA; note = Synthetic coding sequence
atggtgagcgaggaggaggaggaggaggacggcgacgccgaggagacccaggacagcgaggacgacgaggaggacgagatggaggaggacgacgacgacagcgactaccccgaggagatggaggacgacgacgacgacgccagctactgcaccgagagcagcttcagaagccacagcacctacagcagcacccccggcagaagaaagcccagagtgcacagacccagaagccccatcctggaggagaaggacatcccccccctggagttccccaagagcagcgaggacctgatggtgcccaacgagcacatcatgaacgtgatcgccatctacgaggtgctgagaaacttcggcaccgtgctgagactgagccccttcagattcgaggacttctgcgccgccctggtgagccaggagcagtgcaccctgatggccgagatgcacgtggtgctgctgaaggccgtgctgagagaggaggacaccagcaacaccaccttcggccccgccgacctgaaggacagcgtgaacagcaccctgtacttcatcgacggcatgacctggcccgaggtgctgagagtgtactgcgagagcgacaaggagtaccaccacgtgctgccctaccaggaggccgaggactacccctacggccccgtggagaacaagatcaaggtgctgcagttcctggtggaccagttcctgaccaccaacatcgccagagaggagctgatgagcgagggcgtgatccagtacgacgaccactgcagagtgtgccacaagctgggcgacctgctgtgctgcgagacctgcagcgccgtgtaccacctggagtgcgtgaagccccccctggaggaggtgcccgaggacgagtggcagtgcgaggtgtgcgtggcccacaaggtgcccggcgtgaccgactgcgtggccgagatccagaagaacaagccctacatcagacacgagcccatcggctacgacagaagcagaagaaagtactggttcctgaacagaagactgatcatcgaggaggacaccgagaacgagaacgagaagaagatctggtactacagcaccaaggtgcagctggccgagctgatcgactgcctggacaaggactactgggaggccgagctgtgcaagatcctggaggagatgagagaggagatccacagacacatggacatcaccgaggacctgaccaacaaggccagaggcagcaacaagagcttcctggccgccgccaacgaggagatcctggagagcatcagagccaagaagggcgacatcgacaacgtgaagagccccgaggagaccgagaaggacaagaacgagaccgagaacgacagcaaggacgccgagaagaacagagaggagttcgaggaccagagcctggagaaggacagcgacgacaagacccccgacgacgaccccgagcagggcaagagcgaggagcccaccgaggtgggcgacaagggcaacagcgtgagcgccaacctgggcgacaacaccaccaacgccaccagcgaggagaccagccccagcgagggcagaagccccgtgggctgcctgagcgagacccccgacagcagcaacatggccgagaagaaggtggccagcgagctgccccaggacgtgcccgtgggcgacttcaagagcgagaagagcaacggcgagctgagcgagagccccggcgccggcaagggcgccagcggcagcaccagaatcatcaccagactgagaaaccccgacagcaagctgagccagctgaagagccagcaggtggccgccgccgcccacgaggccaacaagctgttcaaggagggcaaggaggtgctggtggtgaacagccagggcgagatcagcagactgagcaccaagaaggaggtgatcatgaagggcaacatcaacaactacttcaagctgggccaggagggcaagtacagagtgtaccacaaccagtacagcaccaacagcttcgccctgaacaagcaccagcacagagaggaccacgacaagagaagacacctggcccacaagttctgcctgacccccgccggcgagttcaagtggaacggcagcgtgcacggcagcaaggtgctgaccatcagcaccctgagactgaccatcacccagctggagaacaacatccccagcagcttcctgcaccccaactgggccagccacagagccaactggatcaaggccgtgcagatgtgcagcaagcccagagagttcgccctggccctggccatcctggagtgcgccgtgaagcccgtggtgatgctgcccatctggagagagagcctgggccacaccagactgcacagaatgaccagcatcgagagagaggagaaggagaaggtgaagaagagagaggagaccggcagaagaagaaacgacgccgccagcgacatgggcaagatccacatcagcagctag

SEQ ID NO: 13471 - DNA, 1752 bp, synthetic construct
  source 1..1752: mol_type = other DNA; note = Synthetic coding sequence
atggcccccgagctgacccccgaggaggagcaggccaccaagcagttcctggaggagatcaacaagtggaccgtgcagtacaacgtgagccccctgagctggaacgtggccgtgaagttcctgatggccagaaagttcgacgtgctgagagccatcgagctgttccacagctacagagagaccagaagaaaggagggcatcgtgaagctgaagccccacgaggagcccctgagaagcgagatcctgagcggcaagttcaccatcctgaacgtgagagaccccaccggcgccagcatcgccctgttcaccgccagactgcaccacccccacaagagcgtgcagcacgtggtgctgcaggccctgttctacctgctggacagagccgtggacagcttcgagacccagagaaacggcctggtgttcatctacgacatgtgcggcagcaactacgccaacttcgagctggacctgggcaagaaggtgctgaacctgctgaagggcgccttccccgccagactgaagaaggtgctgatcgtgggcgcccccatctggttcagagtgccctacagcatcatcagcctgctgctgaaggacaaggtgagagagagaatccagatcctgaagaccagcgaggtgacccagcacctgcccagagagtgcctgcccgagaacctgggcggctacgtgaagatcgacctggccacctggaacttccagttcctgccccaggtgaacggccaccccgaccccttcgacgagatcatcctgttcagcctgccccccgccctggactgggacagcgtgcacgtgcccggcccccacgccatgaccatccaggagctggtggactacgtgaacgccagacagaagcagggcatctacgaggagtacgaggacatcagaagagagaaccccgtgggcaccttccactgcagcatgagccccggcaacctggagaagaacagatacggcgacgtgccctgcctggaccagaccagagtgaagctgaccaagagaagcggccacacccagaccgactacatcaacgccagcttcatggacggctacaagcagaagaacgcctacatcggcacccagggccccctggagaacacctacagagacttctggctgatggtgtgggagcagaaggtgctggtgatcgtgatgaccaccagattcgaggagggcggcagaagaaagtgcggccagtactggcccctggagaaggacagcagaatcagattcggcttcctgaccgtgaccaacctgggcgtggagaacatgaaccactacaagaagaccaccctggagatccacaacaccgaggagagacagaagagacaggtgacccacttccagttcctgagctggcccgactacggcgtgcccagcagcgccgccagcctgatcgacttcctgagagtggtgagaaaccagcagagcctggccgtgagcaacatgggcgccagaagcaagggccagtgccccgagccccccatcgtggtgcactgcagcgccggcatcggcagaaccggcaccttctgcagcctggacatctgcctggcccagctggaggagctgggcaccctgaacgtgttccagaccgtgagcagaatgagaacccagagagccttcagcatccagacccccgagcagtactacttctgctacaaggccatcctggagttcgccgagaaggagggcatggtgagcagcggccagaacctgctggccgtggagagccagtag

SEQ ID NO: 13472 - DNA, 396 bp, synthetic construct; identical to SEQ ID NO: 13381
  source 1..396: mol_type = other DNA; note = Synthetic coding sequence

SEQ ID NO: 13473 - DNA, 435 bp, synthetic construct
  source 1..435: mol_type = other DNA; note = Synthetic coding sequence
atggccagcgtggccgccgccagagccgtgcccgtgggcagcggcctgagaggcctgcagagaaccctgcccctggtggtgatcctgggcgccaccggcaccggcaagagcaccctggccctgcagctgggccagagactgggcggcgagatcgtgagcgccgacagcatgcaggtgtacgagggcctggacatcatcaccaacaaggtgagcgcccaggagcagagaatctgcagacaccacatgatcagcttcgtggaccccctggtgaccaactacaccgtggtggacttcagaaacagagccaccgccctgatcgaggacatcttcgccagagacaagatccccatcgtggtgggcggcaccaactactacatcgagagcctgctgtggaaggtgctggtgaacaccaaggtgagcctggtgcacagctag

SEQ ID NO: 13474 - DNA, 1386 bp, synthetic construct
  source 1..1386: mol_type = other DNA; note = Synthetic coding sequence
atggccgccagcagcctggagcagaagctgagcagactggaggccaagctgaagcaggagaacagagaggccagaagaagaatcgacctgaacctggacatcagcccccagagacccagacccaccctgcagctgcccctggccaacgacggcggcagcagaagccccagcagcgagagcagcccccagcaccccaccccccccgccagacccagacacatgctgggcctgcccagcaccctgttcacccccagaagcatggagagcatcgagatcgaccagaagctgcaggagatcatgaagcagaccggctacctgaccatcggcggccaggtgccccccagcctgtggagaggcgagggcggcggccccgccagactggaccccagctgggagagacagtggggcgccggcggcggcggcagacccggcaccctgcagcccagcctgagcagccagagataccaggccgagatcaacgacctggagaacctgggcgagatgggcagcggcacctgcggccaggtgtggaagatgagattcagaaagaccggccacgtgatcgccgtgaagcagatgagaagaagcggcaacaaggaggagaacaagagaatcctgatggacctggacgtggtgctgaagagccacgactgcccctacatcgtgcagtgcttcggcaccttcatcaccaacaccgacgtgttcatcgccatggagctgatgggcacctgcgccgagaagctgaagaagagaatgcagggccccatccccgagagaatcctgggcaagatgaccgtggccatcgtgaaggccctgtactacctgaaggagaagcacggcgtgatccacagagacgtgaagcccagcaacatcctgctggacgagagaggccagatcaagctgtgcgacttcggcatcagcggcagactggtggacagcaaggccaagaccagaagcgccggctgcgccgcctacatggcccccgagagaatcgacccccccgaccccaccaagcccgactacgacatcagagccgacgtgtggagcctgggcatcagcctggtggagctggccaccggccagttcccctacaagaactgcaagaccgacttcgaggtgctgaccaaggtgctgcaggaggagccccccctgctgcccggccacatgggcttcagcggcgacttccagagcttcgtgaaggactgcctgaccaaggaccacagaaagagacccaagtacaacaagctgctggagcacagcttcatcaagagatacgagaccctggaggtggacgtggccagctggttcaaggacgtgatggccaagaccgagagccccagaaccagcggcgtgctgagccagccccacctgcccttcttcagatag

SEQ ID NO: 13475 - DNA, 1611 bp, synthetic construct
  source 1..1611: mol_type = other DNA; note = Synthetic coding sequence
atggagaccagcgacatccagatcttctaccaggaggaccccgagtgccagaacctgagcgagaacagctgcccccccagcgaggtgagcgacaccaacctgtacagccccttcaagcccagaaactaccagctggagctggccctgcccgccatgaagggcaagaacaccatcatctgcgcccccaccggctgcggcaagaccttcgtgagcctgctgatctgcgagcaccacctgaagaagttcccccagggccagaagggcaaggtggtgttcttcgccaaccagatccccgtgtacgagcagcagaagagcgtgttcagcaagtacttcgagagacacggctacagagtgaccggcatcagcggcgccaccgccgagaacgtgcccgtggagcagatcgtggagaacaacgacatcatcatcctgaccccccagatcctggtgaacaacctgaagaagggcaccatccccagcctgagcatcttcaccctgatgatcttcgacgagtgccacaacaccagcaagcagcacccctacaacatgatcatgttcaactacctggaccagaagctgggcggcagcagcggccccctgccccaggtgatcggcctgaccgccagcgtgggcgtgggcgacgccaagaacaccgacgaggccctggactacatctgcaagctgtgcgccagcctggacgccagcgtgatcgccaccgtgaagcacaacctggaggagctggagcaggtggtgtacaagccccagaagttcttcagaaaggtggagagcagaatcagcgacaagttcaagtacatcatcgcccagctgatgagagacaccgagagcctggccaagagaatctgcaaggacctggagaacctgagccagatccagaacagagagttcggcacccagaagtacgagcagtggatcgtgaccgtgcagaaggcctgcatggtgttccagatgcccgacaaggacgaggagagcagaatctgcaaggccctgttcctgtacaccagccacctgagaaagtacaacgacgccctgatcatcagcgagcacgccagaatgaaggacgccctggactacctgaaggacttcttcagcaacgtgagagccgccggcttcgacgagatcgagcaggacctgacccagagattcgaggagaagctgcaggagctggagagcgtgagcagagaccccagcaacgagaaccccaagctggaggacctgtgcttcatcctgcaggaggagtaccacctgaaccccgagaccatcaccatcctgttcgtgaagaccagagccctggtggacgccctgaagaactggatcgagggcaaccccaagctgagcttcctgaagcccggcatcctgaccggcagaggcaagaccaaccagaacaccggcatgaccctgcccgcccagaagtgcatcctggacgccttcaaggccagcggcgaccacaacatcctgatcgccaccagcgtggccgacgagggcatcgacatcgcccagtgcaacctggtgatcctgtacgagtacgtgggcaacgtgatcaagatgatccagaccagagaggaggagcaggaggtggccagcgccagcttctag

SEQ ID NO: 13476 - DNA, 2883 bp, synthetic construct; identical to SEQ ID NO: 9420
  source 1..2883: mol_type = other DNA; note = Synthetic coding sequence

SEQ ID NO: 13477 - DNA, 666 bp, synthetic construct
  source 1..666: mol_type = other DNA; note = Synthetic coding sequence
atgctggccgccggcctgctggaggagctgagagacttccacagaagatacaaccagaagaacgtgagcgagaacagccaggactaccagcacggcatcttccagagcatcggcttcaaggagttccacgagtacctgatcaccgagggcaagtgcaccctggagaccagcaaccagctgctgaagaagggcatcgaggccctgaagcaggtgaccaagagatacgccagaaagcagaacagatgggtgaagaacagattcctgagcagacccggccccatcgtgccccccgtgtacggcctggaggtgagcgacgtgagcaagtgggaggagagcgtgctggagcccgccctggagatcgtgcagagcttcatccagggccacaagcccaccgccacccccatcaagatgccctacaacgaggccgagaacaagagaagctaccacctgtgcgacctgtgcgacagaatcatcatcggcgacagagagtgggccgcccacatcaagagcaagagccacctgaaccagctgaagaagagaagaagactggacagcgacgccgtgaacaccatcgagagccagagcgtgagccccgaccacaacaaggagcccaaggagaagggcagccccggccagaacgaccaggagctgaagtgcagcgtgtag

SEQ ID NO: 13478 - DNA, 2649 bp, synthetic construct
  source 1..2649: mol_type = other DNA; note = Synthetic coding sequence
atgcccagagtgaagcccaagctggagaagcagctgcagaaggacaaggagaaggtggaggagttcaagagcatccccgccaagagcaacaacatcatcaacgagaccaccaccagaaacaacgccctggagaaggagaaggagaaggaggagaagaagctgaaggaggtgatggacagcctgaagcaggagacccagggcctgcagaaggagaaggagagcagagagaaggagctgatgggcttcagcaagagcgtgaacgaggccagaagcaagatggacgtggcccagagcgagctggacatctacctgagcagacacaacaccgccgtgagccagctgaccaaggccaaggaggccctgatcgccgccagcgagaccctgaaggagagaaaggccgccatcagagacatcgagggcaagctgccccagaccgagcaggagctgaaggagaaggagaaggagctgcagaagctgacccaggaggagaccaacttcaagagcctggtgcacgacctgttccagaaggtggaggaggccaagagcagcctggccatgaacagaagcagaggcaaggtgctggacgccatcatccaggagaagaagagcggcagaatccccggcatctacggcagactgggcgacctgggcgccatcgacgagaagtacgacgtggccatcagcagctgctgccacgccctggactacatcgtggtggacagcatcgacatcgcccaggagtgcgtgaacttcctgaagagacagaacatcggcgtggccaccttcatcggcctggacaagatggccgtgtgggccaagaagatgaccgagatccagacccccgagaacacccccagactgttcgacctggtgaaggtgaaggacgagaagatcagacaggccttctacttcgccctgagagacaccctggtggccgacaacctggaccaggccaccagagtggcctaccagaaggacagaagatggagagtggtgaccctgcagggccagatcatcgagcagagcggcaccatgaccggcggcggcagcaaggtgatgaagggcagaatgggcagcagcctggtgatcgagatcagcgaggaggaggtgaacaagatggagagccagctgcagaacgacagcaagaaggccatgcagatccaggagcagaaggtgcagctggaggagagagtggtgaagctgagacacagcgagagagagatgagaaacaccctggagaagttcaccgccagcatccagagactgatcgagcaggaggagtacctgaacgtgcaggtgaaggagctggaggccaacgtgctggccaccgcccccgacaagaagaagcagaagctgctggaggagaacgtgagcgccttcaagaccgagtacgacgccgtggccgagaaggccggcaaggtggaggccgaggtgaagagactgcacaacaccatcgtggagatcaacaaccacaagctgaaggcccagcaggacaagctggacaagatcaacaagcagctggacgagtgcgccagcgccatcaccaaggcccaggtggccatcaagaccgccgacagaaacctgcagaaggcccaggacagcgtgctgagaaccgagaaggagatcaaggacaccgagaaggaggtggacgacctgaccgccgagctgaagagcctggaggacaaggccgccgaggtggtgaagaacaccaacgccgccgaggagagcctgcccgagatccagaaggagcacagaaacctgctgcaggagctgaaggtgatccaggagaacgagcacgccctgcagaaggacgccctgagcatcaagctgaagctggagcagatcgacggccacatcgccgagcacaacagcaagatcaagtactggcacaaggagatcagcaagatcagcctgcaccccatcgaggacaaccccatcgaggagatcagcgtgctgagccccgaggacctggaggccatcaagaaccccgacagcatcaccaaccagatcgccctgctggaggccagatgccacgagatgaagcccaacctgggcgccatcgccgagtacaagaagaaggaggagctgtacctgcagagagtggccgagctggacaagatcacctacgagagagacagcttcagacaggcctacgaggacctgagaaagcagagactgaacgagttcatggccggcttctacatcatcaccaacaagctgaaggagaactaccagatgctgaccctgggcggcgacgccgagctggagctggtggacagcctggaccccttcagcgagggcatcatgttcagcgtgagaccccccaagaagagctggaagaagatcttcaacctgagcggcggcgagaagaccctgagcagcctggccctggtgttcgccctgcaccactacaagcccacccccctgtacttcatggacgagatcgacgccgccctggacttcaagaacgtgagcatcgtggccttctacatctacgagcagaccaagaacgcccagttcatcatcatcagcctgagaaacaacatgttcgagatcagcgacagactgatcggcatctacaagacctacaacatcaccaagagcgtggccgtgaaccccaaggagatcgccagcaagggcctgtgctag

SEQ ID NO: 13479 - DNA, 1038 bp, synthetic construct
  source 1..1038: mol_type = other DNA; note = Synthetic coding sequence
atgttcctgaccagacccaaggtgtgcgtggacctgaacagaagagtgaccctgtacggcgtgttcaccatccacttcagccccaacgtgcccagcagatgcctgctgctggagctgctggacgtgagcgtgagcgagctgctgctgtacagcagccaccagggctgcagcatgtggatgatccagcactgcgccagagacgtgctggaggccctggccttcctgcaccacgagggctacgtgcacgccgacctgaagcccagaaacatcctgtggagcgccgagaacgagtgcttcaagctgatcgacttcggcctgagcttcaaggagggcaaccaggacgtgaagtacatccagaccgacggctacagagcccccgaggccgagctgcagaactgcctggcccaggccggcctgcagagcgacaccgagtgcaccagcgccgtggacctgtggagcctgggcatcatcctgctggagatgttcagcggcatgaagctgaagcacaccgtgagaagccaggagtggaaggccaacagcagcgccatcatcgaccacatcttcgccagcaaggccgtggtgaacgccgccatccccgcctaccacctgagagacctgatcaagagcatgctgcacgacgaccccagcagaagaatccccgccgagatggccctgtgcagccccttcttcagcatccccttcgccccccacatcgaggacctggtgatgctgcccacccccgtgctgagactgctgaacgtgctggacgacgactacctggagaacgaggaggagtacgaggacgtggtggaggacgtgaaggaggagtgccagaagtacggccccgtggtgagcctgctggtgcccaaggagaaccccggcagaggccaggtgttcgtggagtacgccaacgccggcgacagcaaggccgcccagaagctgctgaccggcagaatgttcgacggcaagttcgtggtggccaccttctaccccctgagcgcctacaagagaggctacctgtaccagaccctgctgtag

SEQ ID NO: 13480 - DNA, 954 bp, synthetic construct
  source 1..954: mol_type = other DNA; note = Synthetic coding sequence
atgtggctggccagagagggcatcgtggcccccctgcccggcgagtggaagccctgccaggacatcaccggcgacatctactacttcaacttcgccaacggccagagcatgtgggaccacccctgcgacgagcactacagaagcctggtgatccaggagagagccaagctgagcaccagcggcgccatcaagaagaagaagaagaagaaggagaagaaggacaagaaggacagagacccccccaagagcagcctggagacccagcccgaggagggcctgctgccccccagcagcttcctgtgcagcctgagcccccccagcgcccccggcctggccgacctggacctggaccaggagatgcaggccatcagcgagggcagctacaacaagggcaagagccccggcatgctgggcgacaccccctggagattcatgggcgccctgcccagaaagctgcagcccctgagcaagggccagcccagccagatccaccaggtgttcgccgacatggagaagatcctgggcagagcccccgcccagtgcagaagagagctgggcgaccagcagggcctggagaagctgcagaaggccaccgagaagatctacctgggcttcagcgaccccgagaccgaggagctggagatgagaagcagacagcagaagctgggcacccccgccccccagaacaccggcctgctgcagaacatgcaggacgtggtggagagcagaaaccaggccagcgtgcacagcaagctgagcgaggccatcaagggcctgcccctgaagggcgagcagcacagccacagcctggccaagctgagccccaccggccccggcggcgacaagggccagagccccatccccatgtggatctgctgcagactgagagccagcaactgcagaaacaccagcgccgcctggagactgaagctgaagagaagcagcacctgctag

SEQ ID NO: 13481 - DNA, 162 bp, synthetic construct
  source 1..162: mol_type = other DNA; note = Synthetic coding sequence
atgggcaacagcgacagccagtacaccctgcagggcagcaagaaccacagcaacaccatcaccggcgccaagcagatcccctgcagcctgaagatcagaggcatccacgccaaggaggagaagagcctgcacggctggggccacggcagcaacggcgcctag

SEQ ID NO: 13482 - DNA, 1203 bp, synthetic construct
  source 1..1203: mol_type = other DNA; note = Synthetic coding sequence
gcctggctgcagagcgccggcgagctgcccagcgacggcggctgcagcagactgagatggcaggcccacctggagttcacccacaaccacgacgtgggcgacctgacctgggacaagatcgccgtgagcctgcccagaagcgagaagctgagaagcctggtgctggccggcatcccccacggcatgagaccccagctgtggatgagactgagcggcgccctgcagaagaagagaaacagcgagctgagctacagagagatcgtgaagaacagcagcaacgacgagaccatcgccgccaagcagatcgagaaggacctgctgagaaccatgcccagcaacgcctgcttcgccagcatgggcagcatcggcgtgcccagactgagaagagtgctgagagccctggcctggctgtaccccgagatcggctactgccagggcaccggcatggtggccgcctgcctgctgctgttcctggaggaggaggacgccttctggatgatgagcgccatcatcgaggacctgctgcccgccagctacttcagcaccaccctgctgggcgtgcagaccgaccagagagtgctgagacacctgatcgtgcagtacctgcccagactggacaagctgctgcaggagcacgacatcgagctgagcctgatcaccctgcactggttcctgaccgccttcgccagcgtggtggacatcaagctgctgctgagaatctgggacctgttcttctacgagggcagcagagtgctgttccagctgaccctgggcatgctgcacctgaaggaggaggagctgatccagagcgagaacagcgccagcatcttcaacaccctgagcgacatccccagccagatggaggacgccgagctgctgctgggcgtggccatgagactggccggcagcctgaccgacgtggccgtggagacccagagaagaaagcacctggcctacctgatcgccgaccagggccagctgctgggcgccggcaccctgaccaacctgagccaggtggcccaggacggcggcccccacctggacccccagcacaccggcagaagaggccacctggaggtgcagagcgccggcgccgccgagaacaagcccgccctgcccgccctgccccccagcctggcccagagcgaccacagctgcggcgtgatccaggccagcagcggcttcgtgcacctgagattctag

SEQ ID NO: 13483 - DNA, 294 bp, synthetic construct
  source 1..294: mol_type = other DNA; note = Synthetic coding sequence
atgctgagaggcaccaaggagatggacaacatgagccccagactgagagccttcctgagcgagcccatcggcgagaaggacgtgtgctgggtggacggcatcagccacgagctggccatcaacctggtgaccaagggcatcaacaaggcctacatcctgctgggccagttcctgctgatgcacaagaacgaggccgagttccagagatggctgatctgctgcttcggcgccaccgagtgcgaggcccagcagaccagccactgcctgaaggagtggtgcgcctgcttcctgtag

SEQ ID NO: 13484 - DNA, 1011 bp, synthetic construct
  source 1..1011: mol_type = other DNA; note = Synthetic coding sequence
atggagtacctgggcggcggcagcgccctggacctgctgaagcccggccccctggaggagacctacatcgccaccatcctgagagagatcctgaagggcctggactacctgcacagcgagagaaagatccacagagacatcaaggccgccaacgtgctgctgagcgagcagggcgacgtgaagctggccgacttcggcgtggccggccagctgaccgacacccagatcaagagaaacaccttcgtgggcacccccttctggatggcccccgaggtgatcaagcagagcgcctacgacttcaaggccgacatctggagcctgggcatcaccgccatcgagctggccaagggcgagccccccaacagcgacctgcaccccatgagagtgctgttcctgatccccaagaacagcccccccaccctggagggccagcacagcaagcccttcaaggagttcgtggaggcctgcctgaacaaggaccccagattcagacccaccgccaaggagctgctgaagcacaagttcatcaccagatacaccaagaagaccagcttcctgaccgagctgatcgacagatacaagagatggaagagcgagggccacggcgaggagagcagcagcgaggacagcgacatcgacggcgaggccgaggacggcgagcagggccccatctggaccttcccccccaccatcagacccagcccccacagcaagctgcacaagggcaccgccctgcacagcagccagaagcccgccgagcccgtgaagagacagcccagaagccagtgcctgagcaccctggtgagacccgtgttcggcgaggtgttcagccagctgaaggagaagcacaagcagagcggcggcagcgtgggcgccctggaggagctggagaacgccttcagcctggccgaggagagctgccccggcatcagcgacaagctgatggtgcacctggtggagagagtgcagagattcagccacaacagaaaccacctgaccagcaccagatag

SEQ ID NO: 13485 - DNA, 1455 bp, synthetic construct
  source 1..1455: mol_type = other DNA; note = Synthetic coding sequence
atggtgcacgagaccagctacagcgcccagttcaagggcgaggccagcaagcccaccaccgccgacaacaaggtgatcgacagaagaagaatcagaagcctgtacagcgagcccttcaaggagccccccaaggtggagaagcccagcgtgcagagcagcaagcccaagaagaccagcgccagccacaagcccaccagaaaggccaaggacaagcaggccgtgagcggccaggccgccaagaagaagagcgccgagggccccagcaccaccaagcccgacgacaaggagcagagcaaggagatgaacaacaagctggccgaggccaaggagagcctggcccagcccgtgagcgacagcagcaagacccagggccccgtggccaccgagcccgacaaggaccagggcagcgtggtgcccggcctgctgaagggccagggccccatggtgcaggagcccctgaagaagcagggcagcgtggtgcccggcccccccaaggacctgggccccatgatccccctgcccgtgaaggaccaggaccacaccgtgcccgagcccctgaagaacgagagccccgtgatcagcgcccccgtgaaggaccagggccccagcgtgcccgtgccccccaagaaccagagccccatggtgcccgccaaggtgaaggaccagggcagcgtggtgcccgagagcctgaaggaccagggccccagaatccccgagcccgtgaagaaccaggcccccatggtgcccgcccccgtgaaggacgagggccccatggtgagcgccagcgtgaaggaccagggccccatggtgagcgcccccgtgaaggaccagggccccatcgtgcccgcccccgtgaagggcgagggccccatcgtgcccgcccccgtgaaggacgagggccccatggtgagcgcccccatcaaggaccaggaccccatggtgcccgagcaccccaaggacgagagcgccatggccaccgcccccatcaagaaccagggcagcatggtgagcgagcccgtgaagaaccagggcctggtggtgagcggccccgtgaaggaccaggacgtggtggtgcccgagcacgccaaggtgcacgacagcgccgtggtggcccccgtgaagaaccagggccccgtggtgcccgagagcgtgaagaaccaggaccccatcctgcccgtgctggtgaaggaccagggccccaccgtgctgcagccccccaagaaccagggcagaatcgtgcccgagcccctgaagaaccaggtgcccatcgtgcccgtgcccctgaaggaccaggaccccctggtgcccgtgcccgccaaggaccagggccccgccgtgcccgagcccctgaagacccagggccccagagacccccagctgcccaccgtgagccccctgcccagagtgatgatccccaccgccccccacaccgagtacatcgagagcagcccctag

SEQ ID NO: 13486 - DNA, 2103 bp, synthetic construct
  source 1..2103: mol_type = other DNA; note = Synthetic coding sequence
atggccctgggcgaggagaaggccgaggccgaggccagcgaggacaccaaggcccagagctacggcagaggcagctgcagagagcagccccccagactggaggccgagggcggcctgatcagccccgtgtggggcgccgagggcatccccgcccccacctgctggatcggcaccgaccccggcggccccagcagagcccaccagccccaggccagcgacgccaacagagagcccgtggccgagagaagcgagcccgccctgagcggcctgccccccgccaccatgggcagcggcgacctgctgctgagcggcgagagccaggtggagaagaccaagctgagcagcagcgaggagttcccccagaccctgagcctgcccagaaccaccaccatctgcagcggccacgacgccgacaccgaggacgaccccagcctggccgacctgccccaggccctggacctgagccagcagccccacagcagcggcctgagctgcctgagccagtggaagagcgtgctgagccccggcagcgccgcccagcccagcagctgcagcatcagcgccagcagcaccggcagcagcctgcagggccaccaggagagagccgagcccagaggcggcagcctggccaaggtgagcagcagcctggagcccgtggtgccccaggagcccagcagcgtggtgggcctgggccccagaccccagtggagcccccagcccgtgttcagcggcggcgacgccagcggcctgggcagaagaagactgagcttccaggccgagtactgggcctgcgtgctgcccgacagcctgccccccagccccgacagacacagccccctgtggaaccccaacaaggagtacgaggacctgctggactacacctaccccctgagacccggcccccagctgcccaagcacctggacagcagagtgcccgccgaccccgtgctgcaggacagcggcgtggacctggacagcttcagcgtgagccccgccagcaccctgaagagccccaccaacgtgagccccaactgcccccccgccgaggccaccgccctgcccttcagcggccccagagagcccagcctgaagcagtggcccagcagagtgccccagaagcagggcggcatgggcctggccagctggagccagctggccagcacccccagagcccccggcagcagagacgccagatgggagagaagagagcccgccctgagaggcgccaaggacagactgaccatcggcaagcacctggacatgggcagcccccagctgagaaccagagacagaggctggcccagccccagacccgagagagagaagagaaccagccagagcgccagaagacccacctgcaccgagagcagatggaagagcgaggaggaggtggagagcgacgacgagtacctggccctgcccgccagactgacccaggtgagcagcctggtgagctacctgggcagcatcagcaccctggtgaccctgcccaccggcgacatcaagggccagagccccctggaggtgagcgacagcgacggccccgccagcttccccagcagcagcagccagagccagctgccccccggcgccgccctgcagggcagcggcgaccccgagggccagaacccctgcttcctgagaagcttcgtgagagcccacgacagcgccggcgagggcagcctgggcagcagccaggccctgggcgtgagcagcggcctgctgaagaccagacccagcctgcccgccagactggacagatggcccttcagcgaccccgacgtggagggccagctgcccagaaagggcggcgagcagggcaaggagagcctggtgcagtgcgtgaagaccttctgctgccagctggaggagctgatctgctggctgtacaacgtggccgacgtgaccgaccacggcaccgccgccagaagcaacctgaccagcctgaagagcagcctgcagctgtacagagtgatctgcggccccggcagcggcctgttcccccacaagagcgtggccaagctgctggactacaaggtgaagagccagatcaccaacgtgtggtacgtgatcgcccagctgaccatcatccccgagatctag

SEQ ID NO: 13487 - DNA, 1626 bp, synthetic construct
  source 1..1626: mol_type = other DNA; note = Synthetic coding sequence
atgaagagctacgtgagcgagaccatggccagccccggcaaggacaactacagaatgaagagctacaagaacaacgccctgaaccccgaggagatgagaagaagaagagaggaggagggcatccagctgagaaagcagaagagagagcagcagctgttcaagagaagaaacgtggagctgatcaacgaggaggccgccatgttcgacagcctgctgatggacagctacgtgagcagcaccaccggcgagagcgtgatcaccagagagatggtggagatgctgttcagcgacgacagcgacctgcagctggccaccacccagaagttcagaaagctgctgagcaaggagcccagcccccccatcgacgaggtgatcaacacccccagagtggtggacagattcgtggagttcctgaagagaaacgagaactgcaccctgcagttcgaggccgcctgggccctgaccaacatcgccagcggcaccagccagcagaccaagatcgtgatcgaggccggcgccgtgcccatcttcatcgagctgctgaacagcgacttcgaggacgtgcaggagcaggccgtgtgggccctgggcaacatcgccggcgacagcagcgtgtgcagagactacgtgctgaactgcagcatcctgaaccccctgctgaccctgctgaccaagagcaccagactgaccatgaccagaaacgccgtgtgggccctgagcaacctgtgcagaggcaagaaccccccccccgagttcgccaaggtgagcccctgcctgcccgtgctgagcagactgctgttcagcagcgacagcgacctgctggccgacgcctgctgggccctgagctacctgagcgacggccccaacgagaagatccaggccgtgatcgacagcggcgtgtgcagaagactggtggagctgctgatgcacaacgactacaaggtggccagccccgccctgagagccgtgggcaacatcgtgaccggcgacgacatccagacccaggtgatcctgaactgcagcgccctgccctgcctgctgcacctgctgagcagccccaaggagagcatcagaaaggaggcctgctggaccatcagcaacatcaccgccggcaacagagcccagatccaggccgtgatcgacgccaacatcttccccgtgctgatcgagatcctgcagaaggccgagttcagaaccagaaaggaggccgcctgggccatcaccaacgccaccagcggcggcacccccgagcagatcagatacctggtgagcctgggctgcatcaagcccctgtgcgacctgctgaccgtgatggacagcaagatcgtgcaggtggccctgaacggcctggagaacatcctgagactgggcgagcaggagggcaagagaagcggcagcggcgtgaacccctactgcggcctgatcgaggaggcctacggcctggacaagatcgagttcctgcagagccacgagaaccaggagatctaccagaaggccttcgacctgatcgagcactacttcggcgtggaggacgacgacagcagcctggccccccaggtggacgagacccagcagcagttcatcttccagcagcccgaggcccccatggagggcttccagctgtag

SEQ ID NO: 13488 - DNA, 1716 bp, synthetic construct
  source 1..1716: mol_type = other DNA; note = Synthetic coding sequence
atgctggactgcggcatgcacatgggcttcaacgacgacagaagattccccgacttcagctacatcacccagaacggcagactgaccgacttcctggactgcgtgatcatcagccacttccacctggaccactgcggcgccctgccctacttcagcgagatggtgggctacgacggccccatctacatgacccaccccacccaggccatctgccccatcctgctggaggactacagaaagatcgccgtggacaagaagggcgaggccaacttcttcaccagccagatgatcaaggactgcatgaagaaggtggtggccgtgcacctgcaccagaccgtgcaggtggacgacgagctggagatcaaggcctactacgccggccacgtgctgggcgccgccatgttccagatcaaggtgggcagcgagagcgtggtgtacaccggcgactacaacatgacccccgacagacacctgggcgccgcctggatcgacaagtgcagacccaacctgctgatcaccgagagcacctacgccaccaccatcagagacagcaagagatgcagagagagagacttcctgaagaaggtgcacgagaccgtggagagaggcggcaaggtgctgatccccgtgttcgccctgggcagagcccaggagctgtgcatcctgctggagaccttctgggagagaatgaacctgaaggtgcccatctacttcagcaccggcctgaccgagaaggccaaccactactacaagctgttcatcccctggaccaaccagaagatcagaaagaccttcgtgcagagaaacatgttcgagttcaagcacatcaaggccttcgacagagccttcgccgacaaccccggccccatggtggtgttcgccacccccggcatgctgcacgccggccagagcctgcagatcttcagaaagtgggccggcaacgagaagaacatggtgatcatgcccggctactgcgtgcagggcaccgtgggccacaagatcctgagcggccagagaaagctggagatggagggcagacaggtgctggaggtgaagatgcaggtggagtacatgagcttcagcgcccacgccgacgccaagggcatcatgcagctggtgggccaggccgagcccgagagcgtgctgctggtgcacggcgaggccaagaagatggagttcctgaagcagaagatcgagcaggagctgagagtgaactgctacatgcccgccaacggcgagaccgtgaccctgcccaccagccccagcatccccgtgggcatcagcctgggcctgctgaagagagagatggcccagggcctgctgcccgaggccaagaagcccagactgctgcacggcaccctgatcatgaaggacagcaacttcagactggtgagcagcgagcaggccctgaaggagctgggcctggccgagcaccagctgagattcacctgcagagtgcacctgcacgacaccagaaaggagcaggagaccgccctgagagtgtacagccacctgaagagcgtgctgaaggaccactgcgtgcagcacctgcccgacggcagcgtgaccgtggagagcgtgctgctgcaggccgccgcccccagcgaggaccccggcaccaaggtgctgctggtgagctggacctaccaggacgaggagctgggcagcttcctgaccagcctgctgaagaagggcctgccccaggcccccagctag

SEQ ID NO: 13489 - DNA, 2232 bp, synthetic construct
  source 1..2232: mol_type = other DNA; note = Synthetic coding sequence
atggaggccgccgccgtgaccgtgaccagaagcgccaccagaagaagaagaagacagctgcagggcctggccgcccccgaggccggcacccaggaggagcaggaggaccaggagcccagacccagaagaagaagacccggcagaagcatcaaggacgaggaggaggagaccgtgttcagagaggtggtgagcttcagccccgaccccctgcccgtgagatactacgacaaggacaccaccaagcccatcagcttctacctgagcagcctggaggagctgctggcctggaagcccagactggaggacggcttcaacgtggccctggagcccctggcctgcagacagccccccctgagcagccagagacccagaaccctgctgtgccacgacatgatgggcggctacctggacgacagattcatccagggcagcgtggtgcagaccccctacgccttctaccactggcagtgcatcgacgtgttcgtgtacttcagccaccacaccgtgaccatcccccccgtgggctggaccaacaccgcccacagacacggcgtgtgcgtgctgggcaccttcatcaccgagtggaacgagggcggcagactgtgcgaggccttcctggccggcgacgagagaagctaccaggccgtggccgacagactggtgcagatcacccagttcttcagattcgacggctggctgatcaacatcgagaacagcctgagcctggccgccgtgggcaacatgccccccttcctgagatacctgaccacccagctgcacagacaggtgcccggcggcctggtgctgtggtacgacagcgtggtgcagagcggccagctgaagtggcaggacgagctgaaccagcacaacagagtgttcttcgacagctgcgacggcttcttcaccaactacaactggagagaggagcacctggagagaatgctgggccaggccggcgagagaagagccgacgtgtacgtgggcgtggacgtgttcgccagaggcaacgtggtgggcggcagattcgacaccgacaagagcctggagctgatcagaaagcacggcttcagcgtggccctgttcgcccccggctgggtgtacgagtgcctggagaagaaggacttcttccagaaccaggacaagttctggggcagactggagagatacctgcccacccacagcatctgcagcctgcccttcgtgaccagcttctgcctgggcatgggcgccagaagagtgtgctacggccaggaggaggccgtgggcccctggtaccacctgagcgcccaggagatccagcccctgttcggcgagcacagactgggcggcgacggcagaggctgggtgagaacccactgctgcctggaggacgcctggcacggcggcagcagcctgctggtgagaggcgtgatcccccccgaggtgggcaacgtggccgtgagactgttcagcctgcaggcccccgtgccccccaagatctacctgagcatggtgtacaagctggagggccccaccgacgtgaccgtggccctggagctgaccaccggcgacgccggcagctgccacatcggcggcatcagcgtgctgaacgccgagaccagcagcagacacagcctgagacccctgagagtgccccccaccaagctggccagatgggtgggcagatgcggcagacagctgagcggcggctgggtgcagcactgctacgaggtgagcctgagaggctgcctgctgctggacctgctggtgtgcttcagcagaccccccggcagcagagaggaggagagcttcacctgcagactgggcgagatccaggtggtggacgccgccagcctgctggcccccctgccccaggtgcaggccgtgaccatcagccacatcagatggcagcccagcgccagcgagagagagggcccccccgccctgctgcagctgagctgcaccctgcactggagcttcctgctgagccaggtgagatgcttcagaatccactgctggggcggcatgagcgacgacagccccggcagagagctgcccagacccgagatgcccatgttcctgggcctggccttcgccacccagtacagaatcgtggacctgctggtggaggccgccggccccggccaggacagaagaatggagttcctggtggagcccgtgcccaaggagggcttcagagtgccccaggccgagtggggcagagccgtgctgctgtacagcgcccccgcctag

SEQ ID NO: 13490 - DNA, 396 bp, synthetic construct
  source 1..396: mol_type = other DNA; note = Synthetic coding sequence
atggagctgagagtgcacatggtgagccacaccggcgagatgccctacaaggtgagactgggcctgagccccggccccggcctgggcggccccagaatcctgcccgccgagcccttcacctggggcgccgtgagacacctgccccacagcagctgccagggcgcctgcctgccctgcctgccctgcctgagcagcgcccccctgagcagacagggcctgagcgccgccagcccccccagaagcctgctgggcccctgcttcttcccctggagaaccggcctggccagcagcggccagctgagccccgaggccctgctgtgcaccatcctgcacaccagaagcggcgtgctgcccgagagcagccacagaggcctgcccctggtgcccgccctgtag

SEQ ID NO: 13491 - DNA, 909 bp, synthetic construct
  source 1..909: mol_type = other DNA; note = Synthetic coding sequence
atggagcacggcatcgtgaaggactggaacgacatggagagaatctggcagtacgtgtacagcaaggaccagctgcagaccttcagcgaggagcaccccgtgctgctgaccgaggcccccctgaaccccagaaagaacagagagagagccgccgaggtgttcttcgagaccttcaacgtgcccgccctgttcatcagcatgcaggccgtgctgagcctgtacgccaccggcagaaccaccggcgtggtgctggacagcggcgacggcgtgacccacgccgtgcccatctacgagggcttcgccatgccccacagcatcatgagaatcgacatcgccggcagagacgtgagcagattcctgagactgtacctgagaaaggagggctacgacttccacagcagcagcgagttcgagatcgtgaaggccatcaaggagagagcctgctacctgagcatcaacccccagaaggacgagaccctggagaccgagaaggcccagtactacctgcccgacggcagcaccatcgagatcggccccagcagattcagagcccccgagctgctgttcagacccgacctgatcggcgaggagagcgagggcatccacgaggtgctggtgttcgccatccagaagagcgacatggacctgagaagaaccctgttcagcaacatcgtgctgagcggcggcagcaccctgttcaagggcttcggcgacagactgctgagcgaggtgaagaagctggcccccaaggacgtgaagatcagaatcagcgccccccaggagagactgtacagcacctggatcggcggcagcatcctggccagcctggacaccttcaagaagatgtgggtgagcaagaaggagtacgaggaggacggcgccagaagcatccacagaaagaccttctag

SEQ ID NO: 13492 - DNA, 780 bp, synthetic construct
  source 1..780: mol_type = other DNA; note = Synthetic coding sequence
atgctgagatgcggccagatgatgctggcccaggccctgatctgcagacacctgggcagagactggagctgggagaagcagaaggagcagcccaaggagtaccagagaatcctgcagtgcttcctggacagaaaggactgctgctacagcatccaccagatggcccagatgggcgtgggcgagggcaagagcatcggcgagtggttcggccccaacaccgtggcccaggtgctgaagaagctggccctgttcgacgagtggaacagcctggccgtgtacgtgagcatggacaacaccgtggtgatcgaggacatcaagaagatgtgcagagtgctgcccctgagcgccgacaccgccggcgacagaccccccgacagcctgaccgccagcaaccagagcgacgagctgatcttcctggacccccacaccacccagaccttcgtggacaccgaggagaacggcaccgtgaacgaccagaccttccactgcctgcagagcccccagagaatgaacatcctgaacctggaccccagcgtggccctgggcttcttctgcaaggaggagaaggacttcgacaactggtgcagcctggtgcagaaggagatcctgaaggagaacctgagaatgttcgagctggtgcagaagcaccccagccactggccccccttcgtgccccccgccaagcccgaggtgaccaccaccggcgccgagttcatcgacagcaccgagcagctggaggagttcgacctggaggaggacttcgagatcctgagcgtgtag

SEQ ID NO: 13493 - DNA, 957 bp, synthetic construct
  source 1..957: mol_type = other DNA; note = Synthetic coding sequence
atgagagcccagagcgacgagctggagaagatcgagaagcacggcagaagcagcaaggacaaggagaacgccaagagcctggacaagcccgagcagttcctgtacgagctgagcctgatccccaacttcagcgagagagtgttctgcatcctgttccagagcaccttcagcgagagcatctgcagcatcagaagaaagctggagctgctgcagaagctgtgcgagaccctgaagaacggccccggcgtgatgcaggtgctgggcctggtgctggccttcggcaactacatgaacggcggcaacaagaccagaggccaggccgacggcttcggcctggacatcctgcccaagctgaaggacgtgaagagcagcgacaacagcagaagcctgctgagctacatcgtgagctactacctgagaaacttcgacgaggacgccggcaaggagcagtgcctgttccccctgcccgagccccaggacctgttccaggccagccagatgaagttcgaggacttccagaaggacctgagaaagctgaagaaggacctgaaggcctgcgaggtggaggccggcaaggtgtaccaggtgagcagcaaggagcacatgcagcccttcaaggagaacatggagcagttcatcatccaggccaagatcgaccaggaggccgaggagaacagcctgaccgagacccacaagtgcttcctggagaccaccgcctacttcttcatgaagcccaagctgggcgagaaggaggtgagccccaacgccttcttcagcatctggcacgagttcagcagcgacttcaaggacttctggaagaaggagaacaagctgctgctgcaggagagagtgaaggaggccgaggaggtgtgcagacagaagaagggcaagagcctgtacaagatcaagcccagacacgacagcggcatcaaggccaagatcagcatgaagacctag

SEQ ID NO: 13494 - DNA, 345 bp, synthetic construct
  source 1..345: mol_type = other DNA; note = Synthetic coding sequence
atgagcagcagcatgtggtacatcatgcagagcatccagagcaagtacagcctgagcgagagactgatcagaaccatcgccgccatcagaagcttcccccacgacaacgtggaggacctgatcagaggcggcgccgacgtgaactgcacccacggcaccctgaagcccctgcactgcgcctgcatggtgagcgacgccgactgcgtggagctgctgctggagaagggcgccgaggtgaacgccctggacggctacaacagaaccgccctgcactacgccgccgagaaggacgaggcctgcgtggaggtgctgctggagtacggcgccaaccccaacgccctgtag

SEQ ID NO: 13495 - DNA, 1365 bp, synthetic construct; identical to SEQ ID NO: 9722
  source 1..1365: mol_type = other DNA; note = Synthetic coding sequence

SEQ ID NO: 13496 - DNA, 1047 bp, synthetic construct; identical to SEQ ID NO: 9854
  source 1..1047: mol_type = other DNA; note = Synthetic coding sequence

SEQ ID NO: 13497 - DNA, 2163 bp, synthetic construct
  source 1..2163: mol_type = other DNA; note = Synthetic coding sequence
atgtacggcagcgccagaagcgtgggcaaggtggagcccagcagccagagccccggcagaagccccagactgcccagaagccccagactgggccacagaagaaccaacagcaccggcggcagcagcggcagcagcgtgggcggcggcagcggcaagaccctgagcatggagaacatccagagcctgaacgccgcctacgccaccagcggccccatgtacctgagcgaccacgagaacgtgggcagcgagacccccaagagcaccatgaccctgggcagaagcggcggcagactgccctacggcgtgagaatgaccgccatgggcagcagccccaacatcgccagcagcggcgtggccagcgacaccatcgccttcggcgagcaccacctgccccccgtgagcatggccagcaccgtgccccacagcctgagacaggccagagacaacaccatcatggacctgcagacccagctgaaggaggtgctgagagagaacgacctgctgagaaaggacgtggaggtgaaggagagcaagctgagcagcagcatgaacagcatcaagaccttctggagccccgagctgaagaaggagagagccctgagaaaggacgaggccagcaagatcaccatctggaaggagcagtacagagtggtgcaggaggagaaccaggtggacgccctgagactgagactggaggagaaggagaccatgctgaacaagaagaccaagcagatccaggacatggccgaggagaagggcacccaggccggcgagatccacgacctgaaggacatgctggacgtgaaggagagaaaggtgaacgtgctgcagaagaagatcgagaacctgcaggagcagctgagagacaaggagaagcagatgagcagcctgaaggagagagtgaagagcctgcaggccgacaccaccaacaccgacaccgccctgaccaccctggaggaggccctggccgagaaggagagaaccatcgagagactgaaggagcagagagacagagacgagagagagaagcaggaggagatcgacaactacaagaaggacctgaaggacctgaaggagaaggtgagcctgctgcagggcgacctgagcgagaaggaggccagcctgctggacctgaaggagcacgccagcagcctggccagcagcggcctgaagaaggacagcagactgaagaccctggagatcgccctggagcagaagaaggaggagtgcctgaagatggagagccagctgaagaaggcccacgaggccgccctggaggccagagccagccccgagatgagcgacagaatccagcacctggagagagagatcaccagatacaaggacgagagcagcaaggcccaggccgaggtggacagactgctggagatcctgaaggaggtggagaacgagaagaacgacaaggacaagaagatcgccgagctggagagcctgaccagcagacaggtgaaggaccagaacaagaaggtggccaacctgaagcacaaggagcaggtggagaagaagaagagcgcccagatgctggaggaggccagaagaagagaggacaacctgaacgacagcagccagcagctgcaggacagcctgagaaagaaggacgacagaatcgaggagctggaggaggccctgagagagagcgtgcagatcaccgccgagagagagatggtgctggcccaggaggagagcgccagaaccaacgccgagaagcaggtggaggagctgctgatggccatggagaaggtgaagcaggagctggagagcatgaaggccaagctgagcagcacccagcagagcctggccgagaaggagacccacctgaccaacctgagagccgagagaagaaagcacctggaggaggtgctggagatgaagcaggaggccctgctggccgccatcagcgagaaggacgccaacatcgccctgctggagctgagcagcagcaagaagaagacccaggaggaggtggccgccctgaagagagagaaggacagactggtgcagcagctgaagcagcagacccagaacagaatgaagctgatggccgacaactacgaggacgaccacttcaagagcagccacagcaaccagaccaaccacaagcccagccccgaccaggacgaggaggagggcatctgggcctag

SEQ ID NO: 13498 - DNA, 768 bp, synthetic construct
  source 1..768: mol_type = other DNA; note = Synthetic coding sequence
atggccgccagcaccatgagcgtgtgcagcagcgcctgcagcgacagctggcaggtggacgcctgccccgagagctgctgcgagccccactgctgcgccctgagctgctgcgcccccgccccctgcctgaccctggtgtgcacccccgtgagcagagtgagcagcccctgctgccaggccgcctgcgagcccagcccctgccagagcggctgcaccagcagctgcacccccagctgctgccagcagagcagctgccagcccgcctgctgcaccagcagcccctgccagcaggcctgctgcgtgcccgtgtgctgcaagcccgtgtgctgcctgcccacctgcagcaaggacagcagcagctgctgccagcagagcagctgccagcccacctgctgcgccagcagcagcagccagcagagctgctgcgtgcccgtgtgctgcaagcccgtgtgctacgtgcccacctgcagcgaggacagcagcagctgctgccagcagagcagctgccaccccgcctgctgcaccagcagcccctgccagcaggcctgctgcgtgcccgtgagatgcaagcccgtgtgctgcaagcccatctgctgcgtgcccgtgtgcagcggcgccagcaccagctgctgccagcagagcagctgccagcccgcctgctgcaccaccagctgctgcagacccagcagcagcgtgagcctgctgtgcagacccgtgtgcagacccgcctgctgcagcctgtgcagcggccaggagagcagctgctag

SEQ ID NO: 13499 - DNA, 2562 bp, synthetic construct
  source 1..2562: mol_type = other DNA; note = Synthetic coding sequence
atgagcgagaaggtggactggctgcagagccagaacggcgtgtgcaaggtggacgtgtacagccccggcgacaaccaggcccaggactggaagatggacaccagcaccgaccccgtgagagtgctgagctggctgagaagagacctggagaagagcaccgccgagttccaggacgtgagattcaagcccggcgagagcttcggcggcgagaccagcaacagcggcgacccccacaagggcttcagcgtggactactacaacaccaccaccaagggcacccccgagagactgcacttcgagatgacccacaaggagatcccctgccagggccccagagcccagctgggcaacggcagcagcgtggacgaggtgagcttctacgccaacagactgaccaacctggtgatcgccatggccagaaaggagatcaacgagaagatcgacggcagcgagaacaagtgcgtgtaccagagcctgtacatgggcaacgagcccacccccaccaagagcctgagcaagatcgccagcgagctggtgaacgagaccgtgagcgcctgcagcagaaacgccgcccccgacaaggcccccggcagcggcgacagagtgagcggcagcagccagagcccccccaacctgaagtacaagagcaccctgaagatcaaggagagcaccaaggagagacagggccccgacgacaagccccccagcaagaagagcttcttctacaaggaggtgttcgagagcagaaacggcgactacgccagagagggcggcagattcttccccagagagagaaagagattcagaggccaggagagacccgacgacttcaccgccagcgtgagcgagggcatcatgacctacgccaacagcgtggtgagcgacatgatggtgagcatcatgaagaccctgaagatccaggtgaaggacaccaccatcgccaccatcctgctgaagaaggtgctgctgaagcacgccaaggaggtggtgagcgacctgatcgacagcttcctgagaaacctgcacagcgtgaccggcaccctgatgaccgacacccagttcgtgagcgccgtgaagagaaccgtgttcagccacggcagccagaaggccaccgacatcatggacgccatgctgagaaagctgtacaacgtgatgttcgccaagaaggtgcccgagcacgtgagaaaggcccaggacaaggccgagagctacagcctgatcagcatgaagggcatgggcgaccccaagaacagaaacgtgaacttcgccatgaagagcgagaccaagctgagagagaagatgtacagcgagcccaagagcgaggaggagacctgcgccaagaccctgggcgagcacatcatcaaggagggcctgaccctgtggcacaagacccagcagaaggagtgcaagagcctgggcttccagcacgccgccttcgaggcccccaacacccagagaaagcccgccagcgacatcagcttcgagtaccccgaggacatcggcaacctgagcctgcccccctacccccccgagaagcccgagaacttcatgtacgacagcgacagctgggccgaggacctgatcgtgagcgccctgctgctgatccagtaccacctggcccagggcggcagaagagacgccagaagcttcgtggaggccgccggcaccaccaacttccccgccaacgagccccccgtggcccccgacgagagctgcctgaagagcgcccccatcgtgggcgaccaggagcaggccgagaagaaggacctgagaagcgtgttcttcaacttcatcagaaacctgctgagcgagaccatcttcaagagagaccagagccccgagcccaaggtgcccgagcagcccgtgaaggaggacagaaagctgtgcgagagacccctggccagcagcccccccagactgtacgaggacgacgagacccccggcgccctgagcggcctgaccaagatggccgtgagccagatcgacggccacatgagcggccagatggtggagcacctgatgaacagcgtgatgaagctgtgcgtgatcatcgccaagagctgcgacgccagcctggccgagctgggcgacgacaagagcggcgacgccagcagactgaccagcgccttccccgacagcctgtacgagtgcctgcccgccaagggcaccggcagcgccgaggccgtgctgcagaacgcctaccaggccatccacaacgagatgagaggcaccagcggccagccccccgagggctgcgccgcccccaccgtgatcgtgagcaaccacaacctgaccgacaccgtgcagaacaagcagctgcaggccgtgctgcagtgggtggccgccagcgagctgaacgtgcccatcctgtacttcgccggcgacgacgagggcatccaggagaagctgctgcagctgagcgccgccgccgtggacaagggctgcagcgtgggcgaggtgctgcagagcgtgctgagatacgagaaggagagacagctgaacgaggccgtgggcaacgtgacccccctgcagctgctggactggctgatggtgaacctgtag

SEQ ID NO: 13500 - DNA, 1263 bp, synthetic construct
  source 1..1263: mol_type = other DNA; note = Synthetic coding sequence
atggtgcacggcagaaaggccaacgcccaggtgatggagagcgaggagttcatgctgctgcccgccaaccagctgatcgacatcatcagcagcgacgagctgaacgtgagaagcgaggagcaggtgttcaacgccgtgatggcctgggtgaagtacagcatccaggagagaagaccccagctgccccaggtgctgcagcacgtgagactgcccctgctgagccccaagttcctggtgggcaccgtgggcagcgaccccctgatcaagagcgacgaggagtgcagagacctggtggacgaggccaagaactacctgctgctgccccaggagagacccctgatgcagggccccagaaccagacccagaaagcccatcagatgcggcgaggtgctgttcgccgtgggcggctggtgcagcggcgacgccatcagcagcgtggagagatacgacccccagaccaacgagtggagaatggtggccagcatgagcaagagaagatgcggcgtgggcgtgagcgtgctggacgacctgctgtacgccgtgggcggccacgacggcagcagctacctgaacagcgtggagagatacgaccccaagaccaaccagtggagcagcgacgtggcccccaccagcacctgcagaaccagcgtgggcgtggccgtgctgggcggcttcctgtacgccgtgggcggccaggacggcgtgagctgcctgaacatcgtggagagatacgaccccaaggagaacaagtggaccagagtggccagcatgagcaccagaagactgggcgtggccgtggccgtgctgggcggcttcctgtacgccgtgggcggcagcgacggcaccagccccctgaacaccgtggagagatacaacccccaggagaacagatggcacaccatcgcccccatgggcaccagaagaaagcacctgggctgcgccgtgtaccaggacatgatctacgccgtgggcggcagagacgacaccaccgagctgagcagcgccgagagatacaaccccagaaccaaccagtggagccccgtggtggccatgaccagcagaagaagcggcgtgggcctggccgtggtgaacggccagctgatggccgtgggcggcttcgacggcaccacctacctgaagaccatcgaggtgttcgaccccgacgccaacacctggagactgtacggcggcatgaactacagaagactgggcggcggcgtgggcgtgatcaagatgacccactgcgagagccacatctggtag

SEQ ID NO: 13501 - DNA, 519 bp, synthetic construct
  source 1..519: mol_type = other DNA; note = Synthetic coding sequence
atgagctgcaccatcgagaaggccctggccgacgccaaggccctggtggagagactgagagaccacgacgacgccgccgagagcctgatcgagcagaccaccgccctgaacaagagagtggaggccatgaagcagtaccaggaggagatccaggagctgaacgaggtggccagacacagacccagaagcaccctggtgatgggcatccagcaggagaacagacagatcagagagctgcagcaggagaacaaggagctgagaaccagcctggaggagcaccagagcgccctggagctgatcatgagcaagtacagagagcagatgttcagactgctgatggccagcaagaaggacgaccccggcatcatcatgaagctgaaggagcagcacagcaagatcgacatggtgcacagaaacaagagcgagggcttcttcctggacgccagcagacacatcctggaggccccccagcacggcctggagagaagacacctggaggccaaccagaacgtgcactag

SEQ ID NO: 13502 - DNA, 813 bp, synthetic construct
  source 1..813: mol_type = other DNA; note = Synthetic coding sequence
atgctgttcatcttccccctgagcctgccctggagacccagctgctggaaggagagctgcagcaccggccagagacaggccggcagaagcagagaggacagcgtgacccccccccccagcagcccctggcccaccccccccgccggcgccatgagcaccaagcaggaggccagaagagacgagggcgaggccagaaccagaggccaggaggcccagctgagagacagagcccacctgagcctgcacaaggacagcgccgacctgctgcccctggacagcctgaagagactgggcaccagcaaggacctgcagcccagaagcgtgatccagagaagactggtggagggcaaccccaactggctgcagggcgagccccccagaatgcaggacctgatccacggccaggagagcagaagaaagaccagcagaaccgagatccccgccctgctggtgaactgcaagtgccaggaccagctgctgagagtggccgtggacaccggcacccagtacaacagaatcagcgccggctgcctgagcagactgggcctggagaagagagtgctgaaggccagcgccggcgacctggcccccggcccccccacccaggtggagcagctggagctgcagctgggccaggagaccgtggtgtgcagcgcccaggtggtggacgccgagagccccgagttctgcctgggcctgcagaccctgctgagcctgaagtgctgcatcgacctggagcacggcgtgctgagactgaaggcccccttcagcgagctgcccttcctgcccctgtaccaggagcccggccagtag

SEQ ID NO: 13503 - DNA, 243 bp, synthetic construct
  source 1..243: mol_type = other DNA; note = Synthetic coding sequence
accagctgctgcagacccagcagcagcgtgagcctgctgtgccaccccgtgtgcagctgcagccccgcctgccagcccacctgctgcatccacagcccctgccaggccagctgctacgtgcccgtgagctgccagcccatcatctacgtgacccccagctgccagagcagcggctgctgccagcccccctgcaccaccgccctgtgcagacccatcagctgcagcacccccagctgctgctag

SEQ ID NO: 13504 - DNA, 2013 bp, synthetic construct
  source 1..2013: mol_type = other DNA; note = Synthetic coding sequence
atggccctgggcgaggagaaggccgaggccgaggccagcgaggacaccaaggcccagagctacggcagaggcagctgcagagagagagagctggacatccccggccccatgagcggcgagcagccccccagactggaggccgagggcggcctgatcagccccgtgtggggcgccgagggcatccccgcccccacctgctggatcggcaccgaccccggcggccccagcagagcccaccagccccaggccagcgacgccaacagagagcccgtggccgagagaagcgagcccgccctgagcggcctgccccccgccaccatgggcagcggcgacctgctgctgagcggcgagagccaggtggagaagaccaagctgagcagcagcgaggagttcccccagaccctgagcctgcccagaaccaccaccatctgcagcggccacgacgccgacaccgaggacgaccccagcctggccgacctgccccaggccctggacctgagccagcagccccacagcagcggcctgagctgcctgagccagtggaagagcgtgctgagccccggcagcgccgcccagcccagcagctgcagcatcagcgccagcagcaccggcagcagcctgcagggccaccaggagagagccgagcccagaggcggcagcctggccaaggtgagcagcagcctggagcccgtggtgccccaggagcccagcagcgtggtgggcctgggccccagaccccagtggagcccccagcccgtgttcagcggcggcgacgccagcggcctgggcagaagaagactgagcttccaggccgagtactgggcctgcgtgctgcccgacagcctgccccccagccccgacagacacagccccctgtggaaccccaacaaggagtacgaggacctgctggactacacctaccccctgagacccggcccccagctgcccaagcacctggacagcagagtgcccgccgaccccgtgctgcaggacagcggcgtggacctggacagcttcagcgtgagccccgccagcaccctgaagagccccaccaacgtgagccccaactgcccccccgccgaggccaccgccctgcccttcagcggccccagagagcccagcctgaagcagtggcccagcagagtgccccagaagcagggcggcatgggcctggccagctggagccagctggccagcacccccagagcccccggcagcagagacgccagatgggagagaagagagcccgccctgagaggcgccaaggacagactgaccatcggcaagcacctggacatgggcagcccccagctgagaaccagagacagaggctggcccagccccagacccgagagagagaagagaaccagccagagcgccagaagacccacctgcaccgagagcagatggaagagcgaggaggaggtggagagcgacgacgagtacctggccctgcccgccagactgacccaggtgagcagcctggtgagctacctgggcagcatcagcaccctggtgaccctgcccaccggcgacatcaagggccagagccccctggaggtgagcgacagcgacggccccgccagcttccccagcagcagcagccagagccagctgccccccggcgccgccctgcagggcagcggcgaccccgagggccagaacccctgcttcctgagaagcttcgtgagagcccacgacagcgccggcgagggcagcctgggcagcagccaggccctgggcgtgagcagcggcctgctgaagaccagacccagcctgcccgccagactggacagatggcccttcagcgaccccgacgtggagggccagctgcccagaaagggcggcgagcagggcaaggagagcctggtgcagtgcgtgaagaccttctgctgccagctggaggagctgatctgctggctgtacaacgtggccgacgtgaccgaccacggcaccgccgccagaagcaacctgaccagcctgaagagcagcctgcagctgtacagattctag

SEQ ID NO: 13505 - DNA, 702 bp, synthetic construct
  source 1..702: mol_type = other DNA; note = Synthetic coding sequence
atgaagcagctgatcgaggacaccgagaagaacaaggtgtacgtggccatggtgaccgactacggcgccttcatcaagatccccggctgcagaaagcagggcctggtgcacagaacccacatgagcagctgcagagtggacaagcccagcgagatcgtggacgtgggcgacaaggtgtgggtgaagctgatcggcagagagatgaagaacgacagaatcaaggtgagcctgagcatgaaggtggtgaaccagggcaccggcaaggacctggaccccaacaacgtgatcatcgagcaggaggagagaagaagaagaagcttccaggactacaccggccagaagatcaccctggaggccgtgctgaacaccacctgcaagaagtgcggctgcaagggccacttcgccaaggactgcttcatgcagcccggcggcaccaagtacagcctgatccccgacgaggaggaggagaaggaggaggccaagagcgccgagttcgagaagcccgaccccaccagaaaccccagcagaaagagaaagaaggagaagaagaagaagaagcacagagacagaaagagcagcgacagcgacagcagcgacagcgagagcgacaccggcaagagagccagacacaccagcaaggacagcaaggccgccaagaagaagaagaagaagaagaagcacaagaagaagcacaaggagtag

SEQ ID NO: 13506 - DNA, 492 bp, synthetic construct
  source 1..492: mol_type = other DNA; note = Synthetic coding sequence
atgggctggagactgctgacccaggacgagggccccgccctggtgcccggcggcagactgggcgacctgtgggactaccaccagcacagatacctgcagggcgtgcccgagggcgtgagagacctgccccccggcgtggccctgcccctggagagcaacctggccttcatgaacggcgtgagcttcaccaagggctgctacatcggccaggagctgaccgccagaacccaccacatgggcgtgatcagaaagagactgttccccgtgagattcctggaccccctgcccaccagcggcatcacccccggcgccaccgtgctgaccgccagcggccagaccgtgggcaagttcagagccggccagggcaacgtgggcctggccctgctgtggagcgagaagatcaagggccccctgcacatcagagccagcgagggcgcccaggtggccctggccgccagcgtgcccgactggtggcccaccgtgagcaagtag

SEQ ID NO: 13507 - DNA, 804 bp, synthetic construct
  source 1..804: mol_type = other DNA; note = Synthetic coding sequence
atggccatggagatgagactgcccgtggccagaaagcccctgagcgagagactgggcagagacaccaagaagcacctggtggtgcccggcgacaccatcaccaccgacaccggcttcatgagaggccacggcacctacatgggcgaggagaagctgatcgccagcgtggccggcagcgtggagagagtgaacaagctgatctgcgtgaaggccctgaagaccagatacatcggcgaggtgggcgacatcgtggtgggcagaatcaccgaggtgcagcagaagagatggaaggtggagaccaacagcagactggacagcgtgctgctgctgagcagcatgaacctgcccggcggcgagctgagaagaagaagcgccgaggacgagctggccatgagaggcttcctgcaggagggcgacctgatcagcggcgtgctggtgcaggtgagccccagcctggtgaagagacagaagacccacttccacgacctgccctgcggcgccagcgtgatcctgggcaacaacggcttcatctggatctaccccacccccgagcacaaggaggaggaggccggcggcttcatcgccaacctggagcccgtgagcctggccgacagagaggtgatcagcagactgagaaactgcatcatcagcctggtgacccagagaatgatgctgtacgacaccagcatcctgtactgctacgaggccagcctgccccaccagatcaaggacatcctgaagcccgagatcatggaggagatcgtgatggagaccagacagagactgctggagcaggagggctag

SEQ ID NO: 13508 - DNA, 3111 bp, synthetic construct
  source 1..3111: mol_type = other DNA; note = Synthetic coding sequence
atgcccgtgttcaaggaggtgaaggtgcacctgctggaggacgccggcatcgagaaggacgccgtgacccaggagaccagaatcagccccagcggcatcgacagcgccaccaccgtggccgccgccaccgccgccgccatcgccaccgccgcccccctgatcaaggtgcagagcgacctggaggccaaggtgaacagcgtgaccgagctgctgagcaagctgcaggagaccgacaagcacctgcagagagtgaccgagcagcagaccagcatccagagaaagcaggagaagctgcactgccacgaccacgagaagcagatgaacgtgttcatggagcagcacatcagacacctggagaagctgcagcagcagcagatcgacatccagacccacttcatcagcgccgccctgaagaccagcagcttccagcccgtgagcatgcccagcagcagagccgtggagaagtacagcgtgaagcccgagcaccccaacctgggcagctgcaaccccagcctgtacaacaccttcgccagcaagcaggcccccctgaaggaggtggaggacaccagcttcgacaagcagaagagccccctggagacccccgcccccagaagattcgcccccgtgcccgtgagcagagacgacgagctgagcaagagagagaacctgctggaggagaaggagaacatggaggtgagctgccacagaggcaacgtgagactgctggagcagatcctgaacaacaacgacagcctgaccagaaagagcgagagcagcaacaccaccagcctgaccagaagcaagatcggctggacccccgagaagaccaacagattccccagctgcgaggagctggagaccaccaaggtgaccatgcagaagagcgacgacgtgctgcacgacctgggccagaaggagaaggagaccaacagcatggtgcagcccaaggagagcctgagcatgctgaagctgcccgacctgccccagaacagcgtgaagctgcagaccaccaacaccaccagaagcgtgctgaaggacgccgagaagatcctgagaggcgtgcagaacaacaagaaggtgctggaggagaacctggaggccatcatcagagccaaggacggcgccgccatgtacagcctgatcaacgccctgagcaccaacagagagatgagcgagaagatcagaatcagaaagaccgtggacgagtggatcaagaccatcagcgccgagatccaggacgagctgagcagaaccgactacgagcagaagagattcgaccagaagaaccagagaaccaagaagggccagaacatgaccaaggacatcagaaccaacacccaggacaagaccgtgaacaagagcgtgatccccagaaagcacagccagaagcagatcgaggagcacttcagaaacctgcccatgagaggcatgcccgccagcagcctgcagaaggagagaaaggagggcctgctgaaggccaccaccgtgatccaggacgaggactacatgctgcaggtgtacggcaagcccgtgtaccagggccacagaagcaccctgaagaagggcccctacctgagattcaacagccccagccccaagagcagaccccagagacccaaggtgatcgagagagtgaagggcaccaaggtgaagagcatcagaacccagaccgacttctacgccaccaagcccaagaagatggacagcaagatgaagcacagcgtgcccgtgctgccccacggcgaccagcagtacctgttcagccccagcagagagatgcccaccttcagcggcaccctggagggccacctgatccccatggccatcctgctgggccagacccagagcaacagcgacaccatgccccccgccggcgtgatcgtgagcaagccccaccccgtgaccgtgaccaccagcatcccccccagcagcagaaaggtggagaccggcgtgaagaagcccaacatcgccatcgtggagatgaagagcgagaagaaggaccccccccagctgaccgtgcaggtgctgcccagcgtggacatcgacagcatcagcaacagcagcgccgacgtgctgagccccctgagcagccccaaggaggccagcctgccccccgtgcagacctggatcaagacccccgagatcatgaaggtggacgaggaggaggtgaagttccccggcaccaacttcgacgagatcatcgacgtgatccaggaggaggagaagtgcgacgagatccccgacagcgagcccatcctggagttcaacagaagcgtgaaggccgacagcaccaagtacaacggcccccccttcccccccgtggccagcaccttccagcccaccgccgacatcctggacaaggtgatcgagagaaaggagaccctggagaacagcctgatccagtgggtggagcaggagatcatgagcagaatcatcagcggcctgttccccgtgcagcagcagatcgcccccagcatcagcgtgagcgtgagcgagaccagcgagcccctgaccagcgacatcgtggagggcaccagcagcggcgccctgcagctgttcgtggacgccggcgtgcccgtgaacagcaacgtgatcaagcacttcgtgaacgaggccctggccgagaccatcgccgtgatgctgggcgacagagaggccaagaagcagggccccgtggccaccggcgtgagcggcgacgccagcaccaacgagacctacctgcccgccagagtgtgcacccccctgcccaccccccagcccacccccccctgcagccccagcagccccgccaaggagtgcgtgctggtgaagacccccgacagcagcccctgcgacagcgaccacgacatggccttccccgtgaaggagatctgcgccgagaagggcgacgacatgcccgccatcatgctggtgaacacccccaccgtgacccccaccaccacccccccccccgccgccgccgtgttcacccccaccctgagcgacatcagcatcgacaagctgaaggtgagcagccccgagctgcccaagccctggggcgacggcgacctgcccctggaggaggagaaccccaacagcccccaggaggagctgcaccccagagccatgtag

SEQ ID NO: 13509 - DNA, 3351 bp, synthetic construct; identical to SEQ ID NO: 10541
  source 1..3351: mol_type = other DNA; note = Synthetic coding sequence

SEQ ID NO: 13510 - DNA, 816 bp, synthetic construct
  source 1..816: mol_type = other DNA; note = Synthetic coding sequence
atgagacagctgcaccccgaggccatcgccgccatccagagcaaggccctgttcagcaaggccgaggagcagctgctgagcaaggtgggcagcaccagccagcccaccctggagaccttccaggacctgctgcacagacaccccgacgccttctacctggccagaaccgccaaggccctgcaggcccactggcagctgatgaagcagtactacctgctggaggaccagaccgtgcagcccctgcccaagggcgaccaggtgctgaacttcagcgacgccgaggacctgatcgacgacagcaagctgaaggacatgagagacgaggtgctggagcacgagctgatggtggccgacagaagacagaagagagagatcagacagctggagcaggagctgcacaagtggcaggtgctggtggacagcatcaccggcatgagcagccccgacttcgacaaccagaccctggccgtgctgagaggcagaatggtgagatacctgatgagaagcagagagatcaccctgggcagagccaccaaggacaaccagatcgacgtggacctgagcctggagggccccgcctggaagatcagcagaaagcagggcgtgatcaagctgaagaacaacggcgacttcttcatcgccaacgagggcagaagacccatctacatcgacggcagacccgtgctgtgcggcagcaagtggagactgagcaacaacagcgtggtggagatcgccagcctgagattcgtgttcctgatcaaccaggacctgatcgccctgatcagagccgaggccgccaagatcaccccccagtag

SEQ ID NO: 13511 - DNA, 2751 bp, synthetic construct
  source 1..2751: mol_type = other DNA; note = Synthetic coding sequence
atggagatgcccctgccccccgacgaccaggagctgagaaacgtgatcgacaagctggcccagttcgtggccagaaacggccccgagttcgagaagatgaccatggagaagcagaaggacaaccccaagttcagcttcctgttcggcggcgagttctacagctactacaagtgcaagctggccctggagcagcagcagctgatctgcaagcagcagacccccgagctggagcccgccgccaccatgccccccctgccccagccccccctggcccccgccgcccccatcccccccgcccagggcgcccccagcatggacgagctgatccagcagagccagtggaacctgcagcagcaggagcagcacctgctggccctgagacaggagcaggtgaccgccgccgtggcccacgccgtggagcagcagatgcagaagctgctggaggagacccagctggacatgaacgagttcgacaacctgctgcagcccatcatcgacacctgcaccaaggacgccatcagcgccggcaagaactggatgttcagcaacgccaagagccccccccactgcgagctgatggccggccacctgagaaacagaatcaccgccgacggcgcccacttcgagctgagactgcacctgatctacctgatcaacgacgtgctgcaccactgccagagaaagcaggccagagagctgctggccgccctgcagaaggtggtggtgcccatctactgcaccagcttcctggccgtggaggaggacaagcagcagaagatcgccagactgctgcagctgtgggagaagaacggctacttcgacgacagcatcatccagcagctgcagagccccgccctgggcctgggccagtaccaggccaccctgatcaacgagtacagcagcgtggtgcagcccgtgcagctggccttccagcagcagatccagaccctgaagacccagcacgaggagttcgtgaccagcctggcccagcagcagcagcagcagcagcagcagcagcagcagctgcagatgccccagatggaggccgaggtgaaggccaccccccccccccccgcccccccccccgcccccgcccccgcccccgccatcccccccaccacccagcccgacgacagcaagccccccatccagatgcccggcagcagcgagtacgaggcccccggcggcgtgcaggaccccgccgccgccggccccagaggccccggcccccacgaccagatcccccccaacaagcccccctggttcgaccagccccaccccgtggccccctggggccagcagcagccccccgagcagcccccctacccccaccaccagggcggccccccccactgccccccctggaacaacagccacgagggcatgtggggcgagcagagaggcgaccccggctggaacggccagagagacgccccctggaacaaccagcccgacgccgcctggaacagccagttcgagggcccctggaacagccagcacgagcagcccccctggggcggcggccagagagagccccccttcagaatgcagagacccccccacttcagaggccccttccccccccaccagcagcacccccagttcaaccagcccccccacccccacaacttcaacagattcccccccagattcatgcaggacgacttcccccccagacaccccttcgagagacccccctacccccacagattcgactacccccagggcgacttccccgccgagatgggccccccccaccaccaccccggccacagaatgccccaccccggcatcaacgagcaccccccctgggccggcccccagcaccccgacttcggcccccccccccacggcttcaacggccagcccccccacatgagaagacagggccccccccacatcaaccacgacgaccccagcctggtgcccaacgtgccctacttcgacctgcccgccggcctgatggcccccctggtgaagctggaggaccacgagtacaagcccctggaccccaaggacatcagactgcccccccccatgccccccagcgagagactgctggccgccgtggaggccttctacagcccccccagccacgacagacccagaaacagcgagggctgggagcagaacggcctgtacgagttcttcagagccaagatgagagccagaagaagaaagggccaggagaagagaaacagcggccccagcagaagcagaagcagaagcaagagcagaggcagaagcagcagcagaagcaacagcagaagcagcaagagcagcggcagctacagcagaagcagaagcagaagctgcagcagaagctacagcagaagcagaagcagaagcagaagcagaagcagaagcagcagaagcagaagcagaagccagagcagaagcagaagcaagagctacagccccggcagaagaagaagaagcagaagcagaagccccaccccccccagcagcgccggcctgggcagcaacagcgccccccccatccccgacagcagactgggcgaggagaacaagggccaccagatgctggtgaagatgggctggagcggcagcggcggcctgggcgccaaggagcagggcatccaggaccccatcaagggcggcgacgtgagagacaagtgggaccagtacaagggcgtgggcgtggccctggacgacccctacgagaactacagaagaaacaagagctacagcttcatcgccagaatgaaggccagagacgagtgcaagtag

SEQ ID NO: 13512 - DNA, 963 bp, synthetic construct
  source 1..963: mol_type = other DNA; note = Synthetic coding sequence
atgagcaagagcgagagccccaaggagcccgagcagctgagaaagctgttcatcggcggcctgagcttcgagaccaccgacgagagcctgagaagccacttcgagcagtggggcaccctgaccgactgcgtggtgatgagagaccccaacaccaagagaagcagaggcttcggcttcgtgacctacgccaccgtggaggaggtggacgccgccatgaacgccagaccccacaaggtggacggcagagtggtggagcccaagagagccgtgagcagagaggacagccagagacccggcgcccacctgaccgtgaagaagatcttcgtgggcggcatcaaggaggacaccgaggagcaccacctgagagactacttcgagcagtacggcaagatcgaggtgatcgagatcatgaccgacagaggcagcggcaagaagagaggcttcgccttcgtgaccttcgacgaccacgacagcgtggacaagatcgtgatccagaagtaccacaccgtgaacggccacaactgcgaggtgagaaaggccctgagcaagcaggagatggccagcgccagcagcagccagagaggcagaagcggcagcggcaacttcggcggcggcagaggcggcggcttcggcggcaacgacaacttcggcagaggcggcaacttcagcggcagaggcggcttcggcggcagcagaggcggcggcggctacggcggcagcggcgacggctacaacggcttcggcaacgacggcagcaacttcggcggcggcggcagctacaacgacttcggcaactacaacaaccagagcagcaacttcggccccatgaagggcggcaacttcggcggcagaagcagcggcccctacggcggcggcggccagtacttcgccaagcccagaaaccagggcggctacggcggcagcagcagcagcagcagctacggcagcggcagaagattctag

SEQ ID NO: 13513 - DNA, 735 bp, synthetic construct; identical to SEQ ID NO: 10072
  source 1..735: mol_type = other DNA; note = Synthetic coding sequence

SEQ ID NO: 13514 - DNA, 4125 bp, synthetic construct
  source 1..4125: mol_type = other DNA; note = Synthetic coding sequence
atgaccagcgccgccgagatcaagaagccccccgtggcccccaagcccaagttcgtggtggccaacaacaagcccgcccccccccccatcgcccccaagcccgacatcgtgatcagcagcgtgccccagagcaccaagaagatgaagcccgccatcgcccccaagcccaaggtgctgaagaccagccccgtgagagagatcggccagagccccagcagaaagatcatgctgaacctggagggccacaagcaggagctggccgagagcaccgacaacttcaactgcaagtacgagggcaaccagagcaacgactacatcagccccatgtgcagctgcagcagcgagtgcatccacaagctgggccacagagagaacctgtgcgtgaagcagctggtgctggagcccctggagatgaacgagaacctggagaacagcaagatcgacgagaccctgaccatcaagaccagaagcaagtgcgacctgtacggcgagaaggccaagaaccagggcggcgtggtgctgaaggccagcgtgctggaggaggagctgaaggacgccctgatccaccagatgccccccttcatcagcgcccagaagcacagacccaccgacagccccgagatgaacggcggctgcaacagcaacggccagttcagaatcgagttcgccgacctgagccccagccccagcagcttcgagaaggtgcccgaccaccacagctgccacctgcagctgcccagcgacgagtgcgagcacttcgagacctgccaggacgacagcgagaagagcaacaactgcttccagagcagcgagctggaggccctggagaacggcaagagaagcaccctgatcagcagcgacggcgtgagcaagaagagcgaggtgaaggacctgggccccctggagatccacctggtgccctacacccccaagttccccacccccaagcccagaaagaccagaaccgccagactgctgagacagaagtgcgtggacacccccagcgagagcaccgaggagcccggcaacagcgacagcagcagcagctgcctgaccgagaacagcctgaagatcaacaagatcagcgtgctgcaccagaacgtgctgtgcaagcaggagcaggtggacaagatgaagctgggcaacaagagcgagctgaacatggagagcaacagcgacgcccaggacctggtgaacagccagaaggccatgtgcaacgagaccaccagcttcgagaagatggcccccagcttcgacaaggacagcaacctgagcagcgacagcaccaccgtggacggcagcagcatgagcctggccgtggacgagggcaccggcttcatcagatgcaccgtgagcatgagcctgcccaagcagctgaagctgacctgcaacgagcacctgcagagcggcagaaacctgggcgtgagcgccccccagatgcagaaggagagcgtgatcaaggaggagaacagcctgagaatcgtgcccaagaagccccagagacacagcctgcccgccaccggcgtgctgaagaaggccgccagcgaggagctgctggagaagagcagctaccccagcagcgaggagaagagcagcgagaagagcctggagagaaaccacctgcagcacctgtgcgcccagaacagaggcgtgagcagcagcttcgacatgcccaagagagccagcgagaagcccgtgtggaagctgccccaccccatcctgcccttcagcggcaaccccgagttcctgaagagcgtgaccgtgagcagcaacagcgagcccagcaccgccctgaccaagcccagagccaagagcctgagcgccatggacgtggagaagtgcaccaagccctgcaaggacagcaccaagaagaacagcttcaagaagctgctgagcatgaagctgagcatctgcttcatgaagagcgacttccagaagttctggagcaagagcagccagctgggcgacaccaccaccggccacctgagcagcggcgagcagaagggcatcgagagcgactggcagggcctgctggtgggcgaggagaagagaagcaagcccatcaaggcctacagcaccgagaactacagcctggagagccagaagaagagaaagaagagcagaggccagaccagcgccgccaacggcctgagagccgagagcctggacgaccagatgctgagcagagagagcagcagccaggccccctacaagagcgtgaccagcctgtgcgcccccgagtacgagaacatcagacactacgaggagatccccgagtacgagaacctgcccttcatcatggccatcagaaagacccaggagctggagtggcagaacagcagcagcatggaggacgccgacgccaacgtgtacgaggtggaggagccctacgaggcccccgacggccagctgcagctgggccccagacaccagcacagcagcagcggcgccagccaggaggagcagaacgacctgggcctgggcgacctgcccagcgacgaggaggagatcatcaacagcagcgacgaggacgacgtgagcagcgagagcagcaagggcgagcccgaccccctggaggacaagcaggacgaggacaacggcatgaagagcaaggtgcaccacatcgccaaggagatcatgagcagcgagaaggtgttcgtggacgtgctgaagctgctgcacatcgacttcagagacgccgtggcccacgccagcagacagctgggcaagcccgtgatcgaggacagaatcctgaaccagatcctgtactacctgccccagctgtacgagctgaacagagacctgctgaaggagctggaggagagaatgctgcactggaccgagcagcagagaatcgccgacatcttcgtgaagaagggcccctacctgaagatgtacagcacctacatcaaggagttcgacaagaacatcgccctgctggacgagcagtgcaagaagaaccccggcttcgccgccgtggtgagagagttcgagatgagccccagatgcgccaacctggccctgaagcactacctgctgaagcccgtgcagagaatcccccagtacagactgctgctgaccgactacctgaagaacctgatcgaggacgccggcgactacagagacacccaggacgccctggccgtggtgatcgaggtggccaaccacgccaacgacaccatgaagcagggcgacaacttccagaagctgatgcagatccagtacagcctgaacggccaccacgagatcgtgcagcccggcagagtgttcctgaaggagggcatcctgatgaagctgagcagaaaggtgatgcagcccagaatgttcttcctgttcaacgacgccctgctgtacaccacccccgtgcagagcggcatgtacaagctgaacaacatgctgagcctggccggcatgaaggtgagaaagcccacccaggaggcctaccagaacgagctgaagatcgagagcgtggagagaagcttcatcctgagcgccagcagcgccaccgagagagacgagtggctggaggccatcagcagagccatcgaggagtacgccaagaagagaatcaccttctgccccagcagaagcctggacgaggccgacagcgagaacaaggaggaggtgagccccctgggcagcaaggcccccatctggatccccgacaccagagccaccatgtgcatgatctgcaccagcgagttcaccctgacctggagaagacaccactgcagagcctgcggcaagatcgtgtgccaggcctgcagcagcaacaagtacggcctggactacctgaagaaccagcccgccagagtgtgcgagcactgcttccaggagctgcagaagctggaccaccagcacagccccagaatcggcagccccggcaaccacaagagccccagcagcgccctgagcagcgtgctgcacagcatccccagcggcagaaagcagaagaagatccccgccgccctgaaggaggtgagcgccaacaccgaggacagcagcatgagcggctacctgtacagaagcaagggcaacaagaagccctggaagcacttctggttcgtgatcaagaacaaggtgctgtacacctacgccgccagcgaggtgagaagcgagatctag

SEQ ID NO: 13515 - DNA, 1446 bp, synthetic construct; identical to SEQ ID NO: 11023
  source 1..1446: mol_type = other DNA; note = Synthetic coding sequence

SEQ ID NO: 13516 - DNA, 468 bp, synthetic construct
  source 1..468: mol_type = other DNA; note = Synthetic coding sequence
atggacaccatgatgctgaacgtgagaaacctgttcgagcagctggtgagaagagtggagatcctgagcgagggcaacgaggtgcagttcatccagctggccaaggacttcgaggacttcagaaagaagtggcagagaaccgaccacgagctgggcaagtacaaggacctgctgatgaaggccgagaccgagagaagcgccctggacgtgaagctgaagcacgccagaaaccaggtggacgtggagatcaagagaagacagagagccgaggccgactgcgagaagctggagagacagatccagctgatcagagagatgctgatgtgcgacaccagcggcagcatccagctgagcgaggagcagaagagcgccctggccttcctgaacagaggccagcccagcagcagcaacgccggcaacaagagactgagcaccatcgacgagagcggcagcatcctgagcgactag

SEQ ID NO: 13517 - DNA, 420 bp, synthetic construct
  source 1..420: mol_type = other DNA; note = Synthetic coding sequence
atggacaccatgatgctgaacgtgagaaacctgttcgagcagctggtgagaagagtggagatcctgagcgagggcaacgaggtgcagttcatccagctggccaaggacttcgaggacttcagaaagaagtggcagagaaccgaccacgagctgggcaagtacaaggacctgctgatgaaggccgagaccgagagaagcgccctggacgtgaagctgaagcacgccagaaaccaggtggacgtggagatcaagagaagacagagagccgaggccgactgcgagaagctggagagacagatccagctgatcagagagatgctgatgtgcgacaccagcggcagcatccagctgagcgaggagcagaagagcgccctggccttcctgaacagaggccagcccagcagcagcaacgccggctag

SEQ ID NO: 13518 - DNA, 3282 bp, synthetic construct
  source 1..3282: mol_type = other DNA; note = Synthetic coding sequence
atgggcggcaaggcctggcccagaagagccgtgggcaccgccggcggcccctgcgccgagcagatcagcgcccccttccagaccctgctgatgccccacctgcccctggccagcttcagaccccccttctggggcctgagacacagcagaggcctgcccagattccacagcgtgagcacccagagcgagccccacggcagccccatcagcagaagaaacagagaggccaagcagaagagactgagagagaagcaggccaccctggaggccgagatcgccggcgagagcaagagccccgccgagagcatcaaggcctggagacccaaggagctggtgctgtacgagatccccaccaagcccggcgagaagaaggacgtgagcggccccctgccccccgcctacagccccagatacgtggaggccgcctggtacccctggtgggtgagagagggcttcttcaagcccgagtaccaggccagactgccccaggccaccggcgagaccttcagcatgtgcatccccccccccaacgtgaccggcagcctgcacatcggccacgccctgaccgtggccatccaggacgccctggtgagatggcacagaatgagaggcgaccaggtgctgtgggtgcccggcagcgaccacgccggcatcgccacccaggccgtggtggagaagcagctgtggaaggagagaggcgtgagaagacacgagctgagcagagaggccttcctgagagaggtgtggcagtggaaggaggccaagggcggcgagatctgcgagcagctgagagccctgggcgccagcctggactgggacagagagtgcttcaccatggacgtgggcagcagcgtggccgtgaccgaggccttcgtgagactgtacaaggccggcctgctgtacagaaaccaccagctggtgaactggagctgcgccctgagaagcgccatcagcgacatcgaggtggagaacagacccctgcccggccacacccagctgagactgcccggctgccccacccccgtgagcttcggcctgctgttcagcgtggccttccccgtggacggcgagcccgacgccgaggtggtggtgggcaccaccagacccgagaccctgcccggcgacgtggccgtggccgtgcaccccgacgacagcagatacacccacctgcacggcagacagctgagacaccccctgatgggccagcccctgcccctgatcaccgactacgccgtgcagccccacgtgggcaccggcgccgtgaaggtgacccccgcccacagccccgccgacgccgagatgggcgccagacacggcctgagccccctgaacgtgatcgccgaggacggcaccatgaccagcctgtgcggcgactggctgcagggcctgcacagattcgtggccagagagaagatcatgagcgtgctgagcgagtggggcctgttcagaggcctgcagaaccaccccatggtgctgcccatctgcagcagaagcggcgacgtgatcgagtacctgctgaagaaccagtggttcgtgagatgccaggagatgggcgccagagccgccaaggccgtggagagcggcgccctggagctgagccccagcttccaccagaagaactggcagcactggttcagccacatcggcgactggtgcgtgagcagacagctgtggtggggccaccagatccccgcctacctggtggtggaggaccacgcccagggcgaggaggactgctgggtggtgggcagaagcgaggccgaggccagagaggtggccgccgagctgaccggcagacccggcgccgagctgaccctggagagagaccccgacgtgctggacacctggttcagcagcgccctgttccccttcagcgccctgggctggccccaggagacccccgacctggccagattctaccccctgagcctgctggagaccggcagcgacctgctgctgttctgggtgggcagaatggtgatgctgggcacccagctgaccggccagctgcccttcagcaaggtgctgctgcaccccatggtgagagacagacagggcagaaagatgagcaagagcctgggcaacgtgctggaccccagagacatcatcagcggcgtggagatgcaggtgctgcaggagaagctgagaagcggcaacctggaccccgccgagctggccatcgtggccgccgcccagaagaaggacttcccccacggcatccccgagtgcggcaccgacgccctgagattcaccctgtgcagccacggcgtgcaggccggcgacctgcacctgagcgtgagcgaggtgcagagctgcagacacttctgcaacaagatctggaacgccctgagattcatcctgaacgccctgggcgagaagttcgtgccccagcccgccgaggagctgagccccagcagccccatggacgcctggatcctgagcagactggccctggccgcccaggagtgcgagagaggcttcctgaccagagagctgagcctggtgacccacgccctgcaccacttctggctgcacaacctgtgcgacgtgtacctggaggccgtgaagcccgtgctgtggcacagccccagacccctgggccccccccaggtgctgttcagctgcgccgacctgggcctgagactgctggcccccctgatgcccttcctggccgaggagctgtggcagagactgccccccagacccggctgcccccccgcccccagcatcagcgtggccccctaccccagcgcctgcagcctggagcactggagacagcccgagctggagagaagattcagcagagtgcaggaggtggtgcaggtgctgagagccctgagagccacctaccagctgaccaaggccagacccagagtgctgctgcagagcagcgagcccggcgaccagggcctgttcgaggccttcctggagcccctgggcaccctgggctactgcggcgccgtgggcctgctgccccccggcgccgccgcccccagcggctgggcccaggcccccctgagcgacaccgcccaggtgtacatggagctgcagggcctggtggacccccagatccagctgcccctgctggccgccagaagatacaagctgcagaagcagctggacagcctgaccgccagaacccccagcgagggcgaggccggcacccagagacagcagaagctgagcagcctgcagctggagctgagcaagctggacaaggccgccagccacctgagacagctgatggacgagccccccgcccccggcagccccgagctgtag

SEQ ID NO: 13519 - DNA, 231 bp, synthetic construct
  source 1..231: mol_type = other DNA; note = Synthetic coding sequence
atgaacagcgtgggcgaggcctgcaccgacatgaagagagagtacgaccagtgcttcaacagatggttcgccgagaagttcctgaagggcgacagcagcggcgacccctgcaccgacctgttcaagagataccagcagtgcgtgcagaaggccatcaaggagaaggagatccccatcgagggcctggagttcatgggccacggcaaggagaagcccgagaacagcagctag

SEQ ID NO: 13520 - DNA, 735 bp, synthetic construct; identical to SEQ ID NO: 10072
  source 1..735: mol_type = other DNA; note = Synthetic coding sequence

SEQ ID NO: 13521 - DNA, 774 bp, synthetic construct
  source 1..774: mol_type = other DNA; note = Synthetic coding sequence
atgccccacctgcccctggccagcttcagaccccccttctggggcctgagacacagcagaggcctgcccagattccacagcgtgagcacccagagcgagccccacggcagccccatcagcagaagaaacagagaggccaagcagaagagactgagagagaagcaggccaccctggaggccgagatcgccggcgagagcaagagccccgccgagagcatcaaggcctggagacccaaggagctggtgctgtacgagatccccaccaagcccggcgagaagaaggacgtgagcggccccctgccccccgcctacagccccagatacgtggaggccgcctggtacccctggtgggtgagagagggcttcttcaagcccgagtaccaggccagactgccccaggccaccggcgagaccttcagcatgtgcatccccccccccaacgtgaccggcagcctgcacatcggccacgccctgaccgtggccatccaggacgccctggtgagatggcacagaatgagaggcgaccaggtgctgtgggtgcccggcagcgaccacgccggcatcgccacccaggccgtggtggagaagcagctgtggaaggagagaggcgtgagaagacacgagctgagcagagaggccttcctgagagaggtgtggcagtggaaggaggccaagggcggcgagatctgcgagcagctgagagccctgggcgccagcctggactgggacagagtgttctaccacggctgctggctgctgagcggctgcgactag

SEQ ID NO: 13522 - DNA, 804 bp, synthetic construct
  source 1..804: mol_type = other DNA; note = Synthetic coding sequence
atgagcaagagcgagagccccaaggagcccgagcagctgagaaagctgttcatcggcggcctgagcttcgagaccaccgacgagagcctgagaagccacttcgagcagtggggcaccctgaccgactgcgtggtgatgagagaccccaacaccaagagaagcagaggcttcggcttcgtgacctacgccaccgtggaggaggtggacgccgccatgaacgccagaccccacaaggtggacggcagagtggtggagcccaagagagccgtgagcagagaggacagccagagacccggcgcccacctgaccgtgaagaagatcttcgtgggcggcatcaaggaggacaccgaggagcaccacctgagagactacttcgagcagtacggcaagatcgaggtgatcgagatcatgaccgacagaggcagcggcaagaagagaggcttcgccttcgtgaccttcgacgaccacgacagcgtggacaagatcgtgatccagaagtaccacaccgtgaacggccacaactgcgaggtgagaaaggccctgagcaagcaggagatggccagcgccagcagcagccagagaggcagaagcggcagcggcaacttcggcggcggcagctacaacgacttcggcaactacaacaaccagagcagcaacttcggccccatgaagggcggcaacttcggcggcagaagcagcggcccctacggcggcggcggccagtacttcgccaagcccagaaaccagggcggctacggcggcagcagcagcagcagcagctacggcagcggcagaagattctag

SEQ ID NO: 13523 - DNA, 531 bp, synthetic construct
  source 1..531: mol_type = other DNA; note = Synthetic coding sequence
atgaacgagagcaagcccggcgacagccagaacctggcctgcgtgttctgcagaaagcacgacgactgccccaacaagtacggcgagaagaagaccaaggagaagtggaacctgaccgtgcactactactgcctgctgatgagcagcggcatctggcagagaggcaaggaggaggagggcgtgtacggcttcctgatcgaggacatcagaaaggaggtgaacagagccagcaagctgaagtgctgcgtgtgcaagaagaacggcgccagcatcggctgcgtggcccccagatgcaagagaagctaccacttcccctgcggcctgcagagagagtgcatcttccagttcaccggcaacttcgccagcttctgctgggaccacagacccgtgcagatcatcaccagcaacaactacagagagagcctgccctgcaccatctgcctggagttcatcgagcccatccccagctacaacatcctgagaagcccctgctgcaagaacgcctggttccacagagactgcctgcagtag

SEQ ID NO: 13524 - DNA, 3171 bp, synthetic construct
  source 1..3171: mol_type = other DNA; note = Synthetic coding sequence
atgctgagcgtggtggagaacggcctggacccccaggccgccatccccgtgatcaagaagaagctggtgggcagcgtgaaggccctgcagaagcagtacgtgagcctggacaccgtggtgaccagcgaggacggcgacgccaacaccatgtgcagcgccctggaggccgtgttcatccacggcctgcacgccaagcacatcagagccgaggccggcggcaagagaaagaagagcgcccaccagaagcccctgccccagcccgtgttctggcccctgctgaaggccgtgacccacaagcacatcatcagcgagctggagcacctgaccttcgtgaacaccgacgtgggcagatgcagagcctggctgagactggccctgaacgacggcctgatggagtgctacctgaagctgctgctgcaggagcaggccagactgcacgagtactaccagcccaccgccctgctgagagacgccgaggagggcgagttcctgctgagcttcctgcagggcctgaccagcctgagcttcgagctgagctacaagagcgccatcctgaacgagtggaccctgacccccctggccctgagcggcctgtgccccctgagcgagctggaccccctgagcaccagcggcgccgagctgcagagaaaggagagcctggacagcatcagccacagcagcggcagcgaggacatcgaggtgcaccacagcggccacaagatcagaagaaaccagaagctgaccgccagcagcctgagcctggacaccgccagcagcagccagctgagctgcagcctgaacagcgacagctgcctgctgcaggagaacggcagcaagagccccgaccactgcgaggagcccatgagctgcgacagcgacctgggcaccgccaacgccgaggacagcgacagaagcctgcaggaggtgctgctggagttcagcaaggcccaggtgaacagcgtgcccaccaacggcctgagccaggagaccgagatccccaccccccaggccagcctgagcctgcacggcctgaacaccagcacctacctgcactgcgaggcccccgccgagcccctgcccgcccaggccgccagcggcacccaggacggcgtgcacgtgcaggagcccagaccccaggcccccagccccctggacctgcagcagcccgtggagagcaccagcggccagcagcccagcagcaccgtgagcgagaccgccagagaggtgggccagggcaacggcctgcagaaggcccaggcccacgacggcgccggcctgaagctggtggtgagcagccccaccagccccaagaacaagagctggatcagcgaggacgacttctacagacccagcagagagcagcccctggagagcgccagcgaccaccccatcgccagctacagaggcacccccggcagcagacccggcctgcacagacacttcagccaggagcccagaaagaactgcagcctgggcgccctggaccaggcctgcgtgcccagccccggcagaagacaggcccaggccgcccccagccagggccacaagagcttcagagtggtgcacagaagacagatgggcctgagcaaccccttcagaggcctgatgaagctgggcaccgtggagagaagaggcgccatgggcatctggaaggagctgttctgcgagctgagccccctggagttcagactgtacctgagcaacgaggagcacacctgcgtggagaactgcagcctgctgagatgcgagagcgtgggccccgcccacagcgacggcagattcgagctggtgttcagcggcaagaagctggccctgagagccagcagccaggacgaggccgaggactggctggacagagtgagagaggccctgcagaaggtgagaccccagcaggaggacgagtgggtgaacgtgcagtaccccgaccagcccgaggagccccccgaggccccccagggctgcctgagccccagcgacctgctgagcgagcccgccgccctgcagggcacccagttcgactggagcagcgcccaggtgcccgagcccgacgccatcaaggagagcctgctgtacctgtacatggacagaacctggatgccctacatcttcagcctgagcctggaggccctgaagtgcttcagaatcagaaacaacgagaagatgctgagcgacagccacggcgtggagaccatcagagacatcctgcccgacaccagcctgggcggccccagcttcttcaagatcatcaccgccaaggccgtgctgaagctgcaggccggcaacgccgaggaggccgccctgtggagagacctggtgagaaaggtgctggccagctacctggagaccgccgaggaggccgtgaccctgggcggcagcctggacgagaactgccaggaggtgctgaagttcgccaccagagagaacggcttcctgctgcagtacctggtggccatccccatggagaagggcctggacagccagggctgcttctgcgccggctgcagcagacagatcggcttcagcttcgtgagacccaagctgtgcgccttcagcggcctgtactactgcgacatctgccaccaggacgacgccagcgtgatccccgccagaatcatccacaactgggacctgaccaagagacccatctgcagacaggccctgaagttcctgacccagatcagagcccagcccctgatcaacctgcagatggtgaacgccagcctgtacgagcacgtggagagaatgcacctgatcggcagaagaagagagcagctgaagctgctgggcgactacctgggcctgtgcagaagcggcgccctgaaggagctgagcaagagactgaaccacagaaactacctgctggagagcccccacagattcagcgtggccgacctgcagcagatcgccgacggcgtgtacgagggcttcctgaaggccctgatcgagttcgccagccagcacgtgtaccactgcgacctgtgcacccagagaggcttcatctgccagatctgccagcaccacgacatcatcttccccttcgagttcgacaccaccgtgagatgcgccgagtgcaagaccgtgttccaccagagctgccaggccgtggtgaagaagggctgccccagatgcgccagaagaagaaagtaccaggagcagaacatcttcgcctag

SEQ ID NO: 13525 - DNA, 390 bp, synthetic construct; identical to SEQ ID NO: 10956
  source 1..390: mol_type = other DNA; note = Synthetic coding sequence

SEQ ID NO: 13526 - DNA, 348 bp, synthetic construct
  source 1..348: mol_type = other DNA; note = Synthetic coding sequence
atgaccaagaagagaagaaacaacggcagagccaagaagggcagaggccacgtgcagcccatcagatgcaccaactgcgccagatgcgtgcccaaggacaaggccatcaagaagttcgtgatcagaaacatcgtggaggccgccgccgtgagagacatcagcgaggtgagcgtgttcgacgcctacgtgctgcccaagctgtacgtgaagctgcactactgcgtgagctgcgccatccacagcaaggtggtgagaaacagaagcagagaggccagaaaggacagaacccccccccccagattcagacccgccggcgccgcccccggccccccccccaagcccatgtag

SEQ ID NO: 13527 - DNA, 1899 bp, synthetic construct; identical to SEQ ID NO: 9855
  source 1..1899: mol_type = other DNA; note = Synthetic coding sequence

SEQ ID NO: 13528 - DNA, 390 bp, synthetic construct; identical to SEQ ID NO: 10956
  source 1..390: mol_type = other DNA; note = Synthetic coding sequence

SEQ ID NO: 13529 - DNA, 5220 bp, synthetic construct
  source 1..5220: mol_type = other DNA; note = Synthetic coding sequence
atgatggagggcaacggcaccgagaacagctgcagcagaaccagaggctggctgcagcaggacaacgacgccaagccctggctgtggaagttcagcaactgcttcagcagacccgagcagaccctgccccacagcccccagaccaaggagtacatggagaacaagaaggtggccgtggagctgaaggacgtgcccagccccctgcacgccggcagcaagctgttccccgccgtgcccctgcccgacatcagaagcctgcagcagcccaagatccagctgagcagcgtgcccaaggtgagctgctgcgcccactgccccaacgagcccagcaccagccccatgagattcggcggcggcggcggcggcagcggcggcaccagcagcctgatccaccccggcgccctgctggacagccagagcaccagaaccatcacctgccaggtgggcagcggcttcgccttccagagcgccagcagcctgcagaacgccagcgccagaaacaacctggccggcatcgccagcgacttccccagcatgtgcctggagagcaacctgagcagctgcaagcacctgccctgctgcggcaagctgcacttccagagctgccacggcaacgtgcacaagctgcaccagttccccagcctgcagggctgcaccagcgccggctacttcccctgcagcgacttcaccagcggcgcccccggccacctggaggagcacatcagccagagcgagctgaccccccacctgtgcaccaacagcctgcacctgaacgtggtgccccccgtgtgcctgaagggcagcctgtactgcgaggactgcctgaacaagcccgccagaaacagcatcatcgacgccgccaaggtgtggcccaacatccccccccccaacacccagcccgcccccctggccgtgcccctgtgcaacggctgcggcaccaagggcaccggcaaggagaccaccctgctgctggccaccagcctgggcaaggccgccagcaagttcgaggtggccgtggccggccaggtgctggagaacctgccccccatcggcgtgttctgggacatcgagaactgcagcgtgcccagcggcagaagcgccaccgccgtggtgcagagaatcagagagaagttcttcaagggccacagagaggccgagttcatctgcgtgtgcgacatcagcaaggagaacaaggaggtgatccaggagctgaacaactgccaggtgaccgtggcccacatcaacgccaccgccaagaacgccgccgacgacaagctgagacagagcctgagaagattcgccaacacccacaccgcccccgccaccgtggtgctggtgagcaccgacgtgaacttcgccctggagctgagcgacctgagacacagacacggcttccacatcatcctggtgcacaagaaccaggccagcgaggccctgctgcaccacgccaacgagctgatcagattcgaggagttcatcagcgacctgccccccagactgcccctgaagatgccccagtgccacaccctgctgtacgtgtacaacctgcccgccaacaaggacggcaagagcgtgagcaacagactgagaagactgagcgacaactgcggcggcaaggtgctgagcatcaccggctgcagcgccatcctgagattcatcaaccaggacagcgccgagagagcccagaagagaatggagaacgaggacgtgttcggcaacagaatcatcgtgagcttcacccccaagaacagagagctgtgcgagaccaagagcagcaacgccatcgccgacaaggtgaagagccccaagaagctgaagaaccccaagctgtgcctgatcaaggacgccagcgagcagagcagcagcgccaaggccacccccggcaagggcagccaggccaacagcggcagcgccaccaagaacaccaacgtgaagagcctgcaggagctgtgcagaatggagagcaagaccggccacagaaacagcgagcaccagcagggccacctgagactggtggtgcccacccacggcaacagcagcgccgccgtgagcacccccaagaacagcggcgtggccgagcccgtgtacaagaccagccagaagaaggagaacctgagcgccagaagcgtgaccagcagccccgtggagaagaaggacaaggaggagaccgtgttccaggtgagctaccccagcgccttcagcaagctggtggccagcagacaggtgagccccctgctggccagccagagctggagcagcagaagcatgagccccaacctgctgaacagagccagccccctggccttcaacatcgccaacagcagcagcgaggccgactgccccgaccccttcgccaacggcgccgacgtgcaggtgagcaacatcgactacagactgagcagaaaggagctgcagcagctgctgcaggaggccttcgccagacacggcaaggtgaagagcgtggagctgagcccccacaccgactaccagctgaaggccgtggtgcagatggagaacctgcaggacgccatcggcgccgtgaacagcctgcacagatacaagatcggcagcaagaagatcctggtgagcctggccaccggcgccgccagcaagagcctgagcctgctgagcgccgagaccatgagcgtgctgcaggacgcccccgcctgctgcctgcccctgttcaagttcaccgacatctacgagaagaagttcggccacaagctgaacgtgagcgacctgtacaagctgaccgacaccgtggccatcagagagcagggcaacggcagactggtgtgcctgctgcccagcagccaggccagacagagccccctgggcagcagccagagccacgacggcagcagcaccaactgcagccccatcatcttcgaggagctggagtaccacgagcccgtgtgcagacagcactgcagcaacaaggacttcagcgagcacgagttcgaccccgacagctacaagatccccttcgtgatcctgagcctgaagaccttcgccccccaggtgcacagcctgctgcagacccacgagggcaccgtgcccctgctgagcttccccgactgctacatcgccgagttcggcgacctggaggtggtgcaggagaaccagggcggcgtgcccctggagcacttcatcacctgcgtgcccggcgtgaacatcgccaccgcccagaacggcatcaaggtggtgaagtggatccacaacaagccccccccccccaacaccgacccctggctgctgagaagcaagagccccgtgggcaacccccagctgatccagttcagcagagaggtgatcgacctgctgaagagccagcccagctgcgtgatccccatcagccacttcatccccagctaccaccaccacttcgccaagcagtgcagagtgagcgactacggctacagcaagctgatcgagctgctggaggccgtgccccacgtgctgcagatcctgggcatgggcagcaagagactgctgaccctgacccacagagcccaggtgaagagattcacccaggacctgctgaagctgctgaagagccaggccagcaagcaggtgatcgtgagagagttcagccaggcctaccactggtgcttcagcaaggactgggacgtgaccgagtacggcgtgtgcgagctgatcgacatcgtgagcgagatccccgacaccaccatctgcctgagccagcaggacaacgagatggtgatctgcatccccaagagagagagaacccaggacgagatcgagagaaccaagcagttcagcaaggacgtggtggacctgctgagacaccagccccacttcagaatgcccttcaacaagttcatccccagctaccaccaccacttcggcagacagtgcaagctggcctactacggcttcaccaagctgctggagctgttcgaggccatccccgacaccctgcaggtgctggagtgcggcgaggagaagatcctgaccctgaccgaggtggagagattcaaggccctggccgcccagttcgtgaagctgctgagaagccagaaggacaactgcctgatgatgaccgacctgctgaccgagtacgccaagaccttcggctacaccttcagactgcaggactacgacgtgagcagcatcagcgccctgacccagaagctgtgccacgtggtgaaggtggccgacatcgagagcggcagacagatccagctgatcaacagaaagagcctgagaagcctgaccgcccagctgctggtgctgctgatgagctgggagggcaccacccacctgagcgtggaggagctgaagagacactacgagagcacccacaacacccccctgaacccctgcgagtacggcttcatgaccctgaccgagctgctgaagagcctgccctacctggtggaggtgttcaccaacgacaagatggaggagtgcgtgaagctgaccagcctgtacctgttcgccaagaacgtgagaagcctgctgcacacctaccactaccagcagatcttcctgcacgagttcagcatggcctacaccaagtacgtgggcgagaccctgcagcccaagacctacggccacagcagcgtggaggagctgctgggcgccatcccccaggtggtgtggatcaagggccacggccacaagagaatcgtggtgctgaagaacgacatgaagagcagactgagcagcctgagcctgagccccgccaaccacgagaaccagcccagcgagggcgagagaatcctggaggtgcccgagagccacaccgccagcgagctgaagctgggcgccgacggcagcggccccagccacaccgagcaggagctgctgagactgaccgacgacagccccgtggacctgctgtgcgcccccgtgcccagctgcctgcccagcccccagctgagacccgaccccgtgatcctgcagagcgccgacctgatccagttcgaggagagaccccaggagcccagcgagatcatgatcctgaaccaggaggagaagatggagatccccatccccggcaagagcaagaccctgaccagcgacagcagcagcagctgcatcagcgccgccgtgcccgtgcccccctgccccagcagcgagaccagcgagagcctgctgagcaaggaccccgtggagagccccgccaagaagcagcccaagaacagagtgaagctggccgccaacttcagcctggcccccatcaccaagctgtag

SEQ ID NO: 13530 - DNA, 390 bp, synthetic construct; identical to SEQ ID NO: 10956
  source 1..390: mol_type = other DNA; note = Synthetic coding sequence

SEQ ID NO: 13531 - DNA, 432 bp, synthetic construct
  source 1..432: mol_type = other DNA; note = Synthetic coding sequence
atgaccctgagatgcctggagcccagcggcaacggcggcgagggcaccagaagccagtggggcaccgccggcagcgccgaggagcccagcccccaggccgccagactggccaaggccctgagagagctgggccagaccggctggtactggggcagcatgaccgtgaacgaggccaaggagaagctgaaggaggcccccgagggcaccttcctgatcagagacagcagccacagcgactacctgctgaccatcagcgtgaagaccagcgccggccccaccaacctgagaatcgagtaccaggacggcaagttcagactggacagcatcatctgcgtgaagagcaagctgaagcagttcgacagcgtggtgcacctgatcgactactacgtgcagatgtgcaaggacaagagaaccggccccgaggccccctag

SEQ ID NO: 13532 - DNA, 156 bp, synthetic construct
  source 1..156: mol_type = other DNA; note = Synthetic coding sequence
atgagcagcagcatgtggtacatcatgcagagcatccagagcaagtacagcctgagcgagagactgatcagaaccatcgccgccatcagaagcttcccccacgacaacgtggaggacctgatcagaggcggcgccgacgtgaactgcacccactag

SEQ ID NO: 13533 - DNA, 1902 bp, synthetic construct
  source 1..1902: mol_type = other DNA; note = Synthetic coding sequence
atggaggagagccccctgagcagagcccccagcagaggcggcgtgaacttcctgaacgtggccagaacctacatccccaacaccaaggtggagtgccactacaccctgccccccggcaccatgcccagcgccagcgactggatcggcatcttcaaggtggaggccgcctgcgtgagagactaccacaccttcgtgtggagcagcgtgcccgagagcaccaccgacggcagccccatccacaccagcgtgcagttccaggccagctacctgcccaagcccggcgcccagctgtaccagttcagatacgtgaacagacagggccaggtgtgcggccagagcccccccttccagttcagagagcccagacccatggacgagctggtgaccctggaggaggccgacggcggcagcgacatcctgctggtggtgcccaaggccaccgtgctgcagaaccagctggacgagagccagcaggagagaaacgacctgatgcagctgaagctgcagctggagggccaggtgaccgagctgagaagcagagtgcaggagctggagagagccctggccaccgccagacaggagcacaccgagctgatggagcagtacaagggcatcagcagaagccacggcgagatcaccgaggagagagacatcctgagcagacagcagggcgaccacgtggccagaatcctggagctggaggacgacatccagaccatcagcgagaaggtgctgaccaaggaggtggagctggacagactgagagacaccgtgaaggccctgaccagagagcaggagaagctgctgggccagctgaaggaggtgcaggccgacaaggagcagagcgaggccgagctgcaggtggcccagcaggagaaccaccacctgaacctggacctgaaggaggccaagagctggcaggaggagcagagcgcccaggcccagagactgaaggacaaggtggcccagatgaaggacaccctgggccaggcccagcagagagtggccgagctggagcccctgaaggagcagctgagaggcgcccaggagctggccgccagcagccagcagaaggccaccctgctgggcgaggagctggccagcgccgccgccgccagagacagaaccatcgccgagctgcacagaagcagactggaggtggccgaggtgaacggcagactggccgagctgggcctgcacctgaaggaggagaagtgccagtggagcaaggagagagccggcctgctgcagagcgtggaggccgagaaggacaagatcctgaagctgagcgccgagatcctgagactggagaaggccgtgcaggaggagagaacccagaaccaggtgttcaagaccgagctggccagagagaaggacagcagcctggtgcagctgagcgagagcaagagagagctgaccgagctgagaagcgccctgagagtgctgcagaaggagaaggagcagctgcaggaggagaagcaggagctgctggagtacatgagaaagctggaggccagactggagaaggtggccgacgagaagtggaacgaggacgccaccaccgaggacgaggaggccgccgtgggcctgagctgccccgccgccctgaccgacagcgaggacgagagccccgaggacatgagactgcccccctacggcctgtgcgagagaggcgaccccggcagcagccccgccggccccagagaggccagccccctggtggtgatcagccagcccgcccccatcagcccccacctgagcggccccgccgaggacagcagcagcgacagcgaggccgaggacgagaagagcgtgctgatggccgccgtgcagagcggcggcgaggaggccaacctgctgctgcccgagctgggcagcgccttctacgacatggccagatag

SEQ ID NO: 13534 - DNA, 810 bp, synthetic construct; identical to SEQ ID NO: 12242
  source 1..810: mol_type = other DNA; note = Synthetic coding sequence

SEQ ID NO: 13535 - DNA, 618 bp, synthetic construct
  source 1..618: mol_type = other DNA; note = Synthetic coding sequence
atggacaaggacagccagggcctgctggacagcagcctgatggccagcggcaccgccagcagaagcgaggacgaggagagcctggccggccagaagagagccagcagccaggccctgggcaccatccccaagagaagaagcagcagcagattcatcaagagaaagaagttcgacgacgagctggtggagagcagcctggccaagagcagcaccagagccaagggcgccagcggcgtggagcccggcagatgcagcggcagcgagcccagcagcagcgagaagaagaaggtgagcaaggcccccagcacccccgtgccccccagccccgcccccgcccccggcctgaccaagagagtgaagaagagcaagcagcccctgcaggtgaccaaggacctgggcagatggaagcccgccgacgacctgctgctgatcaacgccgtgctgcagaccaacgacctgaccagcgtgcacctgggcgtgaagttcagctgcagattcaccctgagagaggtgcaggagagatggtacgccctgctgtacgaccccgtgatcagcaagctggcctgccaggccatgagacagctgcaccccgaggccatcgccgccatccagagctag

SEQ ID NO: 13536 - DNA, 540 bp, synthetic construct
  source 1..540: mol_type = other DNA; note = Synthetic coding sequence
atggactggacccccagactgcccagcagacacatcatcagcgagctggagcacctgaccttcgtgaacaccgacgtgggcagatgcagagcctggctgagactggccctgaacgacggcctgatggagtgctacctgaagctgctgctgcaggagcaggccagactgcagctgcagagaaaggagagcctggacagcatcagccacagcagcggcagcgaggacatcgaggtgcaccacagcggccacaagatcagaagaaaccagaagctgaccgccagcagcctgagcctggacaccgccagcagcagccagctgagctgcagcctgaacagcgacagctgcctgctgcaggagaacggcagcaagagccccgaccactgcgaggagcccatgagctgcgacagcgacctgggcaccgccaacgccgaggacagcgacagaagcctgcaggagaagaccagagccggcagccagagaatgaccagcaccggcctgcccggcagcaacccctggagagtgctgcagaccacccagtag

SEQ ID NO: 13537 - DNA, 735 bp, synthetic construct; identical to SEQ ID NO: 10072
  source 1..735: mol_type = other DNA; note = Synthetic coding sequence

SEQ ID NO: 13538 - DNA, 558 bp, synthetic construct
  source 1..558: mol_type = other DNA; note = Synthetic coding sequence
atggacaaggacagccagggcctgctggacagcagcctgatggccagcggcaccgccagcagaagcgaggacgaggagagcctggccggccagaagagagccagcagccaggccctgggcaccatccccaagagaagaagcagcagcagattcatcaagagaaagaagttcgacgacgagctggtggagagcagcctggccaagagcagcaccagagccaagggcgccagcggcgtggagcccggcagatgcagcggcagcgagcccagcagcagcgagaagaagaaggtgagcaaggcccccagcacccccgtgccccccagccccgcccccgcccccggcctgaccaagagagtgaagaagagcaagcagcccctgcaggtgaccaaggacctgggcagatggaagcccgccgacgacctgctgctgatcaacgccgtgctgcagaccaacgacctgaccagcgtgcacctgggcgtgaagttcagctgcagattcaccctgagagaggtgcaggagagatggtacgccctgctgtacgaccccgtgatcagctag

SEQ ID NO: 13539 - DNA, 3003 bp, synthetic construct
  source 1..3003: mol_type = other DNA; note = Synthetic coding sequence
atggtggagtgcttcgagagcggcggcaccagactgagcctgagcagcttcaacgtgagctgcgacagcctgagagagcagctgagagagtggagatgcttccagtggtggagaatggactggacccccagactgcccagcagacacatcatcagcgagctggagcacctgaccttcgtgaacaccgacgtgggcagatgcagagcctggctgagactggccctgaacgacggcctgatggagtgctacctgaagctgctgctgcaggagcaggccagactgcacgagtactaccagcccaccgccctgctgagagacgccgaggagggcgagttcctgctgagcttcctgcagggcctgaccagcctgagcttcgagctgagctacaagagcgccatcctgaacgagtggaccctgacccccctggccctgagcggcctgtgccccctgagcgagctggaccccctgagcaccagcggcgccgagctgcagagaaaggagagcctggacagcatcagccacagcagcggcagcgaggacatcgaggtgcaccacagcggccacaagatcagaagaaaccagaagctgaccgccagcagcctgagcctggacaccgccagcagcagccagctgagctgcagcctgaacagcgacagctgcctgctgcaggagaacggcagcaagagccccgaccactgcgaggagcccatgagctgcgacagcgacctgggcaccgccaacgccgaggacagcgacagaagcctgcaggaggtgctgctggagttcagcaaggcccaggtgaacagcgtgcccaccaacggcctgagccaggagaccgagatccccaccccccaggccagcctgagcctgcacggcctgaacaccagcacctacctgcactgcgaggcccccgccgagcccctgcccgcccaggccgccagcggcacccaggacggcgtgcacgtgcaggagcccagaccccaggcccccagccccctggacctgcagcagcccgtggagagcaccagcggccagcagcccagcagcaccgtgagcgagaccgccagagaggtgggccagggcaacggcctgcagaaggcccaggcccacgacggcgccggcctgaagctggtggtgagcagccccaccagccccaagaacaagagctggatcagcgaggacgacttctacagacccagcagagagcagcccctggagagcgccagcgaccaccccatcgccagctacagaggcacccccggcagcagacccggcctgcacagacacttcagccaggagcccagaaagaactgcagcctgggcgccctggaccaggcctgcgtgcccagccccggcagaagacaggcccaggccgcccccagccagggccacaagagcttcagagtggtgcacagaagacagatgggcctgagcaaccccttcagaggcctgatgaagctgggcaccgtggagagaagaggcgccatgggcatctggaaggagctgttctgcgagctgagccccctggagttcagactgtacctgagcaacgaggagcacacctgcgtggagaactgcagcctgctgagatgcgagagcgtgggccccgcccacagcgacggcagattcgagctggtgttcagcggcaagaagctggccctgagagccagcagccaggacgaggccgaggactggctggacagagtgagagaggccctgcagaaggtgagaccccagcaggaggacgagtgggtgaacgtgcagtaccccgaccagcccgaggagccccccgaggccccccagggctgcctgagccccagcgacctgctgagcgagcccgccgccctgcagggcacccagttcgactggagcagcgcccaggtgcccgagcccgacgccatcaaggagagcctgctgtacctgtacatggacagaacctggatgccctacatcttcagcctgagcctggaggccctgaagtgcttcagaatcagaaacaacgagaagatgctgagcgacagccacggcgtggagaccatcagagacatcctgcccgacaccagcctgggcggccccagcttcttcaagatcatcaccgccaaggccgtgctgaagctgcaggccggcaacgccgaggaggccgccctgtggagagacctggtgagaaaggtgctggccagctacctggagaccgccgaggaggccgtgaccctgggcggcagcctggacgagaactgccaggaggtgctgaagttcgccaccagagagaacggcttcctgctgcagtacctggtggccatccccatggagaagggcctggacagccagggctgcttctgcgccggctgcagcagacagatcggcttcagcttcgtgagacccaagctgtgcgccttcagcggcctgtactactgcgacatctgccaccaggacgacgccagcgtgatccccgccagaatcatccacaactgggacctgaccaagagacccatctgcagacaggccctgaagttcctgacccagatcagagcccagcccctgatcaacctgcagatggtgaacgccagcctgtacgagcacgtggagagaatgcacctgatcggcagaagaagagagcagctgaagctgctgggcgactacctgggcctgtgcagaagcggcgccctgaaggagctgagcaagagactgaaccacagaaactacctgctggagagcccccacagattcagcgtggccgacctgcagcagatcgccgacggcgtgtacgagggcttcagccccaaggtgcccagcgaggccgccggcctgagaccctggggcgccagaagccccgaggccgccagcgccttcagatgcatcgacagcagccacctgcccagcctgagaaaggtggtgcccaccctgttcctgaagtgctacttcatgcagtacaccgtgcccagcgagcagggcagcggccccgaggagagcctgcagtgcatcgagggcatcgccgccgtgtag

SEQ ID NO: 13540 - DNA, 525 bp, synthetic construct
  source 1..525: mol_type = other DNA; note = Synthetic coding sequence
atggacaccatgatgctgaacgtgagaaacctgttcgagcagctggtgagaagagtggagatcctgagcgagggcaacgaggtgcagttcatccagctggccaaggacttcgaggacttcagaaagaagtggcagagaaccgaccacgagctgggcaagtacaaggacctgctgatgaaggccgagaccgagagaagcgccctggacgtgaagctgaagcacgccagaaaccaggtggacgtggagatcaagagaagacagagagccgaggccgactgcgagaagctggagagacagatccagctgatcagagagatgctgatgtgcgacaccagcggcagcatccagctgagcgaggagcagaagagcgccctggccttcctgaacagaggccagcccagcagcagcaacgccggcaacaagagactgagcaccatcgacgagagcggcagcatcctgagcgacatcagcttcgacaagaccgacgagagcctggactgggacagcagcctggtgaagacctag

SEQ ID NO: 13541 - DNA, 2904 bp, synthetic construct
  source 1..2904: mol_type = other DNA; note = Synthetic coding sequence
atggactggacccccagactgcccagcagacacatcatcagcgagctggagcacctgaccttcgtgaacaccgacgtgggcagatgcagagcctggctgagactggccctgaacgacggcctgatggagtgctacctgaagctgctgctgcaggagcaggccagactgcacgagtactaccagcccaccgccctgctgagagacgccgaggagggcgagttcctgctgagcttcctgcagggcctgaccagcctgagcttcgagctgagctacaagagcgccatcctgaacgagtggaccctgacccccctggccctgagcggcctgtgccccctgagcgagctggaccccctgagcaccagcggcgccgagctgcagagaaaggagagcctggacagcatcagccacagcagcggcagcgaggacatcgaggtgcaccacagcggccacaagatcagaagaaaccagaagctgaccgccagcagcctgagcctggacaccgccagcagcagccagctgagctgcagcctgaacagcgacagctgcctgctgcaggagaacggcagcaagagccccgaccactgcgaggagcccatgagctgcgacagcgacctgggcaccgccaacgccgaggacagcgacagaagcctgcaggaggtgctgctggagttcagcaaggcccaggtgaacagcgtgcccaccaacggcctgagccaggagaccgagatccccaccccccaggccagcctgagcctgcacggcctgaacaccagcacctacctgcactgcgaggcccccgccgagcccctgcccgcccaggccgccagcggcacccaggacggcgtgcacgtgcaggagcccagaccccaggcccccagccccctggacctgcagcagcccgtggagagcaccagcggccagcagcccagcagcaccgtgagcgagaccgccagagaggtgggccagggcaacggcctgcagaaggcccaggcccacgacggcgccggcctgaagctggtggtgagcagccccaccagccccaagaacaagagctggatcagcgaggacgacttctacagacccagcagagagcagcccctggagagcgccagcgaccaccccatcgccagctacagaggcacccccggcagcagacccggcctgcacagacacttcagccaggagcccagaaagaactgcagcctgggcgccctggaccaggcctgcgtgcccagccccggcagaagacaggcccaggccgcccccagccagggccacaagagcttcagagtggtgcacagaagacagatgggcctgagcaaccccttcagaggcctgatgaagctgggcaccgtggagagaagaggcgccatgggcatctggaaggagctgttctgcgagctgagccccctggagttcagactgtacctgagcaacgaggagcacacctgcgtggagaactgcagcctgctgagatgcgagagcgtgggccccgcccacagcgacggcagattcgagctggtgttcagcggcaagaagctggccctgagagccagcagccaggacgaggccgaggactggctggacagagtgagagaggccctgcagaaggtgagaccccagcaggaggacgagtgggtgaacgtgcagtaccccgaccagcccgaggagccccccgaggccccccagggctgcctgagccccagcgacctgctgagcgagcccgccgccctgcagggcacccagttcgactggagcagcgcccaggtgcccgagcccgacgccatcaaggagagcctgctgtacctgtacatggacagaacctggatgccctacatcttcagcctgagcctggaggccctgaagtgcttcagaatcagaaacaacgagaagatgctgagcgacagccacggcgtggagaccatcagagacatcctgcccgacaccagcctgggcggccccagcttcttcaagatcatcaccgccaaggccgtgctgaagctgcaggccggcaacgccgaggaggccgccctgtggagagacctggtgagaaaggtgctggccagctacctggagaccgccgaggaggccgtgaccctgggcggcagcctggacgagaactgccaggaggtgctgaagttcgccaccagagagaacggcttcctgctgcagtacctggtggccatccccatggagaagggcctggacagccagggctgcttctgcgccggctgcagcagacagatcggcttcagcttcgtgagacccaagctgtgcgccttcagcggcctgtactactgcgacatctgccaccaggacgacgccagcgtgatccccgccagaatcatccacaactgggacctgaccaagagacccatctgcagacaggccctgaagttcctgacccagatcagagcccagcccctgatcaacctgcagatggtgaacgccagcctgtacgagcacgtggagagaatgcacctgatcggcagaagaagagagcagctgaagctgctgggcgactacctgggcctgtgcagaagcggcgccctgaaggagctgagcaagagactgaaccacagaaactacctgctggagagcccccacagattcagcgtggccgacctgcagcagatcgccgacggcgtgtacgagggcttcctgaaggccctgatcgagttcgccagccagcacgtgtaccactgcgacctgtgcacccagagaggcttcatctgccagatctgccagcaccacgacatcatcttccccttcgagttcgacaccaccgtgagatgcgccgagtgcaagaccgtgttccaccagagctgccaggccgtggtgaagaagggctgccccagatgcgccagaagaagaaagtaccaggagcagaacatcttcgcctag

SEQ ID NO: 13542 - DNA, 1446 bp, synthetic construct; identical to SEQ ID NO: 11023
  source 1..1446: mol_type = other DNA; note = Synthetic coding sequence

SEQ ID NO: 13543 - DNA, 462 bp, synthetic construct
  source 1..462: mol_type = other DNA; note = Synthetic coding sequence
atggcccccggcagcagaggcgagagaagcagcttcagaagcagaagaggccccggcgtgcccagcccccagcccgacgtgaccatgctgagcagactgctgaaggagcaccaggccaagcagaacgagagaaaggagctgcaggagaagagaagaagagaggccatcaccgccgccacctgcctgaccgaggccctggtggaccacctgaacgtgggcgtggcccaggcctacatgaaccagagaaagctggaccacgaggtgaagaccctgcaggtgcaggccgcccagttcgccaagcagaccggccagtggatcggcatggtggagaacttcaaccaggccctgaaggagatcggcgacgtggagaactgggccagaagcatcgagctggacatgagaaccatcgccaccgccctggagtacgtgtacaagggccagctgcagagcgcccccagctag

SEQ ID NO: 13544 - DNA, 1311 bp, synthetic construct
  source 1..1311: mol_type = other DNA; note = Synthetic coding sequence
atgctgtggaacttcaagccccacgccagagcctacagatacgtgggccacaaggacgtggtgaccagcgtgcagttcagcccccacggcaacctgctggccagcgccagcagagacagaaccgtgagactgtggatccccgacaagagaggcaagttcagcgagttcaaggcccacaccgcccccgtgagaagcgtggacttcagcgccgacggccagttcctggccaccgccagcgaggacaagagcatcaaggtgtggagcatgtacagacagagattcctgtacagcctgtacagacacacccactgggtgagatgcgccaagttcagccccgacggcagactgatcgtgagctgcagcgaggacaagaccatcaagatctgggacaccaccaacaagcagtgcgtgaacaacttcagcgacagcgtgggcttcgccaacttcgtggacttcaaccccagcggcacctgcatcgccagcgccggcagcgaccagaccgtgaaggtgtgggacgtgagagtgaacaagctgctgcagcactaccaggtgcacagcggcggcgtgaactgcatcagcttccaccccagcggcaactacctgatcaccgccagcagcgacggcaccctgaagatcctggacctgctggagggcagactgatctacaccctgcagggccacaccggccccgtgttcaccgtgagcttcagcaagggcggcgagctgttcgccagcggcggcgccgacacccaggtgctgctgtggagaaccaacttcgacgagctgcactgcaagggcctgaccaagagaaacctgaagagactgcacttcgacagccccccccacctgctggacatctaccccagaaccccccacccccacgaggagaaggtggagaccgtggagatcaaccccaagctggaggtgatcgacctgcagatcagcaccccccccgtgatggacatcctgagcttcgacagcaccaccaccaccgagaccagcggcagaaccctgcccgacaagggcgaggaggcctgcggctacttcctgaaccccagcctgatgagccccgagtgcctgcccaccaccaccaagaagaagaccgaggacatgagcgacctgccctgcgagagccagagaagcatccccctggccgtgaccgacgccctggagcacatcatggagcagctgaacgtgctgacccagaccgtgagcatcctggagcagagactgaccctgaccgaggacaagctgaaggactgcctggagaaccagcagaagctgttcagcgccgtgcagcagaagagctag

SEQ ID NO: 13545 - DNA, 597 bp, synthetic construct; identical to SEQ ID NO: 10225
  source 1..597: mol_type = other DNA; note = Synthetic coding sequence

SEQ ID NO: 13546 - DNA, 597 bp, synthetic construct; identical to SEQ ID NO: 10225
  source 1..597: mol_type = other DNA; note = Synthetic coding sequence

SEQ ID NO: 13547 - DNA, 495 bp, synthetic construct
  source 1..495: mol_type = other DNA; note = Synthetic coding sequence
atgatggagggcaacggcaccgagaacagctgcagcagaaccagaggctggctgcagcaggacaacgacgccaagccctggctgtggaagttcagcaactgcttcagcagacccgagcagaccctgccccacagcccccagaccaaggagtacatggagaacaagaaggtggccgtggagctgaaggacgtgcccagccccctgcacgccggcagcaagctgttccccgccgtgcccctgcccgacatcagaagcctgcagcagcccaagatccagctgagcagcgtgcccaaggtgagctgctgcgcccactgccccaacgagcccagcaccagccccatgagattcggcggcggcggcggcggcagcggcggcaccagcagcctgatccaccccggcgccctgctggacagccagagcaccagaaccatcacctgccaggtgggcagcggcttcgccttccagagcgccagcagcctgcagaacgccagctag

SEQ ID NO: 13548 - DNA, 855 bp, synthetic construct
  source 1..855: mol_type = other DNA; note = Synthetic coding sequence
atgctgagcgtggtggagaacggcctggacccccaggccgccatccccgtgatcaagaagaagctggtgggcagcgtgaaggccctgcagaagcagtacgtgagcctggacaccgtggtgaccagcgaggacggcgacgccaacaccatgtgcagcgccctggaggccgtgttcatccacggcctgcacgccaagcacatcagagccgaggccggcggcaagagaaagaagagcgcccaccagaagcccctgccccagcccgtgttctggcccctgctgaaggccgtgacccacaagcacatcatcagcgagctggagcacctgaccttcgtgaacaccgacgtgggcagatgcagagcctggctgagactggccctgaacgacggcctgatggagtgctacctgaagctgctgctgcaggagcaggccagactgcagctgcagagaaaggagagcctggacagcatcagccacagcagcggcagcgaggacatcgaggtgcaccacagcggccacaagatcagaagaaaccagaagctgaccgccagcagcctgagcctggacaccgccagcagcagccagctgagctgcagcctgaacagcgacagctgcctgctgcaggagaacggcagcaagagccccgaccactgcgaggagcccatgagctgcgacagcgacctgggcaccgccaacgccgaggacagcgacagaagcctgcaggacatcaagatcttcagctgggcccagtggctgacccccgtgatccccgccctgtgggaggccgaggccggcggcagccagagacagcagatcgagaccttcctggccaacaccgtgaagccccacctgtactag

SEQ ID NO: 13549 - DNA, 3282 bp, synthetic construct
  source 1..3282: mol_type = other DNA; note = Synthetic coding sequence
atgggcggcaaggcctggcccagaagagccgtgggcaccgccggcggcccctgcgccgagcagatcagcgcccccttccagaccctgctgatgccccacctgcccctggccagcttcagaccccccttctggggcctgagacacagcagaggcctgcccagattccacagcgtgagcacccagagcgagccccacggcagccccatcagcagaagaaacagagaggccaagcagaagagactgagagagaagcaggccaccctggaggccgagatcgccggcgagagcaagagccccgccgagagcatcaaggcctggagacccaaggagctggtgctgtacgagatccccaccaagcccggcgagaagaaggacgtgagcggccccctgccccccgcctacagccccagatacgtggaggccgcctggtacccctggtgggtgagagagggcttcttcaagcccgagtaccaggccagactgccccaggccaccggcgagaccttcagcatgtgcatccccccccccaacgtgaccggcagcctgcacatcggccacgccctgaccgtggccatccaggacgccctggtgagatggcacagaatgagaggcgaccaggtgctgtgggtgcccggcagcgaccacgccggcatcgccacccaggccgtggtggagaagcagctgtggaaggagagaggcgtgagaagacacgagctgagcagagaggccttcctgagagaggtgtggcagtggaaggaggccaagggcggcgagatctgcgagcagctgagagccctgggcgccagcctggactgggacagagagtgcttcaccatggacgtgggcagcagcgtggccgtgaccgaggccttcgtgagactgtacaaggccggcctgctgtacagaaaccaccagctggtgaactggagctgcgccctgagaagcgccatcagcgacatcgaggtggagaacagacccctgcccggccacacccagctgagactgcccggctgccccacccccgtgagcttcggcctgctgttcagcgtggccttccccgtggacggcgagcccgacgccgaggtggtggtgggcaccaccagacccgagaccctgcccggcgacgtggccgtggccgtgcaccccgacgacagcagatacacccacctgcacggcagacagctgagacaccccctgatgggccagcccctgcccctgatcaccgactacgccgtgcagccccacgtgggcaccggcgccgtgaaggtgacccccgcccacagccccgccgacgccgagatgggcgccagacacggcctgagccccctgaacgtgatcgccgaggacggcaccatgaccagcctgtgcggcgactggctgcagggcctgcacagattcgtggccagagagaagatcatgagcgtgctgagcgagagaggcctgttcagaggcctgcagaaccaccccatggtgctgcccatctgcagcagaagcggcgacgtgatcgagtacctgctgaagaaccagtggttcgtgagatgccaggagatgggcgccagagccgccaaggccgtggagagcggcgccctggagctgagccccagcttccaccagaagaactggcagcactggttcagccacatcggcgactggtgcgtgagcagacagctgtggtggggccaccagatccccgcctacctggtggtggaggaccacgcccagggcgaggaggactgctgggtggtgggcagaagcgaggccgaggccagagaggtggccgccgagctgaccggcagacccggcgccgagctgaccctggagagagaccccgacgtgctggacacctggttcagcagcgccctgttccccttcagcgccctgggctggccccaggagacccccgacctggccagattctaccccctgagcctgctggagaccggcagcgacctgctgctgttctgggtgggcagaatggtgatgctgggcacccagctgaccggccagctgcccttcagcaaggtgctgctgcaccccatggtgagagacagacagggcagaaagatgagcaagagcctgggcaacgtgctggaccccagagacatcatcagcggcgtggagatgcagctgctgcaggagaagctgagaagcggcaacctggaccccgccgagctggccatcgtggccgccgcccagaagaaggacttcccccacggcatccccgagtgcggcaccgacgccctgagattcaccctgtgcagccacggcgtgcaggccggcgacctgcacctgagcgtgagcgaggtgcagagctgcagacacttctgcaacaagatctggaacgccctgagattcatcctgaacgccctgggcgagaagttcgtgccccagcccgccgaggagctgagccccagcagccccatggacgcctggatcctgagcagactggccctggccgcccaggagtgcgagagaggcttcctgaccagagagctgagcctggtgacccacgccctgcaccacttctggctgcacaacctgtgcgacgtgtacctggaggccgtgaagcccgtgctgtggcacagccccagacccctgggccccccccaggtgctgttcagctgcgccgacctgggcctgagactgctggcccccctgatgcccttcctggccgaggagctgtggcagagactgccccccagacccggctgcccccccgcccccagcatcagcgtggccccctaccccagcgcctgcagcctggagcactggagacagcccgagctggagagaagattcagcagagtgcaggaggtggtgcaggtgctgagagccctgagagccacctaccagctgaccaaggccagacccagagtgctgctgcagagcagcgagcccggcgaccagggcctgttcgaggccttcctggagcccctgggcaccctgggctactgcggcgccgtgggcctgctgccccccggcaccgccgcccccagcggctgggcccaggcccccctgagcgacaccgcccaggtgtacatggagctgcagggcctggtggacccccagatccagctgcccctgctggccgccagaagatacaagctgcagaagcagctggacagcctgaccgccagaacccccagcgagggcgaggccggcacccagagacagcagaagctgagcagcctgcagctggagctgagcaagctggacaaggccgccagccacctgagacagctgatggacgagccccccgcccccggcagccccgagctgtag

SEQ ID NO: 13550 - DNA, 3621 bp, synthetic construct
  source 1..3621: mol_type = other DNA; note = Synthetic coding sequence
atgaccagcgccgccgagatcaagaagccccccgtggcccccaagcccaagttcgtggtggccaacaacaagcccgcccccccccccatcgcccccaagcccgacatcgtgatcagcagcgtgccccagagcaccaagaagatgaagcccgccatcgcccccaagcccaaggtgctgaagaccagccccgtgagagagatcggccagagccccagcagaaagatcatgctgaacctggagggccacaagcaggagctggccgagagcaccgacaacttcaactgcaagtacgagggcaaccagagcaacgactacatcagccccatgtgcagctgcagcagcgagtgcatccacaagctgggccacagagagaacctgtgcgtgaagcagctggtgctggagcccctggagatgaacgagaacctggagaacagcaagatcgacgagaccctgaccatcaagaccagaagcaagtgcgacctgtacggcgagaaggccaagaaccagggcggcgtggtgctgaaggccagcgtgctggaggaggagctgaaggacgccctgatccaccagatgccccccttcatcagcgcccagaagcacagacccaccgacagccccgagatgaacggcggctgcaacagcaacggccagttcagaatcgagttcgccgacctgagccccagccccagcagcttcgagaaggtgcccgaccaccacagctgccacctgcagctgcccagcgacgagtgcgagcacttcgagacctgccaggacgacagcgagaagagcaacaactgcttccagagcagcgagctggaggccctggagaacggcaagagaagcaccctgatcagcagcgacggcgtgagcaagaagagcgaggtgaaggacctgggccccctggagatccacctggtgccctacacccccaagttccccacccccaagcccagaaagaccagaaccgccagactgctgagacagaagtgcgtggacacccccagcgagagcaccgaggagcccggcaacagcgacagcagcagcagctgcctgaccgagaacagcctgaagatcaacaagatcagcgtgctgcaccagaacgtgctgtgcaagcaggagcaggtggacaagatgaagctgggcaacaagagcgagctgaacatggagagcaacagcgacgcccaggacctggtgaacagccagaaggccatgtgcaacgagaccaccagcttcgagaagatggcccccagcttcgacaaggacagcaacctgagcagcgacagcaccaccgtggacggcagcagcatgagcctggccgtggacgagggcaccggcttcatcagatgcaccgtgagcatgagcctgcccaagcagctgaagctgacctgcaacgagcacctgcagagcggcagaaacctgggcgtgagcgccccccagatgcagaaggagagcgtgatcaaggaggagaacagcctgagaatcgtgcccaagaagccccagagacacagcctgcccgccaccggcgtgctgaagaaggccgccagcgaggagctgctggagaagagcagctaccccagcagcgaggagaagagcagcgagaagagcctggagagaaaccacctgcagcacctgtgcgcccagaacagaggcgtgagcagcagcttcgacatgcccaagagagccagcgagaagcccgtgtggaagctgccccaccccatcctgcccttcagcggcaaccccgagttcctgaagagcgtgaccgtgagcagcaacagcgagcccagcaccgccctgaccaagcccagagccaagagcctgagcgccatggacgtggagaagtgcaccaagccctgcaaggacagcaccaagaagaacagcttcaagaagctgctgagcatgaagctgagcatctgcttcatgaagagcgacttccagaagttctggagcaagagcagccagctgggcgacaccaccaccggccacctgagcagcggcgagcagaagggcatcgagagcgactggcagggcctgctggtgggcgaggagaagagaagcaagcccatcaaggcctacagcaccgagaactacagcctggagagccagaagaagagaaagaagagcagaggccagaccagcgccgccaacggcctgagagccgagagcctggacgaccagatgctgagcagagagagcagcagccaggccccctacaagagcgtgaccagcctgtgcgcccccgagtacgagaacatcagacactacgaggagatccccgagtacgagaacctgcccttcatcatggccatcagaaagacccaggagctggagtggcagaacagcagcagcatggaggacgccgacgccaacgtgtacgaggtggaggagccctacgaggcccccgacggccagctgcagctgggccccagacaccagcacagcagcagcggcgccagccaggaggagcagaacgacctgggcctgggcgacctgcccagcgacgaggaggagatcatcaacagcagcgacgaggacgacgtgagcagcgagagcagcaagggcgagcccgaccccctggaggacaagcaggacgaggacaacggcatgaagagcaaggtgcaccacatcgccaaggagatcatgagcagcgagaaggtgttcgtggacgtgctgaagctgctgcacatcgacttcagagacgccgtggcccacgccagcagacagctgggcaagcccgtgatcgaggacagaatcctgaaccagatcctgtactacctgccccagctgtacgagctgaacagagacctgctgaaggagctggaggagagaatgctgcactggaccgagcagcagagaatcgccgacatcttcgtgaagaagggcccctacctgaagatgtacagcacctacatcaaggagttcgacaagaacatcgccctgctggacgagcagtgcaagaagaaccccggcttcgccgccgtggtgagagagttcgagatgagccccagatgcgccaacctggccctgaagcactacctgctgaagcccgtgcagagaatcccccagtacagactgctgctgaccgactacctgaagaacctgatcgaggacgccggcgactacagagacacccaggacgccctggccgtggtgatcgaggtggccaaccacgccaacgacaccatgaagcagggcgacaacttccagaagctgatgcagatccagtacagcctgaacggccaccacgagatcgtgcagcccggcagagtgttcctgaaggagggcatcctgatgaagctgagcagaaaggtgatgcagcccagaatgttcttcctgttcaacgacgccctgctgtacaccacccccgtgcagagcggcatgtacaagctgaacaacatgctgagcctggccggcatgaaggtgagaaagcccacccaggaggcctaccagaacgagctgaagatcgagagcgtggagagaagcttcatcctgagcgccagcagcgccaccgagagagacgagtggctggaggccatcagcagagccatcgaggagtacgccaagaagagaatcaccttctgccccagcagaagcctggacgaggccgacagcgagaacaagtag

SEQ ID NO: 13551 - DNA, 435 bp, synthetic construct
  source 1..435: mol_type = other DNA; note = Synthetic coding sequence
atggacaaggacagccagggcctgctggacagcagcctgatggccagcggcaccgccagcagaagcgaggacgaggagagcctggccggccagaagagagccagcagccaggccctgggcaccatccccaagagaagaagcagcagcagaaccctgtacagattcatcaagagaaagaagttcgacgacgagctggtggagagcagcctggccaagagcagcaccagagccaagggcgccagcggcgtggagcccggcagatgcagcggcagcgagcccagcagcagcgagaagaagaaggtgagcaaggcccccagcacccccgtgccccccagccccgcccccgcccccggcctgaccaagagagtgaagaagagcaagcagcccctgcaggtgaccaaggacctgggcagatggaagcccgccgacgactag

SEQ ID NO: 13552 - DNA, 810 bp, synthetic construct; identical to SEQ ID NO: 12242
  source 1..810: mol_type = other DNA; note = Synthetic coding sequence

SEQ ID NO: 13553 - DNA, 501 bp, synthetic construct
  source 1..501: mol_type = other DNA; note = Synthetic coding sequence
atggccaacgaccccctggagggcttccacgaggtgaacctggccagccccaccagccccgacctgctgggcgtgtacgagagcggcacccaggagcagaccaccagccccagcgtgatctacagaccccaccccagcgccctgagcagcgtgcccatccaggccaacgccctggacgtgagcgagctgcccacccagcccgtgtacagcagccccagaagactgaactgcgccgagatcagcagcatcagcttccacgtgaccgaccccgccccctgcagcaccagcggcgtgaccgccggcctgaccaagctgaccaccagaaaggacaactacaacgccgagagagagttcctgcagggcgccaccatcaccgaggcctgcgacggcagcgacgacatcttcggcctgagcaccgacagcctgagcagactgagaagccccagcgtgctggaggtgagagagaagggctacgagagactgaaggaggagctggcctag

SEQ ID NO: 13554 - DNA, 390 bp, synthetic construct
  source 1..390: mol_type = other DNA; note = Synthetic coding sequence
atggacaccatgatgctgaacgtgagaaacctgttcgagcagctggtgagaagagtggagatcctgagcgagggcaacgaggtgcagttcatccagctggccaaggacttcgaggacttcagaaagaagtggcagagaaccgaccacgagctgggcaagtacaaggacctgctgatgaaggccgagaccgagagaagcgccctggacgtgaagctgaagcacgccagaaaccaggtggacgtggagatcaagagaagacagagagccgaggccgactgcgagaagctggagagacagatccagctgatcagagagatgctgatgtgcgacaccagcggcagcatccagctgagcgaggagcagaagagcgccctggccttcctgaactag

SEQ ID NO: 13555 - DNA, 486 bp, synthetic construct
  source 1..486: mol_type = other DNA; note = Synthetic coding sequence
atgaccctgagatgcctggagcccagcggcaacggcggcgagggcaccagaagccagtggggcaccgccggcagcgccgaggagcccagcccccaggccgccagactggccaaggccctgagagagctgggccagaccggctggtactggggcagcatgaccgtgaacgaggccaaggagaagctgaaggaggcccccgagggcaccttcctgatcagagacagcagccacagcgactacctgctgaccatcagcgtgaagaccagcgccggccccaccaacctgagaatcgagtaccaggacggcaagttcagactggacagcatcatctgcgtgaagagcaagctgaagcagttcgacagcgtggtgcacctgatcgactactacgtgcagatgtgcaaggacaagagaaccggccccgaggcccccagaaacggcaccgtgcacctgtacctgaccaagcccctgtacaccagcgccccctag

SEQ ID NO: 13556 - DNA, 1389 bp, synthetic construct; identical to SEQ ID NO: 10274
  source 1..1389: mol_type = other DNA; note = Synthetic coding sequence

SEQ ID NO: 13557 - DNA, 576 bp, synthetic construct; identical to SEQ ID NO: 9211
  source 1..576: mol_type = other DNA; note = Synthetic coding sequence

SEQ ID NO: 13558 - DNA, 1212 bp, synthetic construct
  source 1..1212: mol_type = other DNA; note = Synthetic coding sequence
atggccagcagcagcgtgccccccgccaccgtgagcgccgccaccgccggccccggccccggcttcggcttcgccagcaagaccaagaagaagcacttcgtgcagcagaaggtgaaggtgttcagagccgccgaccccctggtgggcgtgttcctgtggggcgtggcccacagcatcaacgagctgagccaggtgcccccccccgtgatgctgctgcccgacgacttcaaggccagcagcaagatcaaggagtactgcccccaggtgttcagaaacctgagagacagattcggcatcgacgaccaggactacctggtgagcctgaccagaaacccccccagcgagagcgagggcagcgacggcagattcctgatcagctacgacagaaccctggtgatcaaggaggtgagcagcgaggacatcgccgacatgcacagcaacctgagcaactaccaccagtacatcgtgaagtgccacggcaacaccctgctgccccagttcctgggcatgtacagagtgagcgtggacaacgaggacagctacatgctggtgatgagaaacatgttcagccacagactgcccgtgcacagaaagtacgacctgaagggcagcctggtgagcagagaggccagcgacaaggagaaggtgaaggagctgcccaccctgaaggacatggacttcctgaacaagaaccagaaggtgtacatcggcgaggaggagaagaagatcttcctggagaagctgaagagagacgtggagttcctggtgcagctgaagatcatggactacagcctgctgctgggcatccacgacatcatcagaggcagcgagcccgaggaggaggcccccgtgagagaggacgagagcgaggtggacggcgactgcagcctgaccggcccccccgccctggtgggcagctacggcaccagccccgagggcatcggcggctacatccacagccacagacccctgggccccggcgagttcgagagcttcatcgacgtgtacgccatcagaagcgccgagggcgccccccagaaggaggtgtacttcatgggcctgatcgacatcctgacccagtacgacgccaagaagaaggccgcccacgccgccaagaccgtgaagcacggcgccggcgccgagatcagcaccgtgcaccccgagcagtacgccaagagattcctggacttcatcaccaacatcttcgcctag

SEQ ID NO: 13559 - DNA, 576 bp, synthetic construct
  source 1..576: mol_type = other DNA; note = Synthetic coding sequence
aagatcgaggtgatcgagatcatgaccgacagaggcagcggcaagaagagaggcttcgccttcgtgaccttcgacgaccacgacagcgtggacaagatcgtgatccagaagtaccacaccgtgaacggccacaactgcgaggtgagaaaggccctgagcaagcaggagatggccagcgccagcagcagccagagaggcagaagcggcagcggcaacttcggcggcggcagaggcggcggcttcggcggcaacgacaacttcggcagaggcggcaacttcagcggcagaggcggcttcggcggcagcagaggcggcggcggctacggcggcagcggcgacggctacaacggcttcggcaacgacggcagcaacttcggcggcggcggcagctacaacgacttcggcaactacaacaaccagagcagcaacttcggccccatgaagggcggcaacttcggcggcagaagcagcggcccctacggcggcggcggccagtacttcgccaagcccagaaaccagggcggctacggcggcagcagcagcagcagcagctacggcagcggcagaagattctag

SEQ ID NO: 13560 - DNA, 543 bp, synthetic construct
  source 1..543: mol_type = other DNA; note = Synthetic coding sequence
atggagctgaccatcttcatcctgagactggccatctacatcctgaccttccccctgtacctgctgaacttcctgggcctgtggagctggatctgcaagaagtggttcccctacttcctggtgagattcaccgtgatctacaacgagcagatggccagcaagaagagagagctgttcagcaacctgcaggagttcgccggccccagcggcaagctgagcctgctggaggtgggctgcggcaccggcgccaacttcaagttctacccccccggctgcagagtgacctgcatcgaccccaaccccaacttcgagaagttcctgatcaagagcatcgccgagaacagacacctgcagttcgagagattcgtggtggccgccggcgagaacatgcaccaggtggccgacggcagcgtggacgtggtggtgtgcaccctggtgctgtgcagcgtgaagaaccaggagagaatcctgagagaggtgtgcagagtgctgagacccggcggcgccttctacttcatggagcacgtggccgccgagtgctag

SEQ ID NO: 13561 - DNA, 1431 bp, synthetic construct
  source 1..1431: mol_type = other DNA; note = Synthetic coding sequence
atgggcctgaagaagatgaagggcctgagctacgacgaggccttcgccatggccaacgaccccctggagggcttccacgaggtgaacctggccagccccaccagccccgacctgctgggcgtgtacgagagcggcacccaggagcagaccaccagccccagcgtgatctacagaccccaccccagcgccctgagcagcgtgcccatccaggccaacgccctggacgtgagcgagctgcccacccagcccgtgtacagcagccccagaagactgaactgcgccgagatcagcagcatcagcttccacgtgaccgaccccgccccctgcagcaccagcggcgtgaccgccggcctgaccaagctgaccaccagaaaggacaactacaacgccgagagagagttcctgcagggcgccaccatcaccgaggcctgcgacggcagcgacgacatcttcggcctgagcaccgacagcctgagcagactgagaagccccagcgtgctggaggtgagagagaagggctacgagagactgaaggaggagctggccaaggcccagagagagctgaagctgaaggacgaggagtgcgagagactgagcaaggtgagagaccagctgggccaggagctggaggagctgaccgccagcctgttcgaggaggcccacaagatggtgagagaggccaacatcaagcaggccaccgccgagaagcagctgaaggaggcccagggcaagatcgacgtgctgcaggccgaggtggccgccctgaagaccctggtgctgagcagcagccccaccagccccacccaggagcccctgcccggcggcaagacccccttcaagaagggccacaccagaaacaagagcaccagcagcgccatgagcggcagccaccaggacctgagcgtgatccagcccatcgtgaaggactgcaaggaggccgacctgagcctgtacaacgagttcagactgtggaaggacgagcccaccatggacagaacctgccccttcctggacaagatctaccaggaggacatcttcccctgcctgaccttcagcaagagcgagctggccagcgccgtgctggaggccgtggagaacaacaccctgagcatcgagcccgtgggcctgcagcccatcagattcgtgaaggccagcgccgtggagtgcggcggccccaagaagtgcgccctgaccggccagagcaagagctgcaagcacagaatcaagctgggcgacagcagcaactactactacatcagccccttctgcagatacagaatcaccagcgtgtgcaacttcttcacctacatcagatacatccagcagggcctggtgaagcagcaggacgtggaccagatgttctgggaggtgatgcagctgagaaaggagatgagcctggccaagctgggctacttcaaggaggagctgtag

SEQ ID NO: 13562 - DNA, 336 bp, synthetic construct
  source 1..336: mol_type = other DNA; note = Synthetic coding sequence
atggacaccatgatgctgaacgtgagaaacctgttcgagcagctggtgagaagagtggagatcctgagcgagggcaacgaggtgcagttcatccagctggccaaggacttcgaggacttcagaaagaagtggcagagaaccgaccacgagctgggcaagtacaaggacctgctgatgaaggccgagaccgagagaagcgccctggacgtgaagctgaagcacgccagaaaccaggtggacgtggagatcaagagaagacagagagccgaggccgactgcgagaagctggagagacagatccagctgatcagagagatgctgatgtgcgacacctag

SEQ ID NO: 13563 - DNA, 324 bp, synthetic construct
  source 1..324: mol_type = other DNA; note = Synthetic coding sequence
atgatcaagaacctggaggtgcagctgagaagagccaccgacgagatgaaggcctacatcagcagcgaccagcaggagaagagaaaggccatcagagagcagtacaccaagaacaccgccgagcaggagaacctgggcaagaagctgagagagaagcagaaggtgatcagagagagccacggccccaacatgaagcaggccaagatgtggagagacctggagcagctgatggagtgcaagaagcagtgcttcctgaagcagcagagccagaccagcatcggccaggtgatccaggagggcggcgaggacagactgatcctgtag

SEQ ID NO: 13564 - DNA, 2772 bp, synthetic construct
  source 1..2772: mol_type = other DNA; note = Synthetic coding sequence
atgtgcatccccccccccaacgtgaccggcagcctgcacatcggccacgccctgaccgtggccatccaggacgccctggtgagatggcacagaatgagaggcgaccaggtgctgtgggtgcccggcagcgaccacgccggcatcgccacccaggccgtggtggagaagcagctgtggaaggagagaggcgtgagaagacacgagctgagcagagaggccttcctgagagaggtgtggcagtggaaggaggccaagggcggcgagatctgcgagcagctgagagccctgggcgccagcctggactgggacagagagtgcttcaccatggacgtgggcagcagcgtggccgtgaccgaggccttcgtgagactgtacaaggccggcctgctgtacagaaaccaccagctggtgaactggagctgcgccctgagaagcgccatcagcgacatcgaggtggagaacagacccctgcccggccacacccagctgagactgcccggctgccccacccccgtgagcttcggcctgctgttcagcgtggccttccccgtggacggcgagcccgacgccgaggtggtggtgggcaccaccagacccgagaccctgcccggcgacgtggccgtggccgtgcaccccgacgacagcagatacacccacctgcacggcagacagctgagacaccccctgatgggccagcccctgcccctgatcaccgactacgccgtgcagccccacgtgggcaccggcgccgtgaaggtgacccccgcccacagccccgccgacgccgagatgggcgccagacacggcctgagccccctgaacgtgatcgccgaggacggcaccatgaccagcctgtgcggcgactggctgcagggcctgcacagattcgtggccagagagaagatcatgagcgtgctgagcgagagaggcctgttcagaggcctgcagaaccaccccatggtgctgcccatctgcagcagaagcggcgacgtgatcgagtacctgctgaagaaccagtggttcgtgagatgccaggagatgggcgccagagccgccaaggccgtggagagcggcgccctggagctgagccccagcttccaccagaagaactggcagcactggttcagccacatcggcgactggtgcgtgagcagacagctgtggtggggccaccagatccccgcctacctggtggtggaggaccacgcccagggcgaggaggactgctgggtggtgggcagaagcgaggccgaggccagagaggtggccgccgagctgaccggcagacccggcgccgagctgaccctggagagagaccccgacgtgctggacacctggttcagcagcgccctgttccccttcagcgccctgggctggccccaggagacccccgacctggccagattctaccccctgagcctgctggagaccggcagcgacctgctgctgttctgggtgggcagaatggtgatgctgggcacccagctgaccggccagctgcccttcagcaaggtgctgctgcaccccatggtgagagacagacagggcagaaagatgagcaagagcctgggcaacgtgctggaccccagagacatcatcagcggcgtggagatgcagctgctgcaggagaagctgagaagcggcaacctggaccccgccgagctggccatcgtggccgccgcccagaagaaggacttcccccacggcatccccgagtgcggcaccgacgccctgagattcaccctgtgcagccacggcgtgcaggccggcgacctgcacctgagcgtgagcgaggtgcagagctgcagacacttctgcaacaagatctggaacgccctgagattcatcctgaacgccctgggcgagaagttcgtgccccagcccgccgaggagctgagccccagcagccccatggacgcctggatcctgagcagactggccctggccgcccaggagtgcgagagaggcttcctgaccagagagctgagcctggtgacccacgccctgcaccacttctggctgcacaacctgtgcgacgtgtacctggaggccgtgaagcccgtgctgtggcacagccccagacccctgggccccccccaggtgctgttcagctgcgccgacctgggcctgagactgctggcccccctgatgcccttcctggccgaggagctgtggcagagactgccccccagacccggctgcccccccgcccccagcatcagcgtggccccctaccccagcgcctgcagcctggagcactggagacagcccgagctggagagaagattcagcagagtgcaggaggtggtgcaggtgctgagagccctgagagccacctaccagctgaccaaggccagacccagagtgctgctgcagagcagcgagcccggcgaccagggcctgttcgaggccttcctggagcccctgggcaccctgggctactgcggcgccgtgggcctgctgccccccggcaccgccgcccccagcggctgggcccaggcccccctgagcgacaccgcccaggtgtacatggagctgcagggcctggtggacccccagatccagctgcccctgctggccgccagaagatacaagctgcagaagcagctggacagcctgaccgccagaacccccagcgagggcgaggccggcacccagagacagcagaagctgagcagcctgcagctggagctgagcaagctggacaaggccgccagccacctgagacagctgatggacgagccccccgcccccggcagccccgagctgtag

SEQ ID NO: 13565 - DNA, 2076 bp, synthetic construct
  source 1..2076: mol_type = other DNA; note = Synthetic coding sequence
atggaggagagccccctgagcagagcccccagcagaggcggcgtgaacttcctgaacgtggccagaacctacatccccaacaccaaggtggagtgccactacaccctgccccccggcaccatgcccagcgccagcgactggatcggcatcttcaaggtggaggccgcctgcgtgagagactaccacaccttcgtgtggagcagcgtgcccgagagcaccaccgacggcagccccatccacaccagcgtgcagttccaggccagctacctgcccaagcccggcgcccagctgtaccagttcagatacgtgaacagacagggccaggtgtgcggccagagcccccccttccagttcagagagcccagacccatggacgagctggtgaccctggaggaggccgacggcggcagcgacatcctgctggtggtgcccaaggccaccgtgctgcagaaccagctggacgagagccagcaggagagaaacgacctgatgcagctgaagctgcagctggagggccaggtgaccgagctgagaagcagagtgcaggagctggagagagccctggccaccgccagacaggagcacaccgagctgatggagcagtacaagggcatcagcagaagccacggcgagatcaccgaggagagagacatcctgagcagacagcagggcgaccacgtggccagaatcctggagctggaggacgacatccagaccatcagcgagaaggtgctgaccaaggaggtggagctggacagactgagagacaccgtgaaggccctgaccagagagcaggagaagctgctgggccagctgaaggaggtgcaggccgacaaggagcagagcgaggccgagctgcaggtggcccagcaggagaaccaccacctgaacctggacctgaaggaggccaagagctggcaggaggagcagagcgcccaggcccagagactgaaggacaaggtggcccagatgaaggacaccctgggccaggcccagcagagagtggccgagctggagcccctgaaggagcagctgagaggcgcccaggagctggccgccagcagccagcagaaggccaccctgctgggcgaggagctggccagcgccgccgccgccagagacagaaccatcgccgagctgcacagaagcagactggaggtggccgaggtgaacggcagactggccgagctgggcctgcacctgaaggaggagaagtgccagtggagcaaggagagagccggcctgctgcagagcgtggaggccgagaaggacaagatcctgaagctgagcgccgagatcctgagactggagaaggccgtgcaggaggagagaacccagaaccaggtgttcaagaccgagctggccagagagaaggacagcagcctggtgcagctgagcgagagcaagagagagctgaccgagctgagaagcgccctgagagtgctgcagaaggagaaggagcagctgcaggaggagaagcaggagctgctggagtacatgagaaagctggaggccagactggagaaggtggccgacgagaagtggaacgaggacgccaccaccgaggacgaggaggccgccgtgggcctgagctgccccgccgccctgaccgacagcgaggacgagagccccgaggacatgagactgcccccctacggcctgtgcgagagaggcgaccccggcagcagccccgccggccccagagaggccagccccctggtggtgatcagccagcccgcccccatcagcccccacctgagcggccccgccgaggacagcagcagcgacagcgaggccgaggacgagaagagcgtgctgatggccgccgtgcagagcggcggcgaggaggccaacctgctgctgcccgagctgggcagcgccttctacgacatggccagcggcttcaccgtgggcaccctgagcgagaccagcaccggcggccccgccacccccacctggaaggagtgccccatctgcaaggagagattccccgccgagagcgacaaggacgccctggaggaccacatggacggccacttcttcttcagcacccaggaccccttcaccttcgagtag

SEQ ID NO: 13566 - DNA, 366 bp, synthetic construct
  source 1..366: mol_type = other DNA; note = Synthetic coding sequence
atgaacgagagcaagcccggcgacagccagaacctggcctgcgtgttctgcagaaagcacgacgactgccccaacaagtacggcgagaagaagaccaaggagaagtggaacctgaccgtgcactactactgcctgctgatgagcagcggcatctggcagagaggcaaggaggaggagggcgtgtacggcttcctgatcgaggacatcagaaaggaggtgaacagagccagcaagctgaagtgctgcgtgtgcaagaagaacggcgccagcatcggctgcgtggcccccagatgcaagagaagctaccacttcccctgcggcctgcagagagagtgcatcttccagttcaccggcaacttcgcctag

SEQ ID NO: 13567 - DNA, 657 bp, synthetic construct; identical to SEQ ID NO: 10167
  source 1..657: mol_type = other DNA; note = Synthetic coding sequence

SEQ ID NO: 13568 - DNA, 1899 bp, synthetic construct; identical to SEQ ID NO: 9855
  source 1..1899: mol_type = other DNA; note = Synthetic coding sequence

SEQ ID NO: 13569 - DNA, 1134 bp, synthetic construct; identical to SEQ ID NO: 11011
  source 1..1134: mol_type = other DNA; note = Synthetic coding sequence

SEQ ID NO: 13570 - DNA, 1134 bp, synthetic construct; identical to SEQ ID NO: 11011
  source 1..1134: mol_type = other DNA; note = Synthetic coding sequence

SEQ ID NO: 13571 - DNA, 774 bp, synthetic construct; identical to SEQ ID NO: 13521
  source 1..774: mol_type = other DNA; note = Synthetic coding sequence

SEQ ID NO: 13572 - DNA, 1446 bp, synthetic construct; identical to SEQ ID NO: 11023
  source 1..1446: mol_type = other DNA; note = Synthetic coding sequence

SEQ ID NO: 13573 - DNA, 597 bp, synthetic construct; identical to SEQ ID NO: 10225
  source 1..597: mol_type = other DNA; note = Synthetic coding sequence

SEQ ID NO: 13574 - DNA, 345 bp, synthetic construct
  source 1..345: mol_type = other DNA; note = Synthetic coding sequence
atgaccaccagacaggccaccaaggaccccctgctgagaggcgtgagccccacccccagcaagatccccgtgagaagccagaagagaacccccttccccaccgtgaccagctgcgccgtggaccaggagaaccaggaccccagaagatgggtgcagaagccccccctgaacatccagagacccctggtggacagcgccggccccagacccaaggccagacaccaggccgagaccagccagagactggtgggcatcagccagcccagaaaccccctggaggagctgagacccagccccagaggccagaacgtgggccccggcccccccgcccagaccgaggcctag

SEQ ID NO: 13575 - DNA, 1446 bp, synthetic construct; identical to SEQ ID NO: 11023
  source 1..1446: mol_type = other DNA; note = Synthetic coding sequence

SEQ ID NO: 13576 - DNA, 396 bp, synthetic construct; identical to SEQ ID NO: 11822
  source 1..396: mol_type = other DNA; note = Synthetic coding sequence

SEQ ID NO: 13577 - DNA, 765 bp, synthetic construct; identical to SEQ ID NO: 10001
  source 1..765: mol_type = other DNA; note = Synthetic coding sequence

SEQ ID NO: 13578 - DNA, 2772 bp, synthetic construct
  source 1..2772: mol_type = other DNA; note = Synthetic coding sequence
atgtgcatccccccccccaacgtgaccggcagcctgcacatcggccacgccctgaccgtggccatccaggacgccctggtgagatggcacagaatgagaggcgaccaggtgctgtgggtgcccggcagcgaccacgccggcatcgccacccaggccgtggtggagaagcagctgtggaaggagagaggcgtgagaagacacgagctgagcagagaggccttcctgagagaggtgtggcagtggaaggaggccaagggcggcgagatctgcgagcagctgagagccctgggcgccagcctggactgggacagagagtgcttcaccatggacgtgggcagcagcgtggccgtgaccgaggccttcgtgagactgtacaaggccggcctgctgtacagaaaccaccagctggtgaactggagctgcgccctgagaagcgccatcagcgacatcgaggtggagaacagacccctgcccggccacacccagctgagactgcccggctgccccacccccgtgagcttcggcctgctgttcagcgtggccttccccgtggacggcgagcccgacgccgaggtggtggtgggcaccaccagacccgagaccctgcccggcgacgtggccgtggccgtgcaccccgacgacagcagatacacccacctgcacggcagacagctgagacaccccctgatgggccagcccctgcccctgatcaccgactacgccgtgcagccccacgtgggcaccggcgccgtgaaggtgacccccgcccacagccccgccgacgccgagatgggcgccagacacggcctgagccccctgaacgtgatcgccgaggacggcaccatgaccagcctgtgcggcgactggctgcagggcctgcacagattcgtggccagagagaagatcatgagcgtgctgagcgagtggggcctgttcagaggcctgcagaaccaccccatggtgctgcccatctgcagcagaagcggcgacgtgatcgagtacctgctgaagaaccagtggttcgtgagatgccaggagatgggcgccagagccgccaaggccgtggagagcggcgccctggagctgagccccagcttccaccagaagaactggcagcactggttcagccacatcggcgactggtgcgtgagcagacagctgtggtggggccaccagatccccgcctacctggtggtggaggaccacgcccagggcgaggaggactgctgggtggtgggcagaagcgaggccgaggccagagaggtggccgccgagctgaccggcagacccggcgccgagctgaccctggagagagaccccgacgtgctggacacctggttcagcagcgccctgttccccttcagcgccctgggctggccccaggagacccccgacctggccagattctaccccctgagcctgctggagaccggcagcgacctgctgctgttctgggtgggcagaatggtgatgctgggcacccagctgaccggccagctgcccttcagcaaggtgctgctgcaccccatggtgagagacagacagggcagaaagatgagcaagagcctgggcaacgtgctggaccccagagacatcatcagcggcgtggagatgcaggtgctgcaggagaagctgagaagcggcaacctggaccccgccgagctggccatcgtggccgccgcccagaagaaggacttcccccacggcatccccgagtgcggcaccgacgccctgagattcaccctgtgcagccacggcgtgcaggccggcgacctgcacctgagcgtgagcgaggtgcagagctgcagacacttctgcaacaagatctggaacgccctgagattcatcctgaacgccctgggcgagaagttcgtgccccagcccgccgaggagctgagccccagcagccccatggacgcctggatcctgagcagactggccctggccgcccaggagtgcgagagaggcttcctgaccagagagctgagcctggtgacccacgccctgcaccacttctggctgcacaacctgtgcgacgtgtacctggaggccgtgaagcccgtgctgtggcacagccccagacccctgggccccccccaggtgctgttcagctgcgccgacctgggcctgagactgctggcccccctgatgcccttcctggccgaggagctgtggcagagactgccccccagacccggctgcccccccgcccccagcatcagcgtggccccctaccccagcgcctgcagcctggagcactggagacagcccgagctggagagaagattcagcagagtgcaggaggtggtgcaggtgctgagagccctgagagccacctaccagctgaccaaggccagacccagagtgctgctgcagagcagcgagcccggcgaccagggcctgttcgaggccttcctggagcccctgggcaccctgggctactgcggcgccgtgggcctgctgccccccggcgccgccgcccccagcggctgggcccaggcccccctgagcgacaccgcccaggtgtacatggagctgcagggcctggtggacccccagatccagctgcccctgctggccgccagaagatacaagctgcagaagcagctggacagcctgaccgccagaacccccagcgagggcgaggccggcacccagagacagcagaagctgagcagcctgcagctggagctgagcaagctggacaaggccgccagccacctgagacagctgatggacgagccccccgcccccggcagccccgagctgtag

SEQ ID NO: 13579 - DNA, 5229 bp, synthetic construct
  source 1..5229: mol_type = other DNA; note = Synthetic coding sequence
atgatggagggcaacggcaccgagaacagctgcagcagaaccagaggctggctgcagcaggacaacgacgccaagccctggctgtggaagttcagcaactgcttcagcagacccgagcagaccctgccccacagcccccagaccaaggagtacatggagaacaagaaggtggccgtggagctgaaggacgtgcccagccccctgcacgccggcagcaagctgttccccgccgtgcccctgcccgacatcagaagcctgcagcagcccaagatccagctgagcagcgtgcccaaggtgagctgctgcgcccactgccccaacgagcccagcaccagccccatgagattcggcggcggcggcggcggcagcggcggcaccagcagcctgatccaccccggcgccctgctggacagccagagcaccagaaccatcacctgccaggtgggcagcggcttcgccttccagagcgccagcagcctgcagaacgccagcgccagaaacaacctggccggcatcgccagcgacttccccagcatgtgcctggagagcaacctgagcagctgcaagcacctgccctgctgcggcaagctgcacttccagagctgccacggcaacgtgcacaagctgcaccagttccccagcctgcagggctgcaccagcgccggctacttcccctgcagcgacttcaccagcggcgcccccggccacctggaggagcacatcagccagagcgagctgaccccccacctgtgcaccaacagcctgcacctgaacgtggtgccccccgtgtgcctgaagggcagcctgtactgcgaggactgcctgaacaagcccgccagaaacagcatcatcgacgccgccaaggtgtggcccaacatccccccccccaacacccagcccgcccccctggccgtgcccctgtgcaacggctgcggcaccaagggcaccggcaaggagaccaccctgctgctggccaccagcctgggcaaggccgccagcaagttcggcagccccgaggtggccgtggccggccaggtgctggagaacctgccccccatcggcgtgttctgggacatcgagaactgcagcgtgcccagcggcagaagcgccaccgccgtggtgcagagaatcagagagaagttcttcaagggccacagagaggccgagttcatctgcgtgtgcgacatcagcaaggagaacaaggaggtgatccaggagctgaacaactgccaggtgaccgtggcccacatcaacgccaccgccaagaacgccgccgacgacaagctgagacagagcctgagaagattcgccaacacccacaccgcccccgccaccgtggtgctggtgagcaccgacgtgaacttcgccctggagctgagcgacctgagacacagacacggcttccacatcatcctggtgcacaagaaccaggccagcgaggccctgctgcaccacgccaacgagctgatcagattcgaggagttcatcagcgacctgccccccagactgcccctgaagatgccctgccacaccctgctgtacgtgtacaacctgcccgccaacaaggacggcaagagcgtgagcaacagactgagaagactgagcgacaactgcggcggcaaggtgctgagcatcaccggctgcagcgccatcctgagattcatcaaccaggacagcgccgagagagcccagaagagaatggagaacgaggacgtgttcggcaacagaatcatcgtgagcttcacccccaagaacagagagctgtgcgagaccaagagcagcaacgccatcgccgacaaggtgaagagccccaagaagctgaagaaccccaagctgtgcctgatcaaggacgccagcgagcagagcagcagcgccaaggccacccccggcaagggcagccaggccaacagcggcagcgccaccaagaacaccaacgtgaagagcctgcaggagctgtgcagaatggagagcaagaccggccacagaaacagcgagcaccagcagggccacctgagactggtggtgcccacccacggcaacagcagcgccgccgtgagcacccccaagaacagcggcgtggccgagcccgtgtacaagaccagccagaagaaggagaacctgagcgccagaagcgtgaccagcagccccgtggagaagaaggacaaggaggagaccgtgttccaggtgagctaccccagcgccttcagcaagctggtggccagcagacaggtgagccccctgctggccagccagagctggagcagcagcagaagcatgagccccaacctgctgaacagagccagccccctggccttcaacatcgccaacagcagcagcgaggccgactgccccgaccccttcgccaacggcgccgacgtgcaggtgagcaacatcgactacagactgagcagaaaggagctgcagcagctgctgcaggaggccttcgccagacacggcaaggtgaagagcgtggagctgagcccccacaccgactaccagctgaaggccgtggtgcagatggagaacctgcaggacgccatcggcgccgtgaacagcctgcacagatacaagatcggcagcaagaagatcctggtgagcctggccaccggcgccgccagcaagagcctgagcctgctgagcgccgagaccatgagcgtgctgcaggacgcccccgcctgctgcctgcccctgttcaagttcaccgacatctacgagaagaagttcggccacaagctgaacgtgagcgacctgtacaagctgaccgacaccgtggccatcagagagcagggcaacggcagactggtgtgcctgctgcccagcagccaggccagacagagccccctgggcagcagccagagccacgacggcagcagcaccaactgcagccccatcatcttcgaggagctggagtaccacgagcccgtgtgcagacagcactgcagcaacaaggacttcagcgagcacgagttcgaccccgacagctacaagatccccttcgtgatcctgagcctgaagaccttcgccccccaggtgcacagcctgctgcagacccacgagggcaccgtgcccctgctgagcttccccgactgctacatcgccgagttcggcgacctggaggtggtgcaggagaaccagggcggcgtgcccctggagcacttcatcacctgcgtgcccggcgtgaacatcgccaccgcccagaacggcatcaaggtggtgaagtggatccacaacaagccccccccccccaacaccgacccctggctgctgagaagcaagagccccgtgggcaacccccagctgatccagttcagcagagaggtgatcgacctgctgaagagccagcccagctgcgtgatccccatcagccacttcatccccagctaccaccaccacttcgccaagcagtgcagagtgagcgactacggctacagcaagctgatcgagctgctggaggccgtgccccacgtgctgcagatcctgggcatgggcagcaagagactgctgaccctgacccacagagcccaggtgaagagattcacccaggacctgctgaagctgctgaagagccaggccagcaagcaggtgatcgtgagagagttcagccaggcctaccactggtgcttcagcaaggactgggacgtgaccgagtacggcgtgtgcgagctgatcgacatcgtgagcgagatccccgacaccaccatctgcctgagccagcaggacaacgagatggtgatctgcatccccaagagagagagaacccaggacgagatcgagagaaccaagcagttcagcaaggacgtggtggacctgctgagacaccagccccacttcagaatgcccttcaacaagttcatccccagctaccaccaccacttcggcagacagtgcaagctggcctactacggcttcaccaagctgctggagctgttcgaggccatccccgacaccctgcaggtgctggagtgcggcgaggagaagatcctgaccctgaccgaggtggagagattcaaggccctggccgcccagttcgtgaagctgctgagaagccagaaggacaactgcctgatgatgaccgacctgctgaccgagtacgccaagaccttcggctacaccttcagactgcaggactacgacgtgagcagcatcagcgccctgacccagaagctgtgccacgtggtgaaggtggccgacatcgagagcggcagacagatccagctgatcaacagaaagagcctgagaagcctgaccgcccagctgctggtgctgctgatgagctgggagggcaccacccacctgagcgtggaggagctgaagagacactacgagagcacccacaacacccccctgaacccctgcgagtacggcttcatgaccctgaccgagctgctgaagagcctgccctacctggtggaggtgttcaccaacgacaagatggaggagtgcgtgaagctgaccagcctgtacctgttcgccaagaacgtgagaagcctgctgcacacctaccactaccagcagatcttcctgcacgagttcagcatggcctacaccaagtacgtgggcgagaccctgcagcccaagacctacggccacagcagcgtggaggagctgctgggcgccatcccccaggtggtgtggatcaagggccacggccacaagagaatcgtggtgctgaagaacgacatgaagagcagactgagcagcctgagcctgagccccgccaaccacgagaaccagcccagcgagggcgagagaatcctggaggtgcccgagagccacaccgccagcgagctgaagctgggcgccgacggcagcggccccagccacaccgagcaggagctgctgagactgaccgacgacagccccgtggacctgctgtgcgcccccgtgcccagctgcctgcccagcccccagctgagacccgaccccgtgatcctgcagagcgccgacctgatccagttcgaggagagaccccaggagcccagcgagatcatgatcctgaaccaggaggagaagatggagatccccatccccggcaagagcaagaccctgaccagcgacagcagcagcagctgcatcagcgccgccgtgcccgtgcccccctgccccagcagcgagaccagcgagagcctgctgagcaaggaccccgtggagagccccgccaagaagcagcccaagaacagagtgaagctggccgccaacttcagcctggcccccatcaccaagctgtag

SEQ ID NO: 13580 - DNA, 774 bp, synthetic construct; identical to SEQ ID NO: 13521
  source 1..774: mol_type = other DNA; note = Synthetic coding sequence

SEQ ID NO: 13581 - DNA, 1134 bp, synthetic construct; identical to SEQ ID NO: 11011
  source 1..1134: mol_type = other DNA; note = Synthetic coding sequence

SEQ ID NO: 13582 - DNA, 495 bp, synthetic construct; identical to SEQ ID NO: 13223
  source 1..495: mol_type = other DNA; note = Synthetic coding sequence

SEQ ID NO: 13583 - DNA, 393 bp, synthetic construct
  source 1..393: mol_type = other DNA; note = Synthetic coding sequence
atggacaccatgatgctgaacgtgagaaacctgttcgagcagctggtgagaagagtggagatcctgagcgagggcaacgaggtgcagttcatccagctggccaaggacttcgaggacttcagaaagaagtggcagagaaccgaccacgagctgggcaagtacaaggacctgctgatgaaggccgagaccgagagaagcgccctggacgtgaagctgaagcacgccagaaaccaggtggacgtggagatcaagagaagacagagagccgaggccgactgcgagaagctggagagacagatccagctgatcagagagatgctgatgtgcgacaccagcggcagcatccagctgagcgaggagcagaagagcgccctggccttcctgaacagatag

SEQ ID NO: 13584 - DNA, 324 bp, synthetic construct
  source 1..324: mol_type = other DNA; note = Synthetic coding sequence
atggacaccatgatgctgaacgtgagaaacctgttcgagcagctggtgagaagagtggagatcctgagcgagggcaacgaggtgcagttcatccagctggccaaggacttcgaggacttcagaaagaagtggcagagaaccgaccacgagctgggcaagtacaaggacctgctgatgaaggccgagaccgagagaagcgccctggacgtgaagctgaagcacgccagaaaccaggtggacgtggagatcaagagaagacagagagccgaggccgactgcgagaagctggagagacagatccagctgatcagagagatgctgtag

SEQ ID NO: 13585 - DNA, 885 bp, synthetic construct
  source 1..885: mol_type = other DNA; note = Synthetic coding sequence
atggacaccatgatgctgaacgtgagaaacctgttcgagcagctggtgagaagagtggagatcctgagcgagggcaacgaggtgcagttcatccagctggccaaggacttcgaggacttcagaaagaagtggcagagaaccgaccacgagctgggcaagtacaaggacctgctgatgaaggccgagaccgagagaagcgccctggacgtgaagctgaagcacgccagaaaccaggtggacgtggagatcaagagaagacagagagccgaggccgactgcgagaagctggagagacagatccagctgatcagagagatgctgatgtgcgacaccagcggcagcatccagctgagcgaggagcagaagagcgccctggccttcctgaacagaggccagcccagcagcagcaacgccggcaacaagagactgagcaccatcgacgagagcggcagcatcctgagcgacatcagcttcgacaagaccgacgagagcctggactgggacagcagcctggtgaagaccttcaagctgaagaagagagagaagagaagaagcaccagcagacagttcgtggacggcccccccggccccgtgaagaagaccagaagcatcggcagcgccgtggaccagggcaacgagagcatcgtggccaagaccaccgtgaccgtgcccaacgacggcggccccatcgaggccgtgagcaccatcgagaccgtgccctactggaccagaagcagaagaaagaccggcaccctgcagccctggaacagcgacagcaccctgaacagcagacagctggagcccagaaccgagaccgacagcgtgggcaccccccagagcaacggcggcatgagactgcacgacttcgtgagcaagaccgtgtag

SEQ ID NO: 13586 - DNA, 504 bp, synthetic construct; identical to SEQ ID NO: 9773
  source 1..504: mol_type = other DNA; note = Synthetic coding sequence

SEQ ID NO: 13587 - DNA, 882 bp, synthetic construct
  source 1..882: mol_type = other DNA; note = Synthetic coding sequence
atgctgagagagcccagaaagcagggcctggccggcagagcccacctgctgagccccggcaccaccggcagcatgaagacccccgtggagctggccgtgagcggcatgcagaccctgggcctgcagcacagatgcagaggcggctacagagtgaaggccagaaccagctacgtggacgagaccctgttcggcagccccgccggcaccagacccaccccccccgacttcgaccccccctgggtggagaaggccaacagaaccagaggcgtgggcaaggaggccagcaaggccctgggcgccaagggcagctgcgagaccacccccagcagaggcagcacccccaccctgacccccagaaagaagaacaagtacagacccatcagccacacccccagctactgcgacgagagcctgttcggcagcagaagcgagggcgccagcttcggcgcccccagaatggccaagggcgacgccgccaagctgagagccctgctgtggacccccccccccacccccagaggcagccacagccccagacccagagaggcccccctgagagccatccaccccgccggccccagcaagaccgagcccggccccgccgccgacagccagaagctgagcatgggcggcctgcacagcagcagacccctgaagagaggcctgagccacagcctgacccacctgaacgtgcccagcaccggccaccccgccaccagcgccccccacaccaacggcccccaggacctgagacccagcaccagcggcgtgaccttcagaagccccctggtgaccagcagagccagaagcgtgagcatcagcgtgcccagcacccccagaagaggcggcgccacccagaagcccaagcccccctggaagtag

SEQ ID NO: 13588 - DNA, 3282 bp, synthetic construct; identical to SEQ ID NO: 13549
  source 1..3282: mol_type = other DNA; note = Synthetic coding sequence

SEQ ID NO: 13589 - DNA, 276 bp, synthetic construct
  source 1..276: mol_type = other DNA; note = Synthetic coding sequence
atgggcaagaagaccaagagaaccgccgacagcagcagcagcgaggacgaggaggagtacgtggtggagaaggtgctggacagaagagtggtgaagggccaggtggagtacctgctgaagtggaagggcttcagcgaggagcacaacacctgggagcccgagaagaacctggactgccccgagctgatcagcgagttcatgaagaagtacaagaagatgaaggagggcgagaacaacaagcccagagagaagagcgagagcaacaagagaaagtag

SEQ ID NO: 13590 - DNA, 390 bp, synthetic construct; identical to SEQ ID NO: 10956
  source 1..390: mol_type = other DNA; note = Synthetic coding sequence

SEQ ID NO: 13591 - DNA, 1134 bp, synthetic construct; identical to SEQ ID NO: 11011
  source 1..1134: mol_type = other DNA; note = Synthetic coding sequence

SEQ ID NO: 13592 - DNA, 2031 bp, synthetic construct; identical to SEQ ID NO: 9296
  source 1..2031: mol_type = other DNA; note = Synthetic coding sequence

SEQ ID NO: 13593 - DNA, 456 bp, synthetic construct
  source 1..456: mol_type = other DNA; note = Synthetic coding sequence
atggacaccatgatgctgaacgtgagaaacctgttcgagcagctggtgagaagagtggagatcctgagcgagggcaacgaggtgcagttcatccagctggccaaggacttcgaggacttcagaaagaagtggcagagaaccgaccacgagctgggcaagtacaaggacctgctgatgaaggccgagaccgagagaagcgccctggacgtgaagctgaagcacgccagaaaccaggtggacgtggagatcaagagaagacagagagccgaggccgactgcgagaagctggagagacagatccagctgatcagagagatgctgatgtgcgacaccagcggcagcatccagctgagcgaggagcagaagagcgccctggccttcctgaacagaggccagcccagcagcagcaacgccggcaacaagagactgagcaccatcgacgagagcggcagctag

SEQ ID NO: 13594 - DNA, 1446 bp, synthetic construct; identical to SEQ ID NO: 11023
  source 1..1446: mol_type = other DNA; note = Synthetic coding sequence

SEQ ID NO: 13595 - DNA, 765 bp, synthetic construct; identical to SEQ ID NO: 10001
  source 1..765: mol_type = other DNA; note = Synthetic coding sequence

SEQ ID NO: 13596 - DNA, 1446 bp, synthetic construct; identical to SEQ ID NO: 11023
  source 1..1446: mol_type = other DNA; note = Synthetic coding sequence

SEQ ID NO: 13597 - DNA, 1974 bp, synthetic construct
  source 1..1974: mol_type = other DNA; note = Synthetic coding sequence
atgctgggccccagctgggacggcgacgaggccgagagcaccggcgagatcatcagactgggcgacaccgcccacaccttcagcctgagaagcaacggcgcccagtgccccaacgagatgctgagcaagaaggccctggccagccccagcagcaagagccacgaggacatgctgtacccccccagcgtgctgagcaagagcagaaccagcttcgtggaggacaccgagaccctgagcgtgagcggcatccccaacgccagaaagctgggcgagcccatcagagccgccatccccctgcaccccccctaccaccccagcgagcccagagccccctgccccatcggcaaggagtacctgcacagcagccactgcagccccgccgtgaacagcaccggcgagcacaccgagttcagcggcgacctggacgacggcctgttcctgatcagcaagctgcccaagggcagcaagtgggaggtgtaccccgcccaggtgcagggccccagaaccagaaagccccccaagggcaagagaaacgagaacagagccaccgccagcagctgcaacagccccttcccccagagacccagaaagagactgaccgagcaggagctgcacgacgtgagcgagaagctgagccagagactgagcgagctggactggatgctgaagagcgccctgggcgacagaatcaaggagaagaccgaccacaaggaggagaacaccggcaacgaggaggtggaggacggcaccgaggagaccctgagccagcacagcgacggcatcgtggagtacggccccaagaagagcagacccggcctgagcatgagaagaaagcccccctacagaagccacagcctgagccccagccccgtgaacaagcacaagcagttccacctggagagaaagagacagagaaagcccagagagaccgacgtgagacagttccaggcccaggccttcaccgaggccttcgagagagagctgagaagacacaaggtgcaggagaacatcggccccctgagaatccacgagaaggaggaggagaccgagaagatctacagaggcgaggccgtgagaaagggcacccccgagtgcagccagccctggaagatctacagcagaaagaccaccacccagagcctgagaggcggcctgcccaagcccaacaaggccgtgcccatgaaggtgagcgagcacagcctgctgcccctgatgctggagcagttccccttcctgtacgtgagcggccccaccctgagcaagatgtggaagcagcagatcgcccaggtggagcagctgaagaaggaggcctgcagagagaacagaagcaagaagaagctgcaggacgagatcgaggaggccctgagaagacacgacctgctgaccaccctggtgaagaaggagtacgagcacaacaagagactgcaggacttcaaggactgcatcagaagacagagactgacccagagcaagatcaaggagaacagacagcagatcgtgagagccagaaagtactacgacgactacagagtgcagctgtgcgccaagatgatgagaatgagaaccagagaggagatgatcttcaagaagctgttcgaggagggcctgaacatccagaagcagagactgagagacctgagaaactacgccaaggagaagagagacgagcagagaagaagacaccaggacgagctggacagcatggagaactactacaaggaccagttcagcctgctggccgaggccatcagccaggagcaccaggagctgaaggccagagagaagagccaggcccagaccctgcacaaggtgaagagagagctgagaagcaagatggagaaggagatccagcagctgcaggacatgatcacccagaacgacgacgacgtgttcttcagagagctggaggccgagagattcagaagcagactgcagctggccagcttccagtacagcaagagccccagcctgtag

SEQ ID NO: 13598 - DNA, 507 bp, synthetic construct
  source 1..507: mol_type = other DNA; note = Synthetic coding sequence
atgcagaccttcctgaagggcaagagagtgggctactggctgagcgagaagaagatcaagaagctgaacttccaggccttcgccgagctgtgcagaaagagaggcatggaggtggtgcagctgaacctgagcagacccatcgaggagcagggccccctggacgtgatcatccacaagctgaccgacgtgatcctggaggccgaccagaacgacagccagagcctggagctggtgcacagattccaggagtacatcgacgcccaccccgagaccatcgtgctggaccccctgcccgccatcagaaccctgctggacagaagcaagagctacgagctgatcagaaagatcgaggcctacatggaggacgacagaatctgcagcccccccttcatggagctgaccagcctgtgcggcgacgacaccatgagactgctggagaagaacggcctgaccttccccttcatctgcaagaccagagtggcccacggcaccaacagccacgagtag

SEQ ID NO: 13599 - DNA, 2211 bp, synthetic construct
  source 1..2211: mol_type = other DNA; note = Synthetic coding sequence
atgctgatccccgccctgcagatcagcgacagcgagagcgtgggcctggaggacggcatcgagcagagcgcctacctgaccgagagcaagatgaacgagagcaagcccggcgacagccagaacctggcctgcgtgttctgcagaaagcacgacgactgccccaacaagtacggcgagaagaagaccaaggagaagtggaacctgaccgtgcactactactgcctgctgatgagcagcggcatctggcagagaggcaaggaggaggagggcgtgtacggcttcctgatcgaggacatcagaaaggaggtgaacagagccagcaagctgaagtgctgcgtgtgcaagaagaacggcgccagcatcggctgcgtggcccccagatgcaagagaagctaccacttcccctgcggcctgcagagagagtgcatcttccagttcaccggcaacttcgccagcttctgctgggaccacagacccgtgcagatcatcaccagcaacaactacagagagagcctgccctgcaccatctgcctggagttcatcgagcccatccccagctacaacatcctgagaagcccctgctgcaagaacgcctggttccacagagactgcctgcaggtgcaggccatcaacgccggcgtgttcttcttcagatgcaccatctgcaacaacagcgacatcttccagaaggagatgctgagaatgggcatccacatccccgagaaggacgccagctgggagctggaggagaacgcctaccaggagctgctgcagcactacgagagatgcgacgtgagaagatgcagatgcaaggagggcagagactacaacgcccccgacagcaagtgggagatcaagagatgccagtgctgcggcagcagcggcacccacctggcctgcagcagcctgagaagctgggagcagaactgggagtgcctggagtgcagaggcatcatctacaacagcggcgagttccagaaggccaagaagcacgtgctgcccaacagcaacaacgtgggcatcaccgactgcctgctggaggagagcagccccaagctgcccagacagagccccggcagccagagcaaggacctgctgagacagggcagcaagttcagaagaaacgtgagcaccctgctgatcgagctgggcttccagatcaagaagaagaccaagagactgtacatcaacaaggccaacatctggaacagcgccctggacgccttcagaaacagaaacttcaaccccagctacgccatcgaggtggcctacgtgatcgagaacgacaacttcggcagcgagcaccccggcagcaagcaggagttcctgagcctgctgatgcagcacctggagaacagcagcctgttcgagggcagcctgagcaagaacctgagcctgaacagccaggccctgaaggagaacctgtactacgaggccggcaagatgctggccatcagcctggtgcacggcggccccagccccggcttcttcagcaagaccctgttcaactgcctggtgtacggccccgagaacacccagcccatcctggacgacgtgagcgacttcgacgtggcccagatcatcatcagaatcaacaccgccaccaccgtggccgacctgaagagcatcatcaacgagtgctacaactacctggagctgatcggctgcctgagactgatcaccaccctgagcgacaagtacatgctggtgaaggacatcctgggctaccacgtgatccagagagtgcacacccccttcgagagcttcaagcagggcctgaagaccctgggcgtgctggagaagatccaggcctaccccgaggccttctgcagcatcctgtgccacaagcccgagagcctgagcgccaagatcctgagcgagctgttcaccgtgcacaccctgcccgacgtgaaggccctgggcttctggaacagctacctgcaggccgtggaggacggcaagagcaccaccaccatggaggacatcctgatcttcgccaccggctgcagcagcatcccccccgccggcttcaagcccacccccagcatcgagtgcctgcacgtggacttccccgtgggcaacaagtgcaacaactgcctggccatccccatcaccaacacctacaaggagttccaggagaacatggacttcaccatcagaaacaccctgagactggagaaggaggagagcagccactacatcggccactag

SEQ ID NO: 13600 - DNA, 1131 bp, synthetic construct
  source 1..1131: mol_type = other DNA; note = Synthetic coding sequence
atggccaacagcgccaacaccaacaccgtgcccaagctgtacagaagcgtgatcgaggacgtgatcaacgacgtgagagacatcttcctggacgacggcgtggacgagcaggtgctgatggagctgaagaccctgtgggagaacaagctgatgcagagcagagccgtggacggcttccacagcgaggagcagcagctgctgctgcaggtgcagcagcagcaccagccccagcagcagcagcaccaccaccaccaccaccaccagcaggcccagccccagcagaccgtgccccagcaggcccagacccagcaggtgctgatccccgccagccagcaggccaccgccccccaggtgatcgtgcccgacagcaagctgatccagcacatgaacgccagcaacatgagcgccgccgccaccgccgccaccctggccctgcccgccggcgtgacccccgtgcagcagatcctgaccaacagcggccagctgctgcaggtggtgagagccgccaacggcgcccagtacatcttccagccccagcagagcgtggtgctgcagcagcaggtgatcccccagatgcagcccggcggcgtgcaggcccccgtgatccagcaggtgctggcccccctgcccggcggcatcagcccccagaccggcgtgatcatccagccccagcagatcctgttcaccggcaacaagacccaggtgatccccaccaccgtggccgcccccacccccgcccaggcccagatcaccgccaccggccagcagcagccccaggcccagcccgcccagacccaggcccccctggtgctgcaggtggacggcaccggcgacaccagcagcgaggaggacgaggacgaggaggaggactacgacgacgacgaggaggaggacaaggagaaggacggcgccgaggacggccaggtggaggaggagcccctgaacagcgaggacgacgtgagcgacgaggagggccaggagctgttcgacaccgagaacgtggtggtgtgccagtacgacaagatccacagaagcaagaacaagtggaagttccacctgaaggacggcatcatgaacctgaacggcagagactacatcttcagcaaggccatcggcgacgccgagtggtag

SEQ ID NO: 13601 - DNA, 237 bp, synthetic construct
  source 1..237: mol_type = other DNA; note = Synthetic coding sequence
atggagaccgactgcaaccccatggagctgagcagcatgagcggcttcgaggagggcagcgagctgaacggcttcgagggcaccgacatgaaggacatgagactggaggccgaggccgtggtgaacgacgtgctgttcgccgtgaacaacatgttcgtgagcaagagcctgagatgcgccgacgacgtggcctacatcaacgtggagaccaaggagagaaacagatactgcctgtag

SEQ ID NO: 13602 - DNA, 747 bp, synthetic construct; identical to SEQ ID NO: 12476
  source 1..747: mol_type = other DNA; note = Synthetic coding sequence

SEQ ID NO: 13603 - DNA, 2370 bp, synthetic construct
  source 1..2370: mol_type = other DNA; note = Synthetic coding sequence
atgagcgcccagaccagccccgccgagaagggcctgaaccccggcctgatgtgccaggagagctacgcctgcagcggcaccgacgaggccatcttcgagtgcgacgagtgctgcagcctgcagtgcctgagatgcgaggaggagctgcacagacaggagagactgagaaaccacgagagaatcagactgaagcccggccacgtgccctactgcgacctgtgcaagggcctgagcggccacctgcccggcgtgagacagagagccatcgtgagatgccagacctgcaagatcaacctgtgcctggagtgccagaagagaacccacagcggcggcaacaagagaagacaccccgtgaccgtgtacaacgtgagcaacctgcaggagagcctggaggccgaggagatggacgaggagaccaagagaaagaagatgaccgagaaggtggtgagcttcctgctggtggacgagaacgaggagatccaggtgaccaacgaggaggacttcatcagaaagctggactgcaagcccgaccagcacctgaaggtggtgagcatcttcggcaacaccggcgacggcaagagccacaccctgaaccacaccttcttctacggcagagaggtgttcaagaccagccccacccaggagagctgcaccgtgggcgtgtgggccgcctacgaccccgtgcacaaggtggccgtgatcgacaccgagggcctgctgggcgccaccgtgaacctgagccagagaaccagactgctgctgaaggtgctggccatcagcgacctggtgatctacagaacccacgccgacagactgcacaacgacctgttcaagttcctgggcgacgccagcgaggcctacctgaagcacttcaccaaggagctgaaggccaccaccgccagatgcggcctggacgtgcccctgagcaccctgggccccgccgtgatcatcttccacgagaccgtgcacacccagctgctgggcagcgaccaccccagcgaggtgcccgagaagctgatccaggacagattcagaaagctgggcagattccccgaggccttcagcagcatccactacaagggcaccagaacctacaacccccccaccgacttcagcggcctgagaagagccctggagcagctgctggagaacaacaccaccagaagccccagacaccccggcgtgatcttcaaggccctgaaggccctgagcgacagattcagcggcgagatccccgacgaccagatggcccacagcagcttcttccccgacgagtacttcacctgcagcagcctgtgcctgagctgcggcgtgggctgcaagaagagcatgaaccacggcaaggagggcgtgccccacgaggccaagagcagatgcagatacagccaccagtacgacaacagagtgtacacctgcaaggcctgctacgagagaggcgaggaggtgagcgtggtgcccaagaccagcgccagcaccgacagcccctggatgggcctggccaagtacgcctggagcggctacgtgatcgagtgccccaactgcggcgtggtgtacagaagcagacagtactggttcggcaaccaggaccccgtggacaccgtggtgagaaccgagatcgtgcacgtgtggcccggcaccgacggcttcctgaaggacaacaacaacgccgcccagagactgctggacggcatgaacttcatggcccagagcgtgagcgagctgagcctgggccccaccaaggccgtgaccagctggctgaccgaccagatcgcccccgcctactggagacccaacagccagatcctgagctgcaacaagtgcgccaccagcttcaaggacaacgacaccaagcaccactgcagagcctgcggcgagggcttctgcgacagctgcagcagcaagaccagacccgtgcccgagagaggctggggccccgcccccgtgagagtgtgcgacaactgctacgaggccagaaacgtgcagctggccgtgaccgaggcccaggtggacgacgagggcggcaccctgatcgccagaaaggtgggcgaggccgtgcagaacaccctgggcgccgtggtgaccgccatcgacatccccctgggcctggtgaaggacgccgccagacccgcctactgggtgcccgaccacgagatcctgcactgccacaactgcagaaaggagttcagcatcaagctgagcaagcaccactgcagagcctgcggccagggcttctgcgacgagtgcagccacgacagaagagccgtgcccagcagaggctgggaccaccccgtgagagtgtgcttcaactgcaacaagaagcccgcctggaccagcctgagcgtgatgaccggcaagggccccctgtgctag

SEQ ID NO: 13604 - DNA, 2271 bp, synthetic construct
  source 1..2271: mol_type = other DNA; note = Synthetic coding sequence
ctggccggcaacgagaccgagtgggtgaccatcgccaacaacctgctgttcaagtgccacatccacctgagaatccacgagctgcaggactgcgacgccaacgtgttcatcgccctgtaccagagcatcctgggcgagaaggtgcccgacctgatcgtgatccccagaagccaggaggacgacgcccacaacgtgcaggccgtgatcgacagcctggccctggactacctgcaggtgagcctgagccacatcaccgccctgtacagcgtgagcagaagaaagtacagcgagagaagaatgctgggccccagctgggacggcgacgaggccgagagcaccggcgagatcatcagactgggcgacaccgcccacaccttcagcctgagaagcaacggcgcccagtgccccaacgagatgctgagcaagaaggccctggccagccccagcagcaagagccacgaggacatgctgtacccccccagcgtgctgagcaagagcagaaccagcttcgtggaggacaccgagaccctgagcgtgagcggcatccccaacgccagaaagctgggcgagcccatcagagccgccatccccctgcaccccccctaccaccccagcgagcccagagccccctgccccatcggcaaggagtacctgcacagcagccactgcagccccgccgtgaacagcaccggcgagcacaccgagttcagcggcgacctggacgacggcctgttcctgatcagcaagctgcccaagggcagcaagtgggaggtgtaccccgcccaggtgcagggccccagaaccagaaagccccccaagggcaagagaaacgagaacagagccaccgccagcagctgcaacagccccttcccccagagacccagaaagagactgaccgagcaggagctgcacgacgtgagcgagaagctgagccagagactgagcgagctggactggatgctgaagagcgccctgggcgacagaatcaaggagaagaccgaccacaaggaggagaacaccggcaacgaggaggtggaggacggcaccgaggagaccctgagccagcacagcgacggcatcgtggagtacggccccaagaagagcagacccggcctgagcatgagaagaaagcccccctacagaagccacagcctgagccccagccccgtgaacaagcacaagcagttccacctggagagaaagagacagagaaagcccagagagaccgacgtgagacagttccaggcccaggccttcaccgaggccttcgagagagagctgagaagacacaaggtgcaggagaacatcggccccctgagaatccacgagaaggaggaggagaccgtgggcaagaacatccagagaagaagcttcgtgaaggagctgcagaacgtggtgagccccggcagattcaccctggagaagccccagagaagagtgagaggcggcctgcccaagcccaacaaggccgtgcccatgaaggtgagcgagcacagcctgctgcccctgatgctggagcagttccccttcctgtacgtgagcggccccaccctgagcaagatgtggaagcagcagatcgcccaggtggagcagctgaagaaggaggcctgcagagagaacagaagcaagaagaagctgcaggacgagatcgaggaggccctgagaagacacgacctgctgaccaccctggtgaagaaggagtacgagcacaacaagagactgcaggacttcaaggactgcatcagaagacagagactgacccagagcaagatcaaggagaacagacagcagatcgtgagagccagaaagtactacgacgactacagagtgcagctgtgcgccaagatgatgagaatgagaaccagagaggagatgatcttcaagaagctgttcgaggagggcctgaacatccagaagcagagactgagagacctgagaaactacgccaaggagaagagagacgagcagagaagaagacaccaggacgagctggacagcatggagaactactacaaggaccagttcagcctgctggccgaggccatcagccaggagcaccaggagctgaaggccagagagaagagccaggcccagaccctgcacaaggtgaagagagagctgagaagcaagatggagaaggagatccagcagctgcaggacatgatcacccagaacgacgacgacgtgttcttcagagagctggaggccgagagattcagaagcagactgcagctggccagcttccagtacagcaagagccccagcctgtag

SEQ ID NO: 13605 - DNA, 420 bp, synthetic construct; identical to SEQ ID NO: 12293
  source 1..420: mol_type = other DNA; note = Synthetic coding sequence

SEQ ID NO: 13606 - DNA, 300 bp, synthetic construct
  source 1..300: mol_type = other DNA; note = Synthetic coding sequence
atgaccgacaccagaagaagagtgaaggtgtacaccctgaacgaggacagacagtgggacgacagaggcaccggccacgtgagcagcggctacgtggagagactgaagggcatgagcctgctggtgagagccgagagcgacggcagcctgctgctggagagcaagatcaaccccaacaccgcctaccagaagcagcaggacaccctgatcgtgtggagcgaggccgagaactacgacctggccctgagcttccaggagaaggccggctgcgacgagatctgggagaagatctgccagtag

SEQ ID NO: 13607 - DNA, 2463 bp, synthetic construct; identical to SEQ ID NO: 10174
  source 1..2463: mol_type = other DNA; note = Synthetic coding sequence

SEQ ID NO: 13608 - DNA, 396 bp, synthetic construct
  source 1..396: mol_type = other DNA; note = Synthetic coding sequence
atgaacgagagcaagcccggcgacagccagaacctggcctgcgtgttctgcagaaagcacgacgactgccccaacaagtacggcgagaagaagaccaaggagaagtggaacctgaccgtgcactactactgcctgctgatgagcagcggcatctggcagagaggcaaggaggaggagggcgtgtacggcttcctgatcgaggacatcagaaaggaggtgaacagagccagcaagctgaagtgctgcgtgtgcaagaagaacggcgccagcatcggctgcgtggcccccagatgcaagagaagctaccacttcccctgcggcctgcagagagagtgcatcttccagttcaccggcaacttcgccagcttctgctgggaccacagacccgtgcagtag

SEQ ID NO: 13609 - DNA, 5934 bp, synthetic construct
  source 1..5934: mol_type = other DNA; note = Synthetic coding sequence
atggccgccagaagcgcccccagctgccacctgagactggagtgggtgtacggctacagaggccaccagtgcagaaacaacctgtactacaccgccgccaaggagatcgtgtacttcgtggccggcgtgggcgtggtgtacagccccagagagcacagacagaagttctacagaggccacagcgacgacatcatcagcctggccctgcaccccgagagagtgctggtggccaccggccaggtgggcaaggagccctacatctgcatctgggacagctacaccgtgcagaccatcagcgtgctgaaggacgtgcacacccacggcatcgcctgcctggccttcgacctggacggccagagactggtgagcgtgggcctggacagcaagaacgccgtgtgcgtgtgggactggaagagaggcaagatgctgagcatggcccccggccacaccgacagaatcttcgacatcagctgggacctgtaccagcccaacaagctggtgagctgcggcgtgaagcacatcaagttctggagcctgtgcggcaacgccctgacccccaagagaggcgtgttcggcaagaccggcgacctgcagaccatcctgtgcctggcctgcgccagagacgagctgacctacagcggcgccctgaacggcgacatctacgtgtggaagggcatcaacctgatcagaaccatccagggcgcccacgccgccggcatcttcagcatgaacgcctgcgaggagggcttcgccaccggcggcagagacggctgcatcagactgtgggacctgaccttcaagcccatcaccgtgatcgacctgagagagaccgaccagggctacaagggcctgagcgtgagaagcgtgtgctggagaggcgaccacatcctggtgggcacccaggacagcgagatcttcgagatcgtggtgcaggagagaaacaagcccttcctgatcatgcagggccactgcgagggcgagctgtgggccctggccgtgcaccccaccaagcccctggccgtgaccggcagcgacgacagaagcgtgagaatctggagcctggtggaccacgccctgatcgccagatgcaacatggaggagcccatcagatgcgccgccgtgaacgccgacggcatccacctggccctgggcatgaaggacggcagcttcaccgtgctgagagtgagagacatgaccgaggtggtgcacatcaaggacagaaaggaggccatccacgagctgaagtacagccccgacggcacctacctggccgtgggctgcaacgacagcagcgtggacatctacggcgtggcccagagatacaagaaggtgggcgagtgcctgggcagcctgagcttcatcacccacctggactggagcagcgacagcagatacctgcagaccaacgacggcaacggcaagagactgttctacagaatgcccggcggcaaggaggtgaccagcaccgaggagatcaagggcgtgcactgggccagctggacctgcgtgagcggcctggaggtgaacggcatctggcccaagtacagcgacatcaacgacatcaacagcgtggacggcaactacatcggccaggtgctggtgaccgccgacgactacggcatcatcaagctgttcagatacccctgcctgagaaagggcgccaagttcagaaagtacatcggccacagcgcccacgtgaccaacgtgagatggagccacgactaccagtgggtgatcagcatcggcggcgccgaccacagcgtgttccagtggaagttcatccccgagagaaagctgaaggacgccgtgcacatcgccccccaggagagcctggccgacagccacagcgacgagagcgacagcgacctgagcgacgtgcccgagctggacagcgagatcgagcaggagacccagctgacctacagaagacaggtgtacaaggaggacctgccccagctgaaggagcagtgcaaggagaagcagaagagcgccaccagcaagagaagagagagagcccccggcaacagcatcagactgcacttcgtgcacggctacagaggctacgactgcagaagcaacctgttctacacccagatcggcgagatcgtgtaccacgtggccgccgtgggcgtgatctacaacagacagcagaacacccagagattctacctgggccacgacgacgacatcctgtgcctgaccatccaccccctgaaggactacgtggccaccggccaggtgggcagagaccccagcatccacatctgggacaccgagaccatcaagcccctgagcatcctgaagggccaccaccagtacggcgtgagcgccgtggacttcagcgccgacggcaagagactggccagcgtgggcatcgacgacagccacaccgtggtgctgtgggactggaagaagggcgagaagctgagcatcgccagaggcagcaaggacaagatcttcgtggtgaagatgaacccctacgtgcccgacaagctgatcaccgccggcatcaagcacatgaagttctggagaaaggccggcggcggcctgatcggcagaaagggctacatcggcaccctgggcaagaacgacaccatgatgtgcgccgtgtacggctggaccgaggagatggccttcagcggcaccagcaccggcgacgtgtgcatctggagagacatcttcctggtgaagaccgtgaaggcccacgacggccccgtgttcagcatgcacgccctggagaagggcttcgtgaccggcggcaaggacggcatcgtggccctgtgggacgacagcttcgagagatgcctgaagacctacgccatcaagagagccgccctggcccccggcagcaagggcctgctgctggaggacaaccccagcatcagagccatcagcctgggccacggccacatcctggtgggcaccaagaacggcgagatcctggaggtggacaagagcggccccatcaccctgctggtgcagggccacatggagggcgaggtgtggggcctggccacccacccctacctgcccatctgcgccaccgtgagcgacgacaagaccctgagaatctgggacctgagccccagccactgcatgctggccgtgagaaagctgaagaagggcggcagatgctgctgcttcagccccgacggcaaggccctggccgtgggcctgaacgacggcagcttcctgatggccaacgccgacaccctggaggacctggtgagcttccaccacagaaaggacatgatcagcgacatcagattcagccccggcagcggcaagtacctggccgtggccagccacgacagcttcatcgacatctacaacgtgatgagcagcaagagagtgggcatctgcaagggcgccaccagctacatcacccacatcgactgggacatcagaggcaagctgctgcaggtgaacaccggcgccaaggagcagctgttcttcgaggcccccagaggcaagaagcagaccatccccagcgtggaggtggagaagatcgcctgggccagctggaccagcgtgctgggcctgtgctgcgagggcatctggcccgtgatcggcgaggtgaccgacgtgaccgccagctgcctgaccagcgacaagatggtgctggccaccggcgacgacctgggcttcgtgaagctgttcagataccccaccaagggcaagttcggcaagttcaagagatacgtggcccacagcacccacgtgaccaacgtgagatggacctacgacgacagcatgctggtgaccctgggcggcaccgacatgagcctgatggtgtggaccaacgagatggagggctacagagagaagagaccctgcgacagcgaggagagcgacatcgacagcgaggaggacggcggctacgacagcgacgtgaccagagagaacgagatcagctacaccatcagagccctgagcaccaacatcagacccatgctgggcatcaagccccacctgcagcagaaggagcccagcatcgacgagagacagggcgtggtgagaggcagcagaccccccgtgagcagagcccccccccagcccgagaagctgcagaccaacaacgtgggcaagaagaagagacccatcgaggacctggtgctggagctgatcttcggctacagaggcagagactgcagaaacaacgtgcactacctgaacgacggcgacgacatcatctaccacaccgccagcgtgggcatcctgcacaacgtggccaccggcagccagagcttctaccaggagcacaacgacgacatcctgtgcctgaccgtgaaccagcaccccaagttcatcaacatcgtggccaccggccaggtgggcgacagcgccgacatgagcgccaccgcccccagcatccacatctgggacgccatgaacaagcagaccctgagcatcctgagatgctaccacagcaagggcgtgtgcagcgtgagcttcagcgccaccggcaagctgctgctgagcgtgggcctggaccccgagcacaccatcaccatctggagatggcaggagggcgccaagatcgccagcagagccggccacaaccagagaatcttcgtggccgagttcagacccgacagcgacacccagttcgtgagcgtgggcgtgaagcacgtgaagttctggaccctggccggcagagccctgctgagcaagaagggcctgctgagcaccctggaggacgccagaatgcagaccatgctggccatcgccttcggcgccaacaacctgaccttcaccggcaccatcagcggcgacgtgtgcgtgtggaaggaccacatcctgtgcagaatcgtggccagagcccacaacggccccgtgttcgccatgtacaccaccctgagagacggcctgatcgtgaccggcggcaaggagagacccagcaaggagggcggcgccgtgaagctgtgggaccaggagctgagaagatgcagagccttcagactggagaccggccaggccaccgactgcgtgagaagcgtgtgcagaggcaagggcaagatcctggtgggcaccagaaacgccgagatcatcgaggtgggcgagaagaacgccgcctgcaacatcctggtgaacggccacgtggacggccccatctggggcctggccacccaccccagcagagacttcttcctgagcgccgccgaggacggcaccgtgagactgtgggacatcgccgacaagaagatgctgaacaaggtgaacctgggccacgccgccagaaccgtgtgctacagccccgagggcgacatggtggccatcggcatgaagaacggcgagttcatcatcctgctggtgagcagcctgaagatctggggcaagaagagagacagaagatgcgccatccacgacatcagattcagccccgacagcagatacctggccgtgggcagcagcgagaacagcgtggacttctacgacctgaccctgggccccaccctgaacagaatcagctactgcaaggacatccccagcttcgtgatccagatggacttcagcgccgacagcagctacctgcaggtgagcagcggctgctacaagagacacgtgtacgaggtgcccagcggcaagcacctgatggaccacgccgccatcgacagaatcacctgggccacctggaccagcatcctgggcgacgaggtgctgggcatctggagcagacacgccgagaaggccgacgtgaactgcgcctgcgtgagccacagcggcatcagcctggtgaccggcgacgacttcggcatggtgaagctgttcgacttcccctgccccgagaagttcgccaagcacaagagattcctgggccacagcccccacgtgaccaacatcagattcaccagcggcgacagacacgtggtgagcgccggcggcgacgactgcagcctgttcgtgtggaagtgcgtgcacaccccccactag

SEQ ID NO: 13610 - DNA, 2502 bp, synthetic construct
  source 1..2502: mol_type = other DNA; note = Synthetic coding sequence
atgaccgacaccagaagaagagtgaaggtgtacaccctgaacgaggacagacagtgggacgacagaggcaccggccacgtgagcagcggctacgtggagagactgaagggcatgagcctgctggtgagagccgagagcgacggcagcctgctgctggagagcaagatcaaccccaacaccgcctaccagaagcagcaggacaccctgatcgtgtggagcgaggccgagaactacgacctggccctgagcttccaggagaaggccggctgcgacgagatctgggagaagatctgccaggtgcagggcaaggaccccagcgtggacatcacccaggacctggtggacgagagcgaggaggagagattcgacgacatgagcagccccggcctggagctgcccagctgcgagctgagcagactggaggagatcgccgagctggtggccagcagcctgcccagccccctgagaagagagaagctggccctggccctggagaacgagggctacatcaagaagctgctggagctgttccacgtgtgcgaggacctggagaacatcgagggcctgcaccacctgtacgagatcatcaagggcatcttcctgctgaacagaaccgccctgttcgaggtgatgttcagcgaggagtgcatcatggacgtgatcggctgcctggagtacgaccccgccctgagccagcccagaaagcacagagagttcctgaccaagaccgccaagttcaaggaggtgatccccatcagcgaccccgagctgaagcagaagatccaccagacctacagagtgcagtacatccaggacatggtgctgcccacccccagcgtgttcgaggagaacatgctgagcaccctgcacagcttcatcttcttcaacaaggtggagatcgtgggcatgctgcaggaggacgagaagttcctgaccgacctgttcgcccagctgaccgacgaggccaccgacgaggagaagagacaggagctggtgaacttcctgaaggagttctgcgccttcagccagaccctgcagccccagaacagagacgccttcttcaagaccctgagcaacatgggcatcctgcccgccctggaggtgatcctgggcatggacgacacccaggtgagaagcgccgccaccgacatcttcagctacctggtggagtacaaccccagcatggtgagagagttcgtgatgcaggaggcccagcagaacgacgacgtgagcaagaagctgaccgagcagaagatcaccagcaaggacatcctgctgatcaacctgatcatcgagcacatgatctgcgacaccgaccccgagctgggcggcgccgtgcagctgatgggcctgctgagaaccctggtggaccccgagaacatgctggccaccgccaacaagaccgagaagaccgagttcctgggcttcttctacaagcactgcatgcacgtgctgaccgcccccctgctggccaacaccaccgaggacaagcccagcaaggacgacttccagaccgcccagctgctggccctggtgctggagctgctgaccttctgcgtggagcaccacacctaccacatcaagaactacatcatcaacaaggacatcctgagaagagtgctggtgctgatggccagcaagcacgccttcctggccctgtgcgccctgagattcaagagaaagatcatcggcctgaaggacgagttctacaacagatacatcatgaagagcttcctgttcgagcccgtggtgaaggccttcctgaacaacggcagcagatacaacctgatgaacagcgccatcatcgagatgttcgagttcatcagagtggaggacatcaagagcctgaccgcccacgtgatcgagaactactggaaggccctggaggacgtggactacgtgcagaccttcaagggcctgaagctgagattcgagcagcagagagagagacaggacaaccccaagctggacagcatgagaagcatcctgagaaaccacagatacagaagagacgccagaaccctggaggacgaggaggagatgtggttcaacaccgacgaggacgacatggaggacggcgaggccgtggtgagccccagcgacaagaccaagaacgacgacgacatcatggaccccatcagcaagttcatggagagaaagaagctgaaggagagcgaggagaaggaggtgctgctgaagaccaacctgagcggcagacagagccccagcttcaagctgagcctgagcagcggcaccaagaccaacctgaccagccagagcagcaccaccaacctgcccggcagccccggcagccccggcagccccggcagccccggcagccccggcagcgtgcccaagaacaccagccagaccgccgccatcaccaccaagggcggcctggtgggcctggtggactaccccgacgacgacgaggacgacgacgaggacgaggacaaggaggacaccctgcccctgagcaagaaggccaagttcgacagctag

SEQ ID NO: 13611 - DNA, 3987 bp, synthetic construct
  source 1..3987: mol_type = other DNA; note = Synthetic coding sequence
atgtggagaagaaagcaccccagaaccagcggcggcaccagaggcgtgctgagcggcaacagaggcgtggagtacggcagcggcagaggccacctgggcaccttcgagggcagatggagaaagctgcccaagatgcccgaggccgtgggcaccgaccccagcaccagcagaaagatggccgagctggaggaggtgaccctggacggcaagcccctgcaggccctgagagtgaccgacctgaaggccgccctggagcagagaggcctggccaagagcggccagaagagcgccctggtgaagagactgaagggcgccctgatgctggagaacctgcagaagcacagcaccccccacgccgccttccagcccaacagccagatcggcgaggagatgagccagaacagcttcatcaagcagtacctggagaagcagcaggagctgctgagacagagactggagagagaggccagagaggccgccgagctggaggaggccagcgccgagagcgaggacgagatgatccaccccgagggcgtggccagcctgctgccccccgacttccagagcagcctggagagacccgagctggagctgagcagacacagccccagaaagagcagcagcatcagcgaggagaagggcgacagcgacgacgagaagcccagaaagggcgagagaagaagcagcagagtgagacaggccagagccgccaagctgagcgagggcagccagcccgccgaggaggaggaggaccaggagacccccagcagaaacctgagagtgagagccgacagaaacctgaagaccgaggaggaggaggaggaggaggaggaggaggaggaggacgacgaggaggaggagggcgacgacgagggccagaagagcagagaggcccccatcctgaaggagttcaaggaggagggcgaggagatccccagagtgaagcccgaggagatgatggacgagagacccaagaccagaagccaggagcaggaggtgctggagagaggcggcagattcaccagaagccaggaggaggccagaaagagccacctggccagacagcagcaggagaaggagatgaagaccaccagccccctggaggaggaggagagagagatcaagagcagccagggcctgaaggagaagagcaagagccccagcccccccagactgaccgaggacagaaagaaggccagcctggtggccctgcccgagcagaccgccagcgaggaggagacccccccccccctgctgaccaaggaggccagcagcccccccccccacccccagctgcacagcgaggaggagatcgagcccatggagggccccgcccccgccgtgctgatccagctgagcccccccaacaccgacgccgacaccagagagctgctggtgagccagcacaccgtgcagctggtgggcggcctgagccccctgagcagccccagcgacaccaaggccgagagccccgccgagaaggtgcccgaggagagcgtgctgcccctggtgcagaagagcaccctggccgactacagcgcccagaaggacctggagcccgagagcgacagaagcgcccagcccctgcccctgaagatcgaggagctggccctggccaagggcatcaccgaggagtgcctgaagcagcccagcctggagcagaaggagggcagaagagccagccacaccctgctgcccagccacagactgaagcagagcgccgacagcagcagcagcagaagcagcagcagcagcagcagcagcagcagaagcagaagcagaagccccgacagcagcggcagcagaagccacagccccctgagaagcaagcagagagacgtggcccaggccagaacccacgccaaccccagaggcagacccaagatgggcagcagaagcaccagcgagagcagaagcagaagcagaagcagaagcagaagcgccagcagcaacagcagaaagagcctgagccccggcgtgagcagagacagcagcaccagctacaccgagaccaaggaccccagcagcggccaggaggtggccaccccccccgtgccccagctgcaggtgtgcgagcccaaggagagaaccagcaccagcagcagcagcgtgcaggccagaagactgagccagcccgagagcgccgagaagcacgtgacccagagactgcagcccgagagaggcagccccaagaagtgcgaggccgaggaggccgagccccccgccgccacccagccccagaccagcgagacccagaccagccacctgcccgagagcgagagaatccaccacaccgtggaggagaaggaggaggtgaccatggacaccagcgagaacagacccgagaacgacgtgcccgagccccccatgcccatcgccgaccaggtgagcaacgacgacagacccgagggcagcgtggaggacgaggagaagaaggagagcagcctgcccaagagcttcaagagaaagatcagcgtggtgagcaccaagggcgtgcccgccggcaacagcgacaccgagggcggccagcccggcagaaagagaagatggggcgccagcaccgccaccacccagaagaagcccagcatcagcatcaccaccgagagcctgaaggaggccgtggtggacctgcacgccgacgacagcagaatcagcgaggacgagaccgagagaaacggcgacgacggcacccacgacaagggcctgaagatctgcagaaccgtgacccaggtggtgcccgccgagggccaggagaacggccagagagaggaggaggaggaggagaaggagcccgaggccgagccccccgtgcccccccaggtgagcgtggaggtggccctgcccccccccgccgagcacgaggtgaagaaggtgaccctgggcgacaccctgaccagaagaagcatcagccagcagaagagcggcgtgagcatcaccatcgacgaccccgtgagaaccgcccaggtgcccagcccccccagaggcaagatcagcaacatcgtgcacatcagcaacctggtgagacccttcaccctgggccagctgaaggagctgctgggcagaaccggcaccctggtggaggaggccttctggatcgacaagatcaagagccactgcttcgtgacctacagcaccgtggaggaggccgtggccaccagaaccgccctgcacggcgtgaagtggccccagagcaaccccaagttcctgtgcgccgactacgccgagcaggacgagctggactaccacagaggcctgctggtggacagacccagcgagaccaagaccgaggagcagggcatccccagacccctgcacccccccccccccccccccgtgcagcccccccagcaccccagagccgagcagagagagcaggagagagccgtgagagagcagtgggccgagagagagagagagatggagagaagagagagaaccagaagcgagagagagtgggacagagacaaggtgagagagggccccagaagcagaagcagaagcagagacagaagaagaaaggagagagccaagagcaaggagaagaagagcgagaagaaggagaaggcccaggaggagccccccgccaagctgctggacgacctgttcagaaagaccaaggccgccccctgcatctactggctgcccctgaccgacagccagatcgtgcagaaggaggccgagagagccgagagagccaaggagagagagaagagaagaaaggagcaggaggaggaggagcagaaggagagagagaaggaggccgagagagagagaaacagacagctggagagagagaagagaagagagcacagcagagagagagacagagagagagagagagagagagagagagacagaggcgacagagacagagacagagagagagacagagagagaggcagagagagagacagaagagacaccaagagacacagcagaagcagaagcagaagcacccccgtgagagacagaggcggcagaagatag

SEQ ID NO: 13612 - DNA, 1089 bp, synthetic construct; identical to SEQ ID NO: 11369
  source 1..1089: mol_type = other DNA; note = Synthetic coding sequence

SEQ ID NO: 13613 - DNA, 420 bp, synthetic construct; identical to SEQ ID NO: 12293
  source 1..420: mol_type = other DNA; note = Synthetic coding sequence

SEQ ID NO: 13614 - DNA, 2256 bp, synthetic construct
  source 1..2256: mol_type = other DNA; note = Synthetic coding sequence
atgagcgaggaggagctgaccaaggccatggagggcctgggcatggacgagggcgacggcgagggcaacatcctgcccatcatgcagagcatcatgcagaacctgctgagcaaggacgtgctgtaccccagcctgaaggagatcaccgagaagtaccccgagtggctgcagagccacagagagagcctgccccccgagcagttcgagaagtaccaggagcagcacagcgtgatgtgcaagatctgcgagcagttcgaggccgagacccccaccgacagcgagaccacccagaaggccagattcgagatggtgctggacctgatgcagcagctgcaggacctgggccacccccccaaggagctggccggcgagatgctgacctggctgttcttctgcggcagccagtgggtgtacggcccctggctgacctacgtgggctggctgcagcagaccagcttcaagatgagcagcaagggcagcagcaccgacggcagaaccgacctggccaacggcagcctgagcagcagccccgaggagatgagcggcgccgaggagggcagagagaccagcagcggcatcgaggtggaggccagcgacctgagcctgagcctgaccggcgacgacggcggccccaacagaaccagcaccgagagcagaggcaccgacaccgagagcagcggcgaggacaaggacagcgacagcatggaggacaccggccactacagcatcaacgacgagaacagagtgcacgacagaagcgaggaggaggaggaggaggaggaggaggaggaggaggagcagcccagaagaagagtgcagagaaagagagccaacagagaccaggacagcagcgacgacgagagagccctggaggactgggtgagcagcgagaccagcgccctgcccagacccagatggcaggccctgcccgccctgagagagagagagctgggcagcagcgccagattcgtgtacgaggcctgcggcgccagagtgttcgtgcagagattcagactgcagcacggcctggagggccacaccggctgcgtgaacaccctgcacttcaaccagagaggcacctggctggccagcggcagcgacgacctgaaggtggtggtgtgggactgggtgagaagacagcccgtgctggacttcgagagcggccacaagagcaacgtgttccaggccaagttcctgcccaacagcggcgacagcaccctggccatgtgcgccagagacggccaggtgagagtggccgagctgagcgccacccagtgctgcaagaacaccaagagagtggcccagcacaagggcgccagccacaagctggccctggagcccgacagcccctgcaccttcctgagcgccggcgaggacgccgtggtgttcaccatcgacctgagacaggacagacccgccagcaagctggtggtgaccaaggagaaggagaagaaggtgggcctgtacaccatctacgtgaaccccgccaacacccaccagttcgccgtgggcggcagagaccagttcgtgagaatctacgaccagagaaagatcgacgagaacgagaacaacggcgtgctgaagaagttctgcccccaccacctggtgaacagcgagagcaaggccaacatcacctgcctggtgtacagccacgacggcaccgagctgctggccagctacaacgacgaggacatctacctgttcaacagcagccacagcgacggcgcccagtacgtgaagagatacaagggccacagaaacaacgccaccgtgaagggcgtgaacttctacggccccaagagcgagttcgtggtgagcggcagcgactgcggccacatcttcctgtgggagaagagcagctgccagatcatccagttcatggagggcgacaagggcggcgtggtgaactgcctggagccccacccccacctgcccgtgctggccaccagcggcctggaccacgacgtgaagatctgggcccccaccgccgaggccagcaccgagctgaccggcctgaaggacgtgatcaagaagaacaagagagagagagacgaggacagcctgcaccagaccgacctgttcgacagccacatgctgtggttcctgatgcaccacctgagacagagaagacaccacagaagatggagagagcccggcgtgggcgccaccgacgccgacagcgacgagagccccagcagcagcgacaccagcgacgaggaggagggccccgacagagtgcagtgcatgcccagctag

SEQ ID NO: 13615 - DNA, 1056 bp, synthetic construct; identical to SEQ ID NO: 9507
  source 1..1056: mol_type = other DNA; note = Synthetic coding sequence

SEQ ID NO: 13616 - DNA, 588 bp, synthetic construct
  source 1..588: mol_type = other DNA; note = Synthetic coding sequence
atgcccctgcccttcggcctgaagctgaagagaaccagaagatacaccgtgagcagcaagagctgcctggtggccagaatccagctgctgaacaacgagttcgtggagttcaccctgagcgtggagagcaccggccaggagagcctggaggccgtggcccagagactggagctgagagaggtgacctacttcagcctgtggtactacaacaagcagaaccagagaagatgggtggacctggagaagcccctgaagaagcagctggacaagtacgccctggagcccaccgtgtacttcggcgtggtgttctacgtgcccagcgtgagccagctgcagcaggagatcaccagataccagtactacctgcagctgaagaaggacatcctggagggcagcatcccctgcaccctggagcaggccatccagctggccggcctggccgtgcaggccgacttcggcgacttcgaccagtacgagagccaggacttcctgcagaagttcgccctgttccccgtgggctggctgcaggacgagaaggtgctggaggaggccacccagaaggtggccctgctgcaccagaagtactag

SEQ ID NO: 13617 - DNA, 354 bp, synthetic construct
  source 1..354: mol_type = other DNA; note = Synthetic coding sequence
atgggcgacaagaagagccccaccagacccaagagacagcccaagcccagcagcgacgagggctactgggactgcagcgtgtgcaccttcagaaacagcgccgaggccttcaagtgcatgatgtgcgacgtgagaaagggcaccagcaccagagacagcaaggagggcggcaagctggtgagctacagcaccgccagcctgggcgtgagaggcaccctgagaaacagagtgggcggcggcagcagcgaggagaagaagcaggccgagtacctggcccccggcagaagaagaaacatcgtgcacagaggcgtgggccccggccagagaagcggccccagcctgaaggaggcctag

SEQ ID NO: 13618 - DNA, 3285 bp, synthetic construct; identical to SEQ ID NO: 9577
  source 1..3285: mol_type = other DNA; note = Synthetic coding sequence

SEQ ID NO: 13619 - DNA, 1353 bp, synthetic construct
  source 1..1353: mol_type = other DNA; note = Synthetic coding sequence
atgagagagatcgtgcacatccaggccggccagtgcggcaaccagatcggcgccaagttctgggaggtgatcagcgacgagcacggcatcgaccccagcggcaactacgtgggcgacagcgacctgcagctggagagaatcagcgtgtactacaacgaggccagcagccacaagtacgtgcccagagccatcctggtggacctggagcccggcaccatggacagcgtgagaagcggcgccttcggccacctgttcagacccgacaacttcatcttcggccagagcggcgccggcaacaactgggccaagggccactacaccgagggcgccgagctggtggacagcgtgctggacgtggtgagaaaggagtgcgagaactgcgactgcctgcagggcttccagctgacccacagcctgggcggcggcaccggcagcggcatgggcaccctgctgatcagcaaggtgagagaggagtaccccgacagaatcatgaacaccttcagcgtggtgcccagccccaaggtgagcgacaccgtggtggagccctacaacgccaccctgagcatccaccagctggtggagaacaccgacgagacctactgcatcgacaacgaggccctgtacgacatctgcttcagaaccctgaagctggccacccccacctacggcgacctgaaccacctggtgagcgccaccatgagcggcgtgaccaccagcctgagattccccggccagctgaacgccgacctgagaaagctggccgtgaacatggtgcccttccccagactgcacttcttcatgcccggcttcgcccccctgaccgccagaggcagccagcagtacagagccctgaccgtgcccgagctgacccagcagatgttcgacgccaagaacatgatggccgcctgcgaccccagacacggcagatacctgaccgtggccaccgtgttcagaggcagaatgagcatgaaggaggtggacgagcagatgctggccatccagagcaagaacagcagctacttcgtggagtggatccccaacaacgtgaaggtggccgtgtgcgacatcccccccagaggcctgaagatgagcagcaccttcatcggcaacagcaccgccatccaggagctgttcaagagaatcagcgagcagttcaccgccatgttcagaagaaaggccttcctgcactggtacaccggcgagggcatggacgagatggagttcaccgaggccgagagcaacatgaacgacctggtgagcgagtaccagcagtaccaggacgccaccgccgaggaggagggcgagatgtacgaggacgacgaggaggagagcgaggcccagggccccaagtag

SEQ ID NO: 13620 - DNA, 240 bp, synthetic construct
  source 1..240: mol_type = other DNA; note = Synthetic coding sequence
atgaacgagagcaagcccggcgacagccagaacctggcctgcgtgttctgcagaaagcacgacgactgccccaacaagtacggcgagaagaagaccaaggagaagtggaacctgaccgtgcactactactgcctgctgatgagcagcggcatctggcagagaggcaaggaggaggagggcgtgtacggcttcctgatcgaggacatcagaaaggaggtgaacagagccagcaagctgtag

SEQ ID NO: 13621 - DNA, 1785 bp, synthetic construct; identical to SEQ ID NO: 12095
  source 1..1785: mol_type = other DNA; note = Synthetic coding sequence

SEQ ID NO: 13622 - DNA, 540 bp, synthetic construct
  source 1..540: mol_type = other DNA; note = Synthetic coding sequence
atggccgagagcagcagcgagagcgaccacttcagatgcagagacagactgagcccctgggccgccagaagcacccacagaggcaccagaagcctgcccaccgtggaggtgaccgagaaggtgaacaccatcaccagcaccctgcaggacaccagcagaaacctgagacaggtggaccagatgctgggcagatacagagagtacagcaacggccaggccggcgccatcgagcacctgaaggagagcctggagcagagcatcgaccagctgagaagccagagactgctgagaaacagcggcggcagaagcatcagcgtgaccagcctgagcgccagcgacctggacggcggcaccggcagcgagctgcaccacttcccccccaccagccccctgaaggactacggcgacccccagggcatcaagagaatgagaagcagaaccggcgtgagattcgtgcaggagaccgacgacatgacccagctgcacggcttccaccagagcctgagagacctgagcagcgagcagatcagactgggctag

SEQ ID NO: 13623 - DNA, 1056 bp, synthetic construct; identical to SEQ ID NO: 9507
  source 1..1056: mol_type = other DNA; note = Synthetic coding sequence

SEQ ID NO: 13624 - DNA, 330 bp, synthetic construct
  source 1..330: mol_type = other DNA; note = Synthetic coding sequence
atggagaccgactgcaaccccatggagctgagcagcatgagcggcttcgaggagggcagcgagctgaacggcttcgagggcaccgacatgaaggacatgagactggaggccgaggccgtggtgaacgacgtgctgttcgccgtgaacaacatgttcgtgagcaagagcctgagatgcgccgacgacgtggcctacatcaacgtggagaccaaggagagaaacagatactgcctggagctgaccgaggccggcctgaaggtggtgggctacgccttcgaccaggtggacgaccacctgcagaccccctaccacgagaccgtgtacagctag

SEQ ID NO: 13625 - DNA, 387 bp, synthetic construct
  source 1..387: mol_type = other DNA; note = Synthetic coding sequence
atggccgagagcagcagcgagagcgaccacttcagatgcagagacagactgagcccctgggccgccagaagcacccacagaggcaccagaagcctgcccaccgtggaggtgaccgagaaggtgaacaccatcaccagcaccctgcaggacaccagcagaaacctgagacaggtggaccagatgctgggcagatacagagagtacagcaacggccaggccggcgccatcgagcacctgaaggagagcctggagcagagcatcgaccagctgagaagccagagactgctgagaaacagcggcggcagaagcatcagcgtgaccagcctgagcgccagcgacctggacggcggcaccggcagcgagctgcaccacttcccccccacctag

SEQ ID NO: 13626 - DNA, 369 bp, synthetic construct; identical to SEQ ID NO: 10169
  source 1..369: mol_type = other DNA; note = Synthetic coding sequence

SEQ ID NO: 13627 - DNA, 420 bp, synthetic construct; identical to SEQ ID NO: 12293
  source 1..420: mol_type = other DNA; note = Synthetic coding sequence

SEQ ID NO: 13628 - DNA, 4602 bp, synthetic construct
  source 1..4602: mol_type = other DNA; note = Synthetic coding sequence
atgcccgtgaagagactgagagaggtggtgagccagaaccacggcgaccacctggtgctgctgaaggacgagctgccctgcgtgccccccgccctgagcgccaacaagagactgcccgtgggcaccggcaccagcctgaacggcaccagcagaggcagcagcgacctgaccagcgccagaaactgctaccagcccctgctggagaaccccatggtgagcgagagcgacttcagcaaggacgtggccgtgcaggtgctgcccctggacaagatcgaggagaacaacaagcagaaggccaacgacatcttcatcagccagtacaccatgggccagaaggacgccctgagaaccgtgctgaagcagaaggcccagagcatgcccgtgttcaaggaggtgaaggtgcacctgctggaggacgccggcatcgagaaggacgccgtgacccaggagaccagaatcagccccagcggcatcgacagcgccaccaccgtggccgccgccaccgccgccgccatcgccaccgccgcccccctgatcaaggtgcagagcgacctggaggccaaggtgaacagcgtgaccgagctgctgagcaagctgcaggagaccgacaagcacctgcagagagtgaccgagcagcagaccagcatccagagaaagcaggagaagctgcactgccacgaccacgagaagcagatgaacgtgttcatggagcagcacatcagacacctggagaagctgcagcagcagcagatcgacatccagacccacttcatcagcgccgccctgaagaccagcagcttccagcccgtgagcatgcccagcagcagagccgtggagaagtacagcgtgaagcccgagcaccccaacctgggcagctgcaaccccagcctgtacaacaccttcgccagcaagcaggcccccctgaaggaggtggaggacaccagcttcgacaagcagaagagccccctggagacccccgcccccagaagattcgcccccgtgcccgtgagcagagacgacgagctgagcaagagagagaacctgctggaggagaaggagaacatggaggtgagctgccacagaggcaacgtgagactgctggagcagatcctgaacaacaacgacagcctgaccagaaagagcgagagcagcaacaccaccagcctgaccagaagcaagatcggctggacccccgagaagaccaacagattccccagctgcgaggagctggagaccaccaaggtgaccatgcagaagagcgacgacgtgctgcacgacctgggccagaaggagaaggagaccaacagcatggtgcagcccaaggagagcctgagcatgctgaagctgcccgacctgccccagaacagcgtgaagctgcagaccaccaacaccaccagaagcgtgctgaaggacgccgagaagatcctgagaggcgtgcagaacaacaagaaggtgctggaggagaacctggaggccatcatcagagccaaggacggcgccgccatgtacagcctgatcaacgccctgagcaccaacagagagatgagcgagaagatcagaatcagaaagaccgtggacgagtggatcaagaccatcagcgccgagatccaggacgagctgagcagaaccgactacgagcagaagagattcgaccagaagaaccagagaaccaagaagggccagaacatgaccaaggacatcagaaccaacacccaggacaagaccgtgaacaagagcgtgatccccagaaagcacagccagaagcagatcgaggagcacttcagaaacctgcccatgagaggcatgcccgccagcagcctgcagaaggagagaaaggagggcctgctgaaggccaccaccgtgatccaggacgaggactacatgctgcaggtgtacggcaagcccgtgtaccagggccacagaagcaccctgaagaagggcccctacctgagattcaacagccccagccccaagagcagaccccagagacccaaggtgatcgagagagtgaagggcaccaaggtgaagagcatcagaacccagaccgacttctacgccaccaagcccaagaagatggacagcaagatgaagcacagcgtgcccgtgctgccccacggcgaccagcagtacctgttcagccccagcagagagatgcccaccttcagcggcaccctggagggccacctgatccccatggccatcctgctgggccagacccagagcaacagcgacaccatgccccccgccggcgtgatcgtgagcaagccccaccccgtgaccgtgaccaccagcatcccccccagcagcagaaaggtggagaccggcgtgaagaagcccaacatcgccatcgtggagatgaagagcgagaagaaggaccccccccagctgaccgtgcaggtgctgcccagcgtggacatcgacagcatcagcaacagcagcgccgacgtgctgagccccctgagcagccccaaggaggccagcctgccccccgtgcagacctggatcaagacccccgagatcatgaaggtggacgaggaggaggtgaagttccccggcaccaacttcgacgagatcatcgacgtgatccaggaggaggagaagtgcgacgagatccccgacagcgagcccatcctggagttcaacagaagcgtgaaggccgacagcaccaagtacaacggcccccccttcccccccgtggccagcaccttccagcccaccgccgacatcctggacaaggtgatcgagagaaaggagaccctggagaacagcctgatccagtgggtggagcaggagatcatgagcagaatcatcagcggcctgttccccgtgcagcagcagatcgcccccagcatcagcgtgagcgtgagcgagaccagcgagcccctgaccagcgacatcgtggagggcaccagcagcggcgccctgcagctgttcgtggacgccggcgtgcccgtgaacagcaacgtgatcaagcacttcgtgaacgaggccctggccgagaccatcgccgtgatgctgggcgacagagaggccaagaagcagggccccgtggccaccggcgtgagcggcgacgccagcaccaacgagacctacctgcccgccagagtgtgcacccccctgcccaccccccagcccacccccccctgcagccccagcagccccgccaaggagtgcgtgctggtgaagacccccgacagcagcccctgcgacagcgaccacgacatggccttccccgtgaaggagatctgcgccgagaagggcgacgacatgcccgccatcatgctggtgaacacccccaccgtgacccccaccaccacccccccccccgccgccgccgtgttcacccccaccctgagcgacatcagcatcgacaagctgaaggtgagcagccccgagctgcccaagccctggggcgacggcgacctgcccctggaggaggagaaccccaacagcccccaggaggagctgcaccccagagccatcgtgatgagcgtggccaaggacgaggagcccgagagcatggacttccccgcccagccccccccccccgagcccgtgcccttcatgcccttccccgccggcaccaaggcccccagccccagccagatgcccggcagcgacagcagcaccctggagagcaccctgagcgtgaccgtgaccgagaccgagaccctggacaagcccatcagcgagggcgagatcctgttcagctgcggccagaagctggcccccaagatcctggaggacatcggcctgtacctgaccaacctgaacgacagcctgagcagcaccctgcacgacgccgtggagatggaggacgacccccccagcgagggccaggtgatcagaatgagccacaagaagttccacgccgacgccatcctgagcttcgccaagcagaaccaggagagcgccgtgagccagcaggccgtgtaccacagcgaggacctggagaacagcgtgggcgagctgagcgagggccagagaccccagctgaccgccgccgccgagaacatcctgatgggccacagcctgtacatgcagccccccgtgaccaacacccagagcctggaccagcagtgcgaccccaagcccctgagcagacagttcgacaccgtgagcggcagcatctacgaggacagctgcgccagccacggccccatgagcctgggcgagctggagctggagcccaacagcaagctggtgctgcccaccaccctgctgaccgcccaggagaacgacgtgaacctgcccgtggccgccgaggacttcagccagtaccagctgaagcagaaccaggacgtgaagcaggtggagcacaagcccagccagagctacctgagagtgagaaacaagagcgacatcgcccccagccagcagcaggtgagccccggcgacatggacagaacccagatcgagctgaacccctacctgacctgcgtgttcagcggcggcaaggccgtgcccctgagcgccagccagatgccccccgccaagatgagcgtgatgctgcccagcgtgaacctggaggactgcagccagagcctgagcctgagcaccatgcaggaggacatggagagcagcggcgccgacaccttctag

SEQ ID NO: 13629 - DNA, 2334 bp, synthetic construct
  source 1..2334: mol_type = other DNA; note = Synthetic coding sequence
atgagcgcccagaccagccccgccgagaagggcctgaaccccggcctgatgtgccaggagagctacgcctgcagcggcaccgacgaggccatcttcgagtgcgacgagtgctgcagcctgcagtgcctgagatgcgaggaggagctgcacagacaggagagactgagaaaccacgagagaatcagactgaagcccggccacgtgccctactgcgacctgtgcaagggcctgagcggccacctgcccggcgtgagacagagagccatcgtgagatgccagacctgcaagatcaacctgtgcctggagtgccagaagagaacccacagcggcggcaacaagagaagacaccccgtgaccgtgtacaacgtgagcaacctgcaggagagcctggaggccgaggagatggacgaggagaccaagagaaagaagatgaccgagaaggtggtgagcttcctgctggtggacgagaacgaggagatccaggtgaccaacgaggaggacttcatcagaaagctggactgcaagcccgaccagcacctgaaggtggtgagcatcttcggcaacaccggcgacggcaagagccacaccctgaaccacaccttcttctacggcagagaggtgttcaagaccagccccacccaggagagctgcaccgtgggcgtgtgggccgcctacgaccccgtgcacaaggtggccgtgatcgacaccgagggcctgctgggcgccaccgtgaacctgagccagagaaccagactgctgctgaaggtgctggccatcagcgacctggtgatctacagaacccacgccgacagactgcacaacgacctgttcaagttcctgggcgacgccagcgaggcctacctgaagcacttcaccaaggagctgaaggccaccaccgccagatgcggcctggacgtgcccctgagcaccctgggccccgccgtgatcatcttccacgagaccgtgcacacccagctgctgggcagcgaccaccccagcgaggtgcccgagaagctgatccaggacagattcagaaagctgggcagattccccgaggccttcagcagcatccactacaagggcaccagaacctacaacccccccaccgacttcagcggcctgagaagagccctggagcagctgctggagaacaacaccaccagaagccccagacaccccggcgtgatcttcaaggccctgaaggccctgagcgacagattcagcggcgagatccccgacgaccagatggcccacagcagcttcttccccgacgagtacttcacctgcagcagcctgtgcctgagctgcggcgtgggctgcaagaagagcatgaaccacggcaaggagggcgtgccccacgaggccaagagcagatgcagatacagccaccagtacgacaacagagtgtacacctgcaaggcctgctacgagagaggcgaggaggtgagcgtggtgcccaagaccagcgccagcaccgacagcccctggatgggcctggccaagtacgcctggagcggctacgtgatcgagtgccccaactgcggcgtggtgtacagaagcagacagtactggttcggcaaccaggaccccgtggacaccgtggtgagaaccgagatcgtgcacgtgtggcccggcaccgacggcttcctgaaggacaacaacaacgccgcccagagactgctggacggcatgaacttcatggcccagagcgtgagcgagctgagcctgggccccaccaaggccgtgaccagctggctgaccgaccagatcgcccccgcctactggagacccaacagccagatcctgagctgcaacaagtgcgccaccagcttcaaggacaacgacaccaagcaccactgcagagcctgcggcgagggcttctgcgacagctgcagcagcaagaccagacccgtgcccgagagaggctggggccccgcccccgtgagagtgtgcgacaactgctacgaggccagaaacgtgcagctggccgtgaccgaggcccaggtggacgacgagggcggcaccctgatcgccagaaaggtgggcgaggccgtgcagaacaccctgggcgccgtggtgaccgccatcgacatccccctgggcctggtgaaggacgccgccagacccgcctactgggtgcccgaccacgagatcctgcactgccacaactgcagaaaggagttcagcatcaagctgagcaagcaccactgcagagcctgcggccagggcttctgcgacgagtgcagccacgacagaagagccgtgcccagcagaggctgggaccaccccgtgagagtgtgcttcaactgcaacaagaagcccggcgacctgtag

SEQ ID NO: 13630 - DNA, 867 bp, synthetic construct
  source 1..867: mol_type = other DNA; note = Synthetic coding sequence
atggagaagctgagcgccctgcaggagcagaagggcgagctgagaaagagactgagctacaccacccacaagctggagaagctggagaccgagttcgacagcaccagacactacctggagatcgagctgagaagagcccaggaggagctggagaaggtgaccgagaagctgagaagaatccagagcaactacatggccctgcagagaatcaaccaggagctggaggacaagctgtacagaatgggccagcactacgaggaggagaagagagccctgagccacgagatcgtggccctgaacagccacctgctggaggccaaggtgaccatcgacaagctgagcgaggacaacgagctgtacagaaaggactgcaacctggccgcccagctgctgcagtgcagccagacctacggcagagtgcacaaggtgagcgagctgcccagcgacttccaggagagagtgagcctgcacatggagaagcacggctgcagcctgcccagccccctgtgccaccccgcctacgccgacagcgtgcccacctgcgtgatcgccaaggtgctggagaagcccgaccccgccagcctgagcagcagactgagcgacgccagcgccagagacctggccttctgcgacggcgtggagaagcccggccccagacccccctacaagggcgacatctactgcagcgacaccgccctgtactgccccgaggagagaagaagagacagaagacccagcgtggacgcccccgtgaccgacgtgggcttcctgagagcccagaacagcaccgacagcgccgccgaggaggaggaggaggccgaggccgccgccttccccgccggcttccagcacgaggccttcccctag

SEQ ID NO: 13631 - DNA, 1263 bp, synthetic construct
  source 1..1263: mol_type = other DNA; note = Synthetic coding sequence
tgaacccaggccatggccctggagacccccacccccggcccccccagagagggccagagccccgccagccaggccggcacccagcacccccccgcccaggccaccgcccacagccagagcagccccgagttcaagggcagcctggccagcctgagcgacagcctgggcgtgagcgtgatggccaccgaccaggacagctacagcaccagcagcaccgaggaggagctggagcagttcagcagccccagcgtgaagaagaagcccagcatgatcctgggcaaggccagacacagactgagcttcgccagcttcagcagcatgttccacgccttcctgagcaacaacagaaagctgtacaagaaggtggtggagctggcccaggacaagggcagctacttcggcagcctggtgcaggactacaaggtgtacagcctggagatgatggccagacagaccagcagcaccgagatgctgcaggagatcagaaccatgatgacccagctgaagagctacctgctgcagagcaccgagctgaaggccctggtggaccccgccctgcacagcgaggaggagctggaggccatcgtggagagcgccctgtacaagtgcgtgctgaagcccctgaaggaggccatcaacagctgcctgcaccagatccacagcaaggacggcagcctgcagcagctgaaggagaaccagctggtgatcctggccaccaccaccaccgacctgggcgtgaccaccagcgtgcccgaggtgcccatgatggagaagatcctgcagaagttcaccagcatgcacaaggcctacagccccgagaagaagatcagcatcctgctgaagacctgcaagctgatctacgacagcatggccctgggcaaccccggcaagccctacggcgccgacgacttcctgcccgtgctgatgtacgtgctggccagaagcaacctgaccgagatgctgctgaacgtggagtacatgatggagctgatggaccccgccctgcagctgggcgagggcagctactacctgaccaccacctacggcgccctggagcacatcaagagctacgacaagatcaccgtgaccagacagctgagcgtggaggtgcaggacagcatccacagatgggagagaagaagaaccctgaacaaggccagagccagcagaagcagcgtgcaggtgagacccgagagcggcagaggccccgtgggcccctgccccagacaccacccctgctgcctgctggccaaggagccctag

SEQ ID NO: 13632 - DNA, 2466 bp, synthetic construct
  source 1..2466: mol_type = other DNA; note = Synthetic coding sequence
atggccggcagcgacgccgagtgggtgaccatcgccaacaacctgctgttcaagtgccacatccacctgagaatccacgagctgcaggactgcgacgccaacgtgttcatcgccctgtaccagagcatcctgggcgagaaggtgcccgacctgatcgtgatccccagaagccaggaggacgacgcccacaacgtgcaggccgtgatcgacagcctggccctggactacctgcaggtgagcctgagccacatcaccggcgagaacatcgtgaagggcgacaaggagagcatcaagaacctgctggagatcttcgacggcctgctggagtacctgaccgagagaatcagcgagaccagccacgagaagagcgagaccgagcagtacttcaaggagagcgacagaggcgagagactggaggagcccgagagcaccaaggagagcaagagcagctggaagagagtgagcttcggcagatgcagcctgagcagcgagatgctgggccccagctgggacggcgacgaggccgagagcaccggcgagatcatcagactgggcgacaccgcccacaccttcagcctgagaagcaacggcgcccagtgccccaacgagatgctgagcaagaaggccctggccagccccagcagcaagagccacgaggacatgctgtacccccccagcgtgctgagcaagagcagaaccagcttcgtggaggacaccgagaccctgagcgtgagcggcatccccaacgccagaaagctgggcgagcccatcagagccgccatccccctgcaccccccctaccaccccagcgagcccagagccccctgccccatcggcaaggagtacctgcacagcagccactgcagccccgccgtgaacagcaccggcgagcacaccgagttcagcggcgacctggacgacggcctgttcctgatcagcaagctgcccaagggcagcaagtgggaggtgtaccccgcccaggtgcagggccccagaaccagaaagccccccaagggcaagagaaacgagaacagagccaccgccagcagctgcaacagccccttcccccagagacccagaaagagactgaccgagcaggagctgcacgacgtgagcgagaagctgagccagagactgagcgagctggactggatgctgaagagcgccctgggcgacagaatcaaggagaagaccgaccacaaggaggagaacaccggcaacgaggaggtggaggacggcaccgaggagaccctgagccagcacagcgacggcatcgtggagtacggccccaagaagagcagacccggcctgagcatgagaagaaagcccccctacagaagccacagcctgagccccagccccgtgaacaagcacaagcagttccacctggagagaaagagacagagaaagcccagagagaccgacgtgagacagttccaggcccaggccttcaccgaggccttcgagagagagctgagaagacacaaggtgcaggagaacatcggccccctgagaatccacgagaaggaggaggagaccgagaagatctacagaggcgaggccgtgagaaagggcacccccgagtgcagccagccctggaagatctacagcagaaagaccaccacccagagcctgagaggcggcctgcccaagcccaacaaggccgtgcccatgaaggtgagcgagcacagcctgctgcccctgatgctggagcagttccccttcctgtacgtgagcggccccaccctgagcaagatgtggaagcagcagatcgcccaggtggagcagctgaagaaggaggcctgcagagagaacagaagcaagaagaagctgcaggacgagatcgaggaggccctgagaagacacgacctgctgaccaccctggtgaagaaggagtacgagcacaacaagagactgcaggacttcaaggactgcatcagaagacagagactgacccagagcaagatcaaggagaacagacagcagatcgtgagagccagaaagtactacgacgactacagagtgcagctgtgcgccaagatgatgagaatgagaaccagagaggagatgatcttcaagaagctgttcgaggagggcctgaacatccagaagcagagactgagagacctgagaaactacgccaaggagaagagagacgagcagagaagaagacaccaggacgagctggacagcatggagaactactacaaggaccagttcagcctgctggccgaggccatcagccaggagcaccaggagctgaaggccagagagaagagccaggcccagaccctgcacaaggtgaagagagagctgagaagcaagatggagaaggagatccagcagctgcaggacatgatcacccagaacgacgacgacgtgttcttcagagagctggaggccgagagattcagaagcagactgcagctggccagcttccagtacagcaagagccccagcctgtag

SEQ ID NO: 13633 - DNA, 4560 bp, synthetic construct
  source 1..4560: mol_type = other DNA; note = Synthetic coding sequence
atgagaatccccgaccagaagtacgtgaccctgaagctgaacgacgtgatcagattcggctacgacagcaacatgtacgtgctggagagagtgcagcacagagtgcccgaggaggccctgaagcacgagaagtacaccagccagctgcaggtgagcgtgaagggcctggcccccaagagaagcgaggccctgcccgagcacaccccctactgcgaggccagcaaccccagacccgagaagggcgacagaagacccggcaccgaggccgccagctacagaacccccctgtacggccagcccagctggtggggcgaggacgacggcagcaccctgcccgacgcccagagacagggcgagccctaccccgagagacccaagggccccgtgcagcaggacggcgagctgcacggcttcagagcccccgccgagccccagggctgcagcttcagaagagagcccagctacttcgagatccccaccaaggagaccccccagcccagccagccccccgaggtgcccgcccacgagatgcccaccaaggacgccgaggccggcggcggcggcgccgcccccgtggtgcagagccacgccagcttcaccatcgagttcgacgactgcagccccggcaagatgaagatcaaggaccacatcaccaagttcagcctgagacagagaagaccccccggcaaggaggccacccccggcgagatggtgagcgccgagaccaaggtggccgactggctggtgcagaacgaccccagcctgctgcacagagtgggccccggcgacgacagacacagcaccaagagcgacctgcccgtgcacaccagaaccctgaagggccacaagcacgaggacggcacccagagcgacagcgaggaccccctggccaaggccgccagcgccgccggcgtgcccctggaggccagcggcgagcaggtgagactgcagagacagatcaagagagacccccaggagctgctgcacaaccagcaggccttcgtgatcgagttcttcgacgaggacacccccagaaagaagagaagccagagcttcacccacagccccagcggcgaccccaaggccgacaagagaagaggccccacccccgccgacagagacagacccagcgtgcccgcccccgtgcaggccggcggcagaagcagcggcccccagagagccggcagcctgaagagagagaagaccgaggagagactgggcagccccagccccgccagcagaacccccgccagacccttcggcagcgtgggcagaagaagcagactggcccaggacttcatggcccagtgcctgagagagagcagccccgccgccagacccagccccgagaaggtgccccccgtgctgcccgcccccctgaccccccacggcaccagccccgtgggcccccccacccccccccccgcccccaccgacccccagctgaccaaggccagaaagcaggaggaggacgacagcctgagcgacgccggcacctacaccatcgagaccgaggcccaggacaccgaggtggaggaggccagaaagatgatcgaccaggtgttcggcgtgctggagagccccgagctgagcagagccagcagcgccaccttcagacccgtgatcagaggcgacagagacgagagcgacgacggcggcgtggcccagagaatggccctgctgcaggagttcgccagcagacccctgggcgccgccccccaggccgagcaccagggcctgcccgtgcccggcagccccggcggccagaagtgggtgagcagatgggccagcctggccgacagctacagcgaccccggcctgaccgaggacggcctgggcagaagaggcggcgagcccgagggcagcctgcccgtgagaatgagaagaagactgccccagctgcccagcgagagagccgacagccccgccggccccgagagcagcagaagaagcggccccggcccccccgagctggacagcgagcagcccagcagactgttcggccaggaggagctggaccccgacagcctgagcgacgccagcggcagcgacggcggcagaggccccgagcccggcgtggagccccaggacagcagaagaagaagcccccaggagggccccacctggagcagaggcagaagaagccccagagcccccggcgagcccacccccgccagcttcttcatcggcgaccagaacggcgacgccgtgctgagcagaaagcccctggccgcccccggcgacggcgagggcctgggccagaccgcccagcccagcccccccgccagagacggcgtgtacgtgagcgccaacggcagaatggtgatccagctgagacccggcagaagccccgagcccgacggccccgcccccgccttcctgagacaggagagcttcaccaaggagcccgccagcggcccccccgcccccggcaagcccccccacatcagcagccaccccctgctgcaggacctggccgccaccagagccgccagaatggacttccacagccaggacacccacctgatcctgaaggagaccgagaccgccctggccgccctggaggccagactgctgagcaacagcgtggacgccgagtgcgagggcggcagcacccccagaccccccgaggacgccctgagcggcgacagcgacgtggacaccgccagcaccgtgagcctgagaagcggcaagagcggccccagccccaccaccccccagcccctgagagcccagaaggagatgagccccagcccccccgccgcccaggaccccggcggcaccgccctggtgagcgccagagagcagagcagcgagagacagcaccaccccctgggccccaccgacatgggcagaggcgagcccgtgagaagaagcgccatcagaagaggccacagacccagaggcagcctggactggcccagcgaggagagaggccccgtgctggcccacctgcccagcagcgacgtgatggccagcaaccacgagacccccgaggccaccggcgccggcagactgggcagcagaagaaagcccgccgcccccccccccagccccgccgccagagaggagcagagcagaagcagcgccagcagccagaagggcccccaggccctgaccagaagcaacagcctgagcacccccagacccaccagagccagcagactgagaagagccagactgggcgacgccagcgacaccgaggccgccgacggcgagagaggcagcctgggcaaccccgagcccgtgggcagacccgccgccgagcaggccaagaagctgagcagactggacatcctggccatgcccagaaagagagccggcagcttcaccggcaccagcgaccccgaggccgcccccgccagaaccagcttcagcggcagaagcgtggagctgtgctgcgccagcagaaagcccaccatggccgaggccagagccgtgagcagaaaggccgccaacaccgccaccaccaccggccccagacagcccttcagcagagccagaagcggcagcgccagatacaccagcaacaccagaagaagacagcagggcagcgactacaccagcaccagcgaggaggagtacggcagcagacacggcagccccaagcacaccagaagccacaccagcaccgccacccagacccccagagccggcagcagcagcagagccagaagcagagcccccggccccagagacaccgacgacgacgaggaggagcccgacccctacggcttcatcgtgcagaccgccgagatcgccgagatcgccagactgagccagaccctggtgaaggacgtggccatcctggcccaggagatccacgacgtggccggcgacggcgacaccctgggcagcagcgagcccgcccacagcgccagcctgagcaacatgcccagcacccccgccagcaccatcagcgccagagaggagctggtgcagagaatccccgaggccagcctgaacttccagaaggtgccccccggcagcctgaacagcagagacttcgaccagaacatgaacgacagctgcgaggacgccctggccaacaagaccagacccagaaacagagaggaggtgatcttcgacaacctgatgctgaaccccgtgagccagctgagccaggccatcagagagaacaccgagcacctggccgagaagatgaagatcctgttccagaacaccggcagagcctgggaggacctggaggccagaatcaacgccgagaacgaggtgcccatcctgaagaccagcaacaaggagatcagcagcatcctgaaggagctgagaagagtgcagaagcagctggaggtgatcaacgccatcgtggaccccagcggcagcctggacctgctgaccggcaacagaagcctggccagcagcgcccagcccggcctgggcaagggcagagtggccgcccagagcccccccagccccgccagcgccgaggccctgctgcccgccctgcccctgagaaacttcccccagagagccagctgcggcccccccagcctgcccgaccccaccttcctgcccgacgccgagagattcctgatctag

SEQ ID NO: 13634 - DNA, 378 bp, synthetic construct; identical to SEQ ID NO: 9790
  source 1..378: mol_type = other DNA; note = Synthetic coding sequence

SEQ ID NO: 13635 - DNA, 3525 bp, synthetic construct; identical to SEQ ID NO: 10034
  source 1..3525: mol_type = other DNA; note = Synthetic coding sequence

SEQ ID NO: 13636 - DNA, 1245 bp, synthetic construct; identical to SEQ ID NO: 9509
  source 1..1245: mol_type = other DNA; note = Synthetic coding sequence

SEQ ID NO: 13637 - DNA, 2256 bp, synthetic construct; identical to SEQ ID NO: 13614
  source 1..2256: mol_type = other DNA; note = Synthetic coding sequence

SEQ ID NO: 13638 - DNA, 1056 bp, synthetic construct; identical to SEQ ID NO: 9702
  source 1..1056: mol_type = other DNA; note = Synthetic coding sequence

SEQ ID NO: 13639 - DNA, 2394 bp, synthetic construct
  source 1..2394: mol_type = other DNA; note = Synthetic coding sequence
atggccgtgcagggcagccagagaagactgctgggcagcctgaacagcacccccaccgccatcccccagctgggcctggccgccaaccagaccggcgccagatgcctggaggtgagcatcagcgacggcctgttcctgagcctgggcctggtgagcctggtggagaacgccctggtggtggccaccatcgccaagaacagaaacctgcacagccccatgtactgcttcatctgctgcctggccctgagcgacctgctggtgagcggcagcaacgtgctggagaccgccgtgatcctgctgctggaggccggcgccctggtggccagagccgccgtgctgcagcagctggacaacgtgatcgacgtgatcacctgcagcagcatgctgagcagcctgtgcttcctgggcgccatcgccgtggacagatacatcagcatcttctacgccctgagataccacagcatcgtgaccctgcccagagccagaagagccgtggccgccatctgggtggccagcgtggtgttcagcaccctgttcatcgcctactacgaccacgtggccgtgctgctgtgcctggtggtgttcttcctggccatgctggtgctgatggccgtgctgtacgtgcacatgctggccagagcctgccagcacgcccagggcatcgccagactgcacaagagacagagacccgtgcaccagggcttcggcctgaagggcgccgtgaccctgaccatcctgctgggcatcttcttcctgtgctggggccccttcttcctgcacctgaccctgatcgtgctgtgccccgagcaccccacctgcggctgcatcttcaagaacttcaacctgttcctggccctgatcatctgcaacgccatcatcgaccccctgatctacgccttccacagccaggagctgagaagaaccctgaaggaggtgctgacctgcagctgcagccaggacagagccctggtgagctgggacgtgaagagcctgggcggcagcgtgtgccaggagctgctgccccagcagccccaggagaagggcctgtgcgaccagaaggccagcagcaccgccctgcagagactgctgcagaaggagttctgggaggtgatcagcgacgagcacggcatcgaccccagcggcaactacgtgggcgacagcgacctgcagctggagagaatcagcgtgtactacaacgaggccagcagccacaagtacgtgcccagagccatcctggtggacctggagcccggcaccatggacagcgtgagaagcggcgccttcggccacctgttcagacccgacaacttcatcttcggccagagcggcgccggcaacaactgggccaagggccactacaccgagggcgccgagctggtggacagcgtgctggacgtggtgagaaaggagtgcgagaactgcgactgcctgcagggcttccagctgacccacagcctgggcggcggcaccggcagcggcatgggcaccctgctgatcagcaaggtgagagaggagtaccccgacagaatcatgaacaccttcagcgtggtgcccagccccaaggtgagcgacaccgtggtggagccctacaacgccaccctgagcatccaccagctggtggagaacaccgacgagacctactgcatcgacaacgaggccctgtacgacatctgcttcagaaccctgaagctggccacccccacctacggcgacctgaaccacctggtgagcgccaccatgagcggcgtgaccaccagcctgagattccccggccagctgaacgccgacctgagaaagctggccgtgaacatggtgcccttccccagactgcacttcttcatgcccggcttcgcccccctgaccgccagaggcagccagcagtacagagccctgaccgtgcccgagctgacccagcagatgttcgacgccaagaacatgatggccgcctgcgaccccagacacggcagatacctgaccgtggccaccgtgttcagaggcagaatgagcatgaaggaggtggacgagcagatgctggccatccagagcaagaacagcagctacttcgtggagtggatccccaacaacgtgaaggtggccgtgtgcgacatcccccccagaggcctgaagatgagcagcaccttcatcggcaacagcaccgccatccaggagctgttcaagagaatcagcgagcagttcaccgccatgttcagaagaaaggccttcctgcactggtacaccggcgagggcatggacgagatggagttcaccgaggccgagagcaacatgaacgacctggtgagcgagtaccagcagtaccaggacgccaccgccgaggaggagggcgagatgtacgaggacgacgaggaggagagcgaggcccagggccccaagtag

SEQ ID NO: 13640 - DNA, 99 bp, synthetic construct
  source 1..99: mol_type = other DNA; note = Synthetic coding sequence
atggccgagagcagcagcgagagcgaccacttcagatgcagagacagactgagcccctgggccgccagaagcacccacagaggcaccagaagcctgtag

SEQ ID NO: 13641 - DNA, 453 bp, synthetic construct
  source 1..453: mol_type = other DNA; note = Synthetic coding sequence
atgaccgacaccagaagaagagtgaaggtgtacaccctgaacgaggacagacagtgggacgacagaggcaccggccacgtgagcagcggctacgtggagagactgaagggcatgagcctgctggtgagagccgagagcgacggcagcctgctgctggagagcaagatcaaccccaacaccgcctaccagaagcagcaggacaccctgatcgtgtggagcgaggccgagaactacgacctggccctgagcttccaggagaaggccggctgcgacgagatctgggagaagatctgccaggtgcagggcaaggaccccagcgtggacatcacccaggacctggtggacgagagcgaggaggagagattcgacgacatgagcagccccggcctggagctgcccagctgcgagctgagcagactggaggagatcgccgagctggtggccagcagctag

SEQ ID NO: 13642 - DNA, 504 bp, synthetic construct
  source 1..504: mol_type = other DNA; note = Synthetic coding sequence
atggactggaaggaggtgctgagaagaagactggccacccccaacacctgccccaacaagaagaagagcgagcaggagctgaaggacgaggagatggacctgttcaccaagtactacagcgagtggaagggcggcagaaagaacaccaacgagttctacaagaccatccccagattctactacagactgcccgccgaggacgaggtgctgctgcagaagctgagagaggagagcagagccgtgttcctgcagagaaagagcagagagctgctggacaacgaggagctgcagaacctgtggttcctgctggacaagcaccagaccccccccatgatcggcgaggaggccatgatcaactacgagaacttcctgaaggtgggcgagaaggccggcgccaagtgcaagcagttcttcaccgccaaggtgttcgccaagctgctgcacaccgacagctacggcagaatcagcatcatgcagttcttcaactacgtgatgagaaagtag

SEQ ID NO: 13643 - DNA, 507 bp, synthetic construct; identical to SEQ ID NO: 13598
  source 1..507: mol_type = other DNA; note = Synthetic coding sequence

SEQ ID NO: 13644 - DNA, 822 bp, synthetic construct
  source 1..822: mol_type = other DNA; note = Synthetic coding sequence
atgcccggcctgagctgcagattctaccagcacaagttccccgaggtggaggacgtggtgatggtgaacgtgagaagcatcgccgagatgggcgcctacgtgagcctgctggagtacaacaacatcgagggcatgatcctgctgagcgagctgagcagaagaagaatcagaagcatcaacaagctgatcagaatcggcagaaacgagtgcgtggtggtgatcagagtggacaaggagaagggctacatcgacctgagcaagagaagagtgagccccgaggaggccatcaagtgcgaggacaagttcaccaagagcaagaccgtgtacagcatcctgagacacgtggccgaggtgctggagtacaccaaggacgagcagctggagagcctgttccagagaaccgcctgggtgttcgacgacaagtacaagagacccggctacggcgcctacgacgccttcaagcacgccgtgagcgaccccagcatcctggacagcctggacctgaacgaggacgagagagaggtgctgatcaacaacatcaacagaagactgaccccccaggccgtgaagatcagagccgacatcgaggtggcctgctacggctacgagggcatcgacgccgtgaaggaggccctgagagccggcctgaactgcagcaccgagaacatgcccatcaagatcaacctgatcgccccccccagatacgtgatgaccaccaccaccctggagagaaccgagggcctgagcgtgctgagccaggccatggccgtgatcaaggagaagatcgaggagaagagaggcgtgttcaacgtgcagatgtag

SEQ ID NO: 13645 - DNA, 2757 bp, synthetic construct
  source 1..2757: mol_type = other DNA; note = Synthetic coding sequence
tgaagaaccaacagcagattcgtgaaggtggtgctgatgagcgccaccatcagctgcaaggagttcgccgactacttcgccgtgcccgtgcagaacaagatgaaccccgcctacatcttcgaggtggagggcaagccccacagcgtggaggagtactacctgaacgacctggagcacatccaccacagcaagctgagcccccacctgctggaggagcccgtgatcaccaaggacatctacgaggtggccgtgagcctgatccagatgttcgacgacctggacatgaaggagagcggcaacaaggcctggagcggcgcccagttcgtgctggagagaagcagcgtgctggtgttcctgcccggcctgggcgagatcaactacatgcacgagctgctgaccagcctggtgcacaagagactgcaggtgtaccccctgcacagcagcgtggccctggaggagcagaacaacgtgttcctgagccccgtgcccggctacagaaagatcatcctgagcaccaacatcgccgagagcagcgtgaccgtgcccgacgtgaagtacgtgatcgacttctgcctgaccagaaccctggtgtgcgacgaggacaccaactaccagagcctgagactgagctgggccagcaagaccagctgcaaccagagaaagggcagagccggcagagtgagcagaggctactgctacagactggtgcacaaggacttctgggacaacagcatccccgaccacgtggtgcccgagatgctgagatgccccctgggcagcaccatcctgaaggtgaagctgctggacatgggcgagcccagagccctgctggccaccgccctgagcccccccggcctgagcgacatcgagagaaccatcctgctgctgaaggaggtgggcgccctggccgtgagcggccagagagaggacgagaacccccacgacggcgagctgaccttcctgggcagagtgctggcccagctgcccgtgaaccagcagctgggcaagctgatcgtgctgggccacgtgttcggctgcctggacgagtgcctgatcatcgccgccgccctgagcctgaagaacttcttcgccatgcccttcagacagcacctggacggctacagaaacaaggtgaacttcagcggcagcagcaagagcgactgcatcgccctggtggaggccttcaagacctggaaggcctgcagacagaccggcgagctgagataccccaaggacgagctgaactggggcagactgaactacatccagatcaagagaatcagagaggtggccgagctgtacgaggagctgaagaccagaatcagccagttcaacatgcacgtggacagcagaagacccgtgatggaccaggagtacatctacaagcagagattcatcctgcaggtggtgctggccggcgccttctaccccaactacttcaccttcggccagcccgacgaggagatggccgtgagagagctggccggcaaggaccccaagaccaccgtggtgctgaagcacatccccccctacggcttcctgtactacaagcagctgcagagcctgttcagacagtgcggccaggtgaagagcatcgtgttcgacggcgccaaggccttcgtggagttcagcagaaaccccaccgagagattcaagaccctgcccgccgtgtacatggccatcaagatgagccagctgaaggtgagcctggagctgagcgtgcacagcgccgaggagatcgagggcaaggtgcagggcatgaacgtgagcaagctgagaaacaccagagtgaacgtggacttccagaagcagaccgtggaccccatgcaggtgagcttcaacaccagcgacagaagccagaccgtgaccgacctgctgctgaccatcgacgtgaccgaggtggtggaggtgggccacttctggggctacagaatcgacgagaacaacagcgagatcctgaagaagctgaccgccgagatcaaccagctgaccctggtgcccctgcccacccacccccaccccgacctggtgtgcctggcccccttcgccgacttcgacaagcagagatacttcagagcccaggtgctgtacgtgagcggcaacagcgccgaggtgttcttcgtggactacggcaacaagagccacgtggacctgcacctgctgatggagatcccctgccagttcctggagctgcccttccaggccctggagttcaagatctgcaagatgagacccagcgccaagagcctggtgtgcggcaagcactggagcgacggcgccagccagtggttcgccagcctggtgagcggctgcaccctgctggtgaaggtgttcagcgtggtgcacagcgtgctgcacgtggacgtgtaccagtacagcggcgtgcaggacgccatcaacatcagagacgtgctgatccagcagggctacgccgagctgaccgaggagagctacgagagcaaggtgaacatcctgagagccgccatcaacaagctggtgtgcgacggccccaacggctgcaagtgcctgggccccgagagagtggcccagctgcaggacatcgccagacagaagctgctgggcctgttctgccagagcaagcccagagagaagatcgtgcccaagtggcacgagaagccctacgagtggaaccaggtggaccccaagctggtgatggagcaggccgacagagagagcagcagaggcaagaacaccttcctgtaccagctgcacaagctggtggtgctgggcacctag

SEQ ID NO: 13646 - DNA, 507 bp, synthetic construct
  source 1..507: mol_type = other DNA; note = Synthetic coding sequence
atggagaagctgagcgccctgcaggagcagaagggcgagctgagaaagagactgagctacaccacccacaagctggagaagctggagaccgagttcgacagcaccagacactacctggagatcgagctgagaagagcccaggaggagctggagaaggtgaccgagaagctgagaagaatccagagcaactacatggccctgcagagaatcaaccaggagctggaggacaagctgtacagaatgggccagcactacgaggaggagaagagagccctgagccacgagatcgtggccctgaacagccacctgctggaggccaaggtgaccatcgacaagctgagcgaggacaacgagctgtacagaaaggactgcaacctggccgcccagctgctgcagtgcagccagacctacggcagagtgcacaaggtgagcgagctgcccagcgacttccaggagagagtgagcctgcacatggagaagcacggctgcagcctgcccagcccctag

SEQ ID NO: 13647 - DNA, 636 bp, synthetic construct
  source 1..636: mol_type = other DNA; note = Synthetic coding sequence
atggacatgggcaaccagcaccccagcatcagcagactgcaggagatccagaaggaggtgaagagcgtggagcagcaggtgatcggcttcagcggcctgagcgacgacaagaactacaagaagctggagagaatcctgaccaagcagctgttcgagatcgacagcgtggacaccgagggcaagggcgacatccagcaggccagaaagagagccgcccaggagaccgagagactgctgaaggagctggagcagaacgccaaccacccccacagaatcgagatccagaacatcttcgaggaggcccagagcctggtgagagagaagatcgtgcccttctacaacggcggcaactgcgtgaccgacgagttcgaggagggcatccaggacatcatcctgagactgacccacgtgaagaccggcggcaagatcagcctgagaaaggccagataccacaccctgaccaagatctgcgccgtgcaggagatcatcgaggactgcatgaagaagcagcccagcctgcccctgagcgaggacgcccaccccagcgtggccaagatcaacttcgtgatgtgcgaggtgaacaaggccagaggcgtgctgatcgccctgctgatgggcgtgaacaacaacgagtag

SEQ ID NO: 13648 - DNA, 2985 bp, synthetic construct
  source 1..2985: mol_type = other DNA; note = Synthetic coding sequence
atgagccagtggacccccgagtacaacgagctgtacaccctgaaggtggacatgaagagcgagatccccagcgacgcccccaagacccaggagagcctgaagggcatcctgctgcaccccgagcccatcggcgccgccaagagcttccccgccggcgtggagatgatcaacagcaaggtgggcaacgagttcagccacctgtgcgacgacagccagaagcaggagaaggagatgaacggcaaccagcaggagcaggagaagagcctggtggtgagaaagaagagaaagagccagcaggccggccccagctacgtgcagaactgcgtgaaggagaaccagggcatcctgggcctgagacagcacctgggcacccccagcgacgaggacaacgacagcagcttcagcgactgcctgagcagccccagcagcagcctgcacttcggcgacagcgacaccgtgaccagcgacgaggacaaggaggtgagcgtgagacacagccagaccatcctgaacgccaagagcagaagccacagcgccagaagccacaagtggcccagaaccgagaccgagagcgtgagcggcctgctgatgaagagaccctgcctgcacggcagcagcctgagaagactgccctgcagaaagagattcgtgaagaacaacagcagccagagaacccagaagcagaaggagagaatcctgatgcagagaaagaagagagaggtgctggccagaagaaagtacgccctgctgcccagcagcagcagcagcagcgagaacgacctgagcagcgagagcagcagcagcagcagcaccgagggcgaggaggacctgttcgtgagcgccagcgagaaccaccagaacaaccccgccgtgcccagcggcagcatcgacgaggacgtggtggtgatcgaggccagcagcaccccccaggtgaccgccaacgaggagatcaacgtgaccagcaccgacagcgaggtggagatcgtgaccgtgggcgagagctacagaagcagaagcaccctgggccacagcagaagccactggagccagggcagcagcagccacgccagcagaccccaggagcccagaaacagaagcagaatcagcaccgtgatccagcccctgagacagaacgccgccgaggtggtggacctgaccgtggacgaggacgagcccaccgtggtgcccaccaccagcgccagaatggagagccaggccaccagcgccagcatcaacaacagcaaccccagcaccagcgagcaggccagcgacaccgccagcgccgtgaccagcagccagcccagcaccgtgagcgagaccagcgccaccctgaccagcaacagcaccaccggcaccagcatcggcgacgacagcagaagaaccaccagcagcgccgtgaccgagaccggcccccccgccatgcccagactgcccagctgctgcccccagcacagcccctgcggcggcagcagccagaaccaccacgccctgggccacccccacaccagctgcttccagcagcacggccaccacttccagcaccaccaccaccaccaccacaccccccaccccgccgtgcccgtgagccccagcttcagcgaccccgcctgccccgtggagagacccccccaggtgcaggccccctgcggcgccaacagcagcagcggcaccagctaccacgagcagcaggccctgcccgtggacctgagcaacagcggcatcagaagccacggcagcggcagcttccacggcgccagcgccttcgacccctgctgccccgtgagcagcagcagagccgccatcttcggccaccaggccgccgccgccgcccccagccagcccctgagcagcatcgacggctacggcagcagcatggtggcccagccccagccccagccccccccccagcccagcctgagcagctgcagacactacatgccccccccctacgccagcctgaccagacccctgcaccaccaggccagcgcctgcccccacagccacggcaacccccccccccagacccagccccccccccaggtggactacgtgatcccccaccccgtgcacgccttccacagccagatcagcagccacgccaccagccaccccgtggccccccccccccccacccacctggccagcaccgccgcccccatcccccagcacctgccccccacccaccagcccatcagccaccacatccccgccaccgccccccccgcccagagactgcacccccacgaggtgatgcagagaatggaggtgcagagaagaagaatgatgcagcaccccaccagagcccacgagagaccccccccccacccccacagaatgcaccccaactacggccacggccaccacatccacgtgccccagaccatgagcagccaccccagacaggcccccgagagaagcgcctgggagctgggcatcgaggccggcgtgaccgccgccacctacacccccggcgccctgcacccccacctggcccactaccacgccccccccagactgcaccacctgcagctgggcgccctgcccctgatggtgcccgacatggccggctacccccacatcagatacatcagcagcggcctggacggcaccagcttcagaggccccttcagaggcaacttcgaggagctgatccacctggaggagagactgggcaacgtgaacagaggcgccagccagggcaccatcgagagatgcacctacccccacaagtacaagaaggtgaccaccgactggttcagccagagaaagctgcactgcaagcaggacggcgaggagggcaccgaggaggacaccgaggagaagtgcaccatctgcctgagcatcctggaggagggcgaggacgtgagaagactgccctgcatgcacctgttccaccaggtgtgcgtggaccagtggctgatcaccaacaagaagtgccccatctgcagagtggacatcgaggcccagctgcccagcgagagctag

SEQ ID NO: 13649 - DNA, 1158 bp, synthetic construct; identical to SEQ ID NO: 10045
  source 1..1158: mol_type = other DNA; note = Synthetic coding sequence

SEQ ID NO: 13650 - DNA, 7464 bp, synthetic construct
  source 1..7464: mol_type = other DNA; note = Synthetic coding sequence
tgagaggaggaggaggacgacgacgacgaggaggaggaggtgagcgaggtggagagcttcatcctggaccaggacgacctggagaaccccatgctggagaccgccagcaagctgctgctgagcggcaccgccgacggcgccgacctgagaaccgtggaccccgagacccaggccagactggaggccctgctggaggccgccggcatcggcaagctgagcaccgccgacggcaaggccttcgccgaccccgaggtgctgagaagactgaccagcagcgtgagctgcgccctggacgaggccgccgccgccctgaccagaatgagagccgagagcaccgccaacgccggccagagcgacaacagaagcctggccgaggcctgcagcgagggcgacgtgaacgccgtgagaaagctgctgatcgagggcagaagcgtgaacgagcacaccgaggagggcgagagcctgctgtgcctggcctgcagcgccggctactacgagctggcccaggtgctgctggccatgcacgccaacgtggaggacagaggcatcaagggcgacatcacccccctgatggccgccgccaacggcggccacgtgaagatcgtgaagctgctgctggcccacaaggccgacgtgaacgcccagagcagcaccggcaacaccgccctgacctacgcctgcgccggcggctacgtggacgtggtgaaggtgctgctggagagcggcgccagcatcgaggaccacaacgagaacggccacacccccctgatggaggccggcagcgccggccacgtggaggtggccagactgctgctggagaacggcgccggcatcaacacccacagcaacgagttcaaggagagcgccctgaccctggcctgctacaagggccacctggagatggtgagattcctgctggaggccggcgccgaccaggagcacaagaccgacgagatgcacaccgccctgatggaggcctgcatggacggccacgtggaggtggccagactgctgctggacagcggcgcccaggtgaacatgcccgccgacagcttcgagagccccctgaccctggccgcctgcggcggccacgtggagctggccgccctgctgatcgagagaggcgccagcctggaggaggtgaacgacgagggctacacccccctgatggaggccgccagagagggccacgaggagatggtggccctgctgctgggccagggcgccaacatcaacgcccagaccgaggagacccaggagaccgccctgaccctggcctgctgcggcggcttcctggaggtggccgacttcctgatcaaggccggcgccgacatcgagctgggctgcagcacccccctgatggaggccgcccaggagggccacctggagctggtgaagtacctgctggccgccggcgccaacgtgcacgccaccaccgccaccggcgacaccgccctgacctacgcctgcgagaacggccacaccgacgtggccgacgtgctgctgcaggccggcgccgacctggagcacgagagcgagggcggcagaacccccctgatgaaggccgccagagccggccacgtgtgcaccgtgcagttcctgatcagcaagggcgccaacgtgaacagaaccaccgccaacaacgaccacaccgtgctgagcctggcctgcgccggcggccacctggccgtggtggagctgctgctggcccacggcgccgaccccacccacagactgaaggacggcagcaccatgctgatcgaggccgccaagggcggccacaccagcgtggtgtgctacctgctggactaccccaacaacctgctgagcgcccccccccccgacgtgacccagctgaccccccccagccacgacctgaacagagcccccagagtgcccgtgcaggccctgcccatggtggtgcccccccaggagcccgacaagccccccgccaacgtggccaccaccctgcccatcagaaacaaggccgccagcaagcagaagagcagcagccacctgcccgccaacagccaggacgtgcagggctacatcaccaaccagagccccgagagcatcgtggaggaggcccagggcaagctgaccgagctggagcagagaatcaaggaggccatcgagaagaacgcccagctgcagagcctggagctggcccacgccgaccagctgaccaaggagaagatcgaggagctgaacaagaccagagaggagcagatccagaagaagcagaagatcctggaggagctgcagaaggtggagagagagctgcagctgaagacccagcagcagctgaagaagcagtacctggaggtgaaggcccagagaatccagctgcagcagcagcagcagcagagctgccagcacctgggcctgctgacccccgtgggcgtgggcgagcagctgagcgagggcgactacgccagactgcagcaggtggaccccgtgctgctgaaggacgagccccagcagaccgccgcccagatgggcttcgcccccatccagcccctggccatgccccaggccctgcccctggccgccggccccctgccccccggcagcatcgccaacctgaccgagctgcagggcgtgatcgtgggccagcccgtgctgggccaggcccagctggccggcctgggccagggcatcctgaccgagacccagcagggcctgatggtggccagccccgcccagaccctgaacgacaccctggacgacatcatggccgtgagcggcagagccagcgccatgagcaacacccccacccacagcatcgccgccagcatcagccagccccagacccccacccccagccccatcatcagccccagcgccatgctgcccatctaccccgccatcgacatcgacgcccagaccgagagcaaccacgacaccgccctgaccctggcctgcgccggcggccacgaggagctggtgcagaccctgctggagagaggcgccagcatcgagcacagagacaagaagggcttcacccccctgatcctggccgccaccgccggccacgtgggcgtggtggagatcctgctggacaacggcgccgacatcgaggcccagagcgagagaaccaaggacacccccctgagcctggcctgcagcggcggcagacaggaggtggtggagctgctgctggccagaggcgccaacaaggagcacagaaacgtgagcgactacacccccctgagcctggccgccagcggcggctacgtgaacatcatcaagatcctgctgaacgccggcgccgagatcaacagcagaaccggcagcaagctgggcatcagccccctgatgctggccgccatgaacggccacaccgccgccgtgaagctgctgctggacatgggcagcgacatcaacgcccagatcgagaccaacagaaacaccgccctgaccctggcctgcttccagggcagaaccgaggtggtgagcctgctgctggacagaaaggccaacgtggagcacagagccaagaccggcctgacccccctgatggaggccgccagcggcggctacgccgaggtgggcagagtgctgctggacaagggcgccgacgtgaacgccccccccgtgcccagcagcagagacaccgccctgaccatcgccgccgacaagggccactacaagttctgcgagctgctgatcggcagaggcgcccacatcgacgtgagaaacaagaagggcaacacccccctgtggctggccgccaacggcggccacctggacgtggtgcagctgctggtgcaggccggcgccgacgtggacgccgccgacaacagaaagatcacccccctgatggccgccttcagaaagggccacgtgaaggtggtgagatacctggtgaaggaggtgaaccagttccccagcgacagcgagtgcatgagatacatcgccaccatcaccgacaaggagatgctgaagaagtgccacctgtgcatggagagcatcgtgcaggccaaggacagacaggccgccgaggccaacaagaacgccagcatcctgctggaggagctggacctggagaagctgagagaggagagcagaagactggccctggccgccaagagagagaagagaaaggagaagagaagaaagaagaaggaggagcagagaagaaagctggaggagatcgaggccaagaacaaggagaacttcgagctgcaggccgcccaggagaaggagaagctgaaggtggaggacgagcccgaggtgctgaccgagccccccagcgccaccaccaccaccaccatcggcatcagcgccacctggaccaccctggccggcagccacggcaagagaaacaacaccatcaccaccaccagcagcaagagaaagaacagaaagaacaagatcacccccgagaacgtgcagatcatcttcgacgaccccctgcccatcagctacagccagcccgagaaggtgaacggcgagagcaagagcagcagcaccagcgagagcggcgacagcgacaacatgagaatcagcagctgcagcgacgagagcagcaacagcaacagcagcagaaagagcgacaaccacagccccgccgtggtgaccaccaccgtgagcagcaagaagcagcccagcgtgctggtgaccttccccaaggaggagagaaagagcgtgagcggcaaggccagcatcaagctgagcgagaccatcagcgagggcaccagcaacagcctgagcacctgcaccaagagcggccccagccccctgagcagccccaacggcaagctgaccgtggccagccccaagagaggccagaagagagaggagggctggaaggaggtggtgagaagaagcaagaaggtgagcgtgcccagcaccgtgatcagcagagtgatcggcagaggcggctgcaacatcaacgccatcagagagttcaccggcgcccacatcgacatcgacaagcagaaggacaagaccggcgacagaatcatcaccatcagaggcggcaccgagagcaccagacaggccacccagctgatcaacgccctgatcaaggaccccgacaaggagatcgacgagctgatccccaagaacagactgaagagcagcagcgccaacagcaagatcggcagcagcgcccccaccaccaccgccgccaacaccagcctgatgggcatcaagatgaccaccgtggccctgagcagcaccagccagaccgccaccgccctgaccgtgcccgccatcagcagcgccagcacccacaagaccatcaagaaccccgtgaacaacgtgagacccggcttccccgtgagcctgcccctggcctacccccccccccagttcgcccacgccctgctggccgcccagaccttccagcagatcagaccccccagactgcccatgacccacttcggcggcaccttcccccccgcccagagcacctggggccccttccccgtgagacccctgagccccgccagagccaccaacagccccaagccccacatggtgcccagacacagcaaccagaacagcagcggcagccaggtgaacagcgccggcagcctgaccagcagccccaccaccaccaccagcagcagcgccagcaccgtgcccggcaccagcaccaacggcagccccagcagccccagcgtgagaagacagctgttcgtgaccgtggtgaagaccagcaacgccaccaccaccaccgtgaccaccaccgccagcaacaacaacaccgcccccaccaacgccacctaccccatgcccaccgccaaggagcactaccccgtgagcagccccagcagccccagcccccccgcccagcccggcggcgtgagcagaaacagccccctggactgcggcagcgccagccccaacaaggtggccagcagcagcgagcaggaggccggcagcccccccgtggtggagaccaccaacaccagaccccccaacagcagcagcagcagcggcagcagcagcgcccacagcaaccagcagcagccccccggcagcgtgagccaggagcccagaccccccctgcagcagagccaggtgcccccccccgaggtgagaatgaccgtgccccccctggccaccagcagcgcccccgtggccgtgcccagcaccgcccccgtgacctaccccatgccccagacccccatgggctgcccccagcccacccccaagatggagacccccgccatcagaccccccccccacggcaccaccgccccccacaagaacagcgccagcgtgcagaacagcagcgtggccgtgctgagcgtgaaccacatcaagagaccccacagcgtgcccagcagcgtgcagctgcccagcaccctgagcacccagagcgcctgccagaacagcgtgcaccccgccaacaagcccatcgcccccaacttcagcgcccccctgcccttcggccccttcagcaccctgttcgagaacagccccaccagcgcccacgccttctggggcggcagcgtggtgagcagccagagcacccccgagagcatgctgagcggcaagagcagctacctgcccaacagcgaccccctgcaccagagcgacaccagcaaggcccccggcttcagaccccccctgcagagacccgcccccagccccagcggcatcgtgaacatggacagcccctacggcagcgtgacccccagcagcacccacctgggcaacttcgccagcaacatcagcggcggccagatgtacggccccggcgcccccctgggcggcgcccccgccgccgccaacttcaacagacagcacttcagccccctgagcctgctgaccccctgcagcagcgccagcaacgacagcagcgcccagagcgtgagcagcggcgtgagagcccccagccccgcccccagcagcgtgcccctgggcagcgagaagcccagcaacgtgagccaggacagaaaggtgcccgtgcccatcggcaccgagagaagcgccagaatcagacagaccggcaccagcgcccccagcgtgatcggcagcaacctgagcaccagcgtgggccacagcggcatctggagcttcgagggcatcggcggcaaccaggacaaggtggactggtgcaaccccggcatgggcaaccccatgatccacagacccatgagcgaccccggcgtgttcagccagcaccaggccatggagagagacagcaccggcatcgtgacccccagcggcaccttccaccagcacgtgcccgccggctacatggacttccccaaggtgggcggcatgcccttcagcgtgtacggcaacgccatgatcccccccgtggcccccatccccgacggcgccggcggccccatcttcaacggcccccacgccgccgaccccagctggaacagcctgatcaagatggtgagcagcagcaccgagaacaacggcccccagaccgtgtggaccggcccctgggccccccacatgaacagcgtgcacatgaaccagctgggctag

SEQ ID NO: 13651 - DNA, 33 bp, synthetic construct
  source 1..33: mol_type = other DNA; note = Synthetic coding sequence
atggccctgccccacgacagcaacgagacctag

SEQ ID NO: 13652 - DNA, 462 bp, synthetic construct
  source 1..462: mol_type = other DNA; note = Synthetic coding sequence
atggccaccatgatcccccccgtgaagctgaagtggctggagcacctgaacagcagctggatcaccgaggacagcgagagcatcgccaccagagagggcgtggccgtgctgtacagcaagctggtgagcaacaaggaggtggtgcccctgccccagcaggtgctgtgcctgaagggcccccagctgcccgacttcgagagagagagcctgagcagcgacgagcaggaccactacctggacgccctgctgagcagccagctggccctggccaagatggtgtgcagcgacagccccttcgccggcgccctgagaaagagactgctggtgctgcagagagtgttctacgccctgagcaacaagtaccacgacaagggcaaggtgaagcagcagcagcacagccccgagagcagcagcggcagcgccgacgtgcacagcgtgagcgagagacccagaagcagctag

SEQ ID NO: 13653 - DNA, 111 bp, synthetic construct
  source 1..111: mol_type = other DNA; note = Synthetic coding sequence
atgctgccccccaagcacctgagcgccaccaagcccaagaagagctgggcccccaacctgtacgagctggacagcgacctgaccaaggagcccgacgtgatcatcggctag

SEQ ID NO: 13654 - DNA, 315 bp, synthetic construct
  source 1..315: mol_type = other DNA; note = Synthetic coding sequence
atggcccagagcggcggcgaggccagacccggccccaagaccgccgtgcagatcagagtggccatccaggaggccgaggacgtggacgagctggaggacgaggaggagggcgccgagaccagaggcgccggcgaccccgccagatacctgagccccggctggggcagcgccagcgaggaggagcccagcagaggccacagaaccgcccagctgccctggctggagagccagcaggtgttcagcctgaagcccttcctgctgcccaccggcatcgagctgacccccgagaacccctggggcagcagcgtgagctag

SEQ ID NO: 13655 - DNA, 645 bp, synthetic construct
  source 1..645: mol_type = other DNA; note = Synthetic coding sequence
atggccctgccccacgacagcaacgagaccagctacctgctgccccccaacaacgaggactggggcagacagaccatccccgacttcgtgtacggccagaaggacctgatggccgagggcatccagtggcccagaaacgcccccggcatccccgacgccctgccccagagccccttcgacgccgccctgtgcagcgcctggaagcagagagtggagctgggcctgttcagatacagactgagagagctgcagacccagatcctgcccggcgccgtgggcttcgtggcccagctgaacgtggagagaggcgtgcagagaagacccccccagaccatcaagagcgtgagacaggccttcgaccccgtgcagttcaacttcaacaagatcagacccggcgaggtgctgttcagactgcacagagagcccgacctgcccggcaccctgctgcaggaggacatcctggtggtgatcaacgtgagccccctggagtggggccacgtgctgctggtgcccgagcccgccagacagctgccccagagactgctgcccggcgccctgagagccggcatcgaggccgtgctgctgagcctgcaccccggcttcagagtgggcttcaacagcctgggcggcctggccagcgtgtag

SEQ ID NO: 13656 - DNA, 2988 bp, synthetic construct
  source 1..2988: mol_type = other DNA; note = Synthetic coding sequence
atgagccagtggacccccgagtacaacgagctgtacaccctgaaggtggacatgaagagcgagatccccagcgacgcccccaagacccaggagagcctgaagggcatcctgctgcaccccgagcccatcggcgccgccaagagcttccccgccggcgtggagatgatcaacagcaaggtgggcaacgagttcagccacctgtgcgacgacagccagaagcaggagaaggagatgaacggcaaccagcaggagcaggagaagagcctggtggtgagaaagaagagaaagagccagcaggccggccccagctacgtgcagaactgcgtgaaggagaaccagggcatcctgggcctgagacagcacctgggcacccccagcgacgaggacaacgacagcagcttcagcgactgcctgagcagccccagcagcagcctgcacttcggcgacagcgacaccgtgaccagcgacgaggacaaggaggtgagcgtgagacacagccagaccatcctgaacgccaagagcagaagccacagcgccagaagccacaagtggcccagaaccgagaccgagagcgtgagcggcctgctgatgaagagaccctgcctgcacggcagcagcctgagaagactgccctgcagaaagagattcgtgaagaacaacagcagccagagaacccagaagcagaaggagagaatcctgatgcagagaaagaagagagaggtgctggccagaagaaagtacgccctgctgcccagcagcagcagcagcagcgagaacgacctgagcagcgagagcagcagcagcagcagcaccgagggcgaggaggacctgttcgtgagcgccagcgagaaccaccagaacaaccccgccgtgcccagcggcagcatcgacgaggacgtggtggtgatcgaggccagcagcaccccccaggtgaccgccaacgaggagatcaacgtgaccagcaccgacagcgaggtggagatcgtgaccgtgggcgagagctacagaagcagaagcaccctgggccacagcagaagccactggagccagggcagcagcagccacgccagcagaccccaggagcccagaaacagaagcagaatcagcaccgtgatccagcccctgagacagaacgccgccgaggtggtggacctgaccgtggacgaggacgagcccaccgtggtgcccaccaccagcgccagaatggagagccaggccaccagcgccagcatcaacaacagcaaccccagcaccagcgagcaggccagcgacaccgccagcgccgtgaccagcagccagcccagcaccgtgagcgagaccagcgccaccctgaccagcaacagcaccaccggcaccagcatcggcgacgacagcagaagaaccaccagcagcgccgtgaccgagaccggcccccccgccatgcccagactgcccagctgctgcccccagcacagcccctgcggcggcagcagccagaaccaccacgccctgggccacccccacaccagctgcttccagcagcacggccaccacttccagcaccaccaccaccaccaccacaccccccaccccgccgtgcccgtgagccccagcttcagcgaccccgcctgccccgtggagagacccccccaggtgcaggccccctgcggcgccaacagcagcagcggcaccagctaccacgagcagcaggccctgcccgtggacctgagcaacagcggcatcagaagccacggcagcggcagcttccacggcgccagcgccttcgacccctgctgccccgtgagcagcagcagagccgccatcttcggccaccaggccgccgccgccgcccccagccagcccctgagcagcatcgacggctacggcagcagcatggtggcccagccccagccccagccccccccccagcccagcctgagcagctgcagacactacatgccccccccctacgccagcctgaccagacccctgcaccaccaggccagcgcctgcccccacagccacggcaacccccccccccagacccagccccccccccaggtggactacgtgatcccccaccccgtgcacgccttccacagccagatcagcagccacgccaccagccaccccgtggccccccccccccccacccacctggccagcaccgccgcccccatcccccagcacctgccccccacccaccagcccatcagccaccacatccccgccaccgccccccccgcccagagactgcacccccacgaggtgatgcagagaatggaggtgcagagaagaagaatgatgcagcaccccaccggcctgttcgtgttctgcgtgagcagaagagcccacgagagaccccccccccacccccacagaatgcaccccaactacggccacggccaccacatccacgtgccccagaccatgagcagccaccccagacaggcccccgagagaagcgcctgggagctgggcatcgaggccggcgtgaccgccgccacctacacccccggcgccctgcacccccacctggcccactaccacgccccccccagactgcaccacctgcagctgggcgccctgcccctgatggtgcccgacatggccggctacccccacatcagatacatcagcagcggcctggacggcaccagcttcagaggccccttcagaggcaacttcgaggagctgatccacctggaggagagactgggcaacgtgaacagaggcgccagccagggcaccatcgagagatgcacctacccccacaagtacaagaagagaaagctgcactgcaagcaggacggcgaggagggcaccgaggaggacaccgaggagaagtgcaccatctgcctgagcatcctggaggagggcgaggacgtgagaagactgccctgcatgcacctgttccaccaggtgtgcgtggaccagtggctgatcaccaacaagaagtgccccatctgcagagtggacatcgaggcccagctgcccagcgagagctag

SEQ ID NO: 13657 - DNA, 1851 bp, synthetic construct
  source 1..1851: mol_type = other DNA; note = Synthetic coding sequence
atggccggcggcagaggcgcccccggcagaggcagagacgagccccccgagagctacccccagagacaggaccacgagctgcaggccctggaggccatctacggcgccgacttccaggacctgagacccgacgcctgcggccccgtgaaggagccccccgagatcaacctggtgctgtacccccagggcctgaccggcgaggaggtgtacgtgaaggtggacctgagagtgaagtgcccccccacctaccccgacgtggtgcccgagatcgagctgaagaacgccaagggcctgagcaacgagagcgtgaacctgctgaagagcagactggaggagctggccaagaagcactgcggcgaggtgatgatcttcgagctggcctaccacgtgcagagcttcctgagcgagcacaacaagcccccccccaagagcttccacgaggagatgctggagagaagagcccaggaggagcagcagagactgctggaggccaagagaaaggaggagcaggagcagagagagatcctgcacgagatccagagaagaaaggaggagatcaaggaggagaagaagagaaaggagatggccaagcaggagagactggagatcgccagcctgagcaaccaggaccacaccagcaagaaggaccccggcggccacagaaccgccgccatcctgcacggcggcagccccgacttcgtgggcaacggcaagcacagagccaacagcagcggcagaagcagaagagagagacagtacagcgtgtgcaacagcgaggacagccccggcagctgcgagatcctgtacttcaacatgggcagccccgaccagctgatggtgcacaagggcaagtgcatcggcagcgacgagcagctgggcaagctggtgtacaacgccctggagaccgccaccggcggcttcgtgctgctgtacgagtgggtgctgcagtggcagaagaagatgggccccttcctgaccagccaggagaaggagaagatcgacaagtgcaagaagcagatccagggcaccgagaccgagttcaacagcctggtgaagctgagccaccccaacgtggtgagatacctggccatgaacctgaaggagcaggacgacagcatcgtggtggacatcctggtggagcacatcagcggcgtgagcctggccgcccacctgagccacagcggccccatccccgtgcaccagctgagaagatacaccgcccagctgctgagcggcctggactacctgcacagcaacagcgtggtgcacaaggtgctgagcgccagcaacgtgctggtggacgccgagggcaccgtgaagatcaccgactacagcatcagcaagagactggccgacatctgcaaggaggacgtgttcgagcagaccagagtgagattcagcgacaacgccctgccctacaagaccggcaagaagggcgacgtgtggagactgggcctgctgctgctgagcctgagccagggccaggagtgcggcgagtaccccgtgaccatccccagcgacctgcccgccgacttccaggacttcctgaagaagtgcgtgtgcctggacgacaaggagagatggagcccccagcagctgctgaagcacagcttcatcaacccccagcccaagatgcccctggtggagcagagccccgaggacagcgagggccaggactacgtggagaccgtgatccccagcaacagactgcccagcgccgccttcttcagcgagacccagagacagttcagcagatacttcatcgagttcgaggagctgcagctgctgggcaagggcgccttcggcgccgtgatcaaggtgtggtacagagtgatccccagccccctgtag

SEQ ID NO: 13658 - DNA, 396 bp, synthetic construct
  source 1..396: mol_type = other DNA; note = Synthetic coding sequence
atgagccagtggacccccgagtacaacgagctgtacaccctgaaggtggacatgaagagcgagatccccagcgacgcccccaagacccaggagagcctgaagggcatcctgctgcaccccgagcccatcggcgccgccaagagcttccccgccggcgtggagatgatcaacagcaaggtgggcaacgagttcagccacctgtgcgacgacagccagaagcaggagaaggagatgaacggcaaccagcaggagcaggagaagagcctggtggtgagaaagaagagaaagagccagcaggccggccccagctacgtgcagaactgcgtgaaggagaaccagggcatcctgggcctgagacagcacctgggcacccccagcgacgaggacaacgactag

SEQ ID NO: 13659 - DNA, 1863 bp, synthetic construct
  source 1..1863: mol_type = other DNA; note = Synthetic coding sequence
atggcccccgacagcgaccccttccccgagggccccctgctgaagctgctgcccctggacgccagagacagaggcacccagagatgcagactgggccccgccgccctgcacgccctgggcgccagactgggcagcgccgtgaagatcagcctgcccgacggcggcagctgcctgtgcaccgcctggcccagaagagacggcgccgacggcttcgtgcagctggaccccctgtgcgccagccccggcgccgccgtgggcgccagcagaagcagaagaagcctgagcctgaacagactgctgctggtgccctgcccccccctgagaagagtggccgtgtggcccgtgctgagagagagagccggcgcccccggcgccagaaacaccgccgccgtgctggaggccgcccaggagctgctgagaaacagacccatcagcctgggccacgtggtggtggccccccccggcgcccccggcctggtggccgccctgcacatcgtgggcggcacccccagccccgaccccgccggcctggtgacccccagaaccagagtgagcctgggcggcgagccccccagcgaggcccagccccagcccgaggtgcccctgggcggcctgagcgaggccgccgacagcctgagagagctgctgagactgcccctgagataccccagagccctgaccgccctgggcctggccgtgcccagaggcgtgctgctggccggcccccccggcgtgggcaagacccagctggtgagagccgtggccagagaggccggcgccgagctgctggccgtgagcgcccccgccctgcagggcagcagacccggcgagaccgaggagaacgtgagaagagtgttccagagagccagagagctggccagcagaggccccagcctgctgttcctggacgagatggacgccctgtgcccccagagaggcagcagagcccccgagagcagagtggtggcccaggtgctgaccctgctggacggcgccagcggcgacagagaggtggtggtggtgggcgccaccaacagacccgacgccctggaccccgccctgagaagacccggcagattcgacagagaggtggtgatcggcacccccaccctgaagcagagaaaggagatcctgcaggtgatcaccagcaagatgcccatcagcagccacgtggacctgggcctgctggccgagatgaccgtgggctacgtgggcgccgacctgaccgccctgtgcagagaggccgccatgcacgccctgctgcacagcgagaagaaccaggacaaccccgtgatcgacgagatcgacttcctggaggccttcaagaacatccagcccagcagcttcagaagcgtgatcggcctgatggacatcaagcccgtggactgggaggagatcggcggcctggaggacgtgaagctgaagctgaagcagagcatcgagtggcccctgaagttcccctgggagttcgtgagaatgggcctgacccagcccaagggcgtgctgctgtacggcccccccggctgcgccaagaccaccctggtgagagccctggccaccagctgccactgcagcttcgtgagcgtgagcggcgccgacctgttcagccccttcgtgggcgacagcgagaaggtgctgagccagatcttcagacaggccagagccagcacccccgccatcctgttcctggacgagatcgacagcatcctgggcgccagaagcgccagcaagaccggctgcgacgtgcaggagagagtgctgagcgtgctgctgaacgagctggacggcgtgggcctgaagaccatcgagagaagaggcagcaagagcagccagcagggcaagtacaaggagctgaagaagtag

SEQ ID NO: 13660 - DNA, 4767 bp, synthetic construct; identical to SEQ ID NO: 10006
  source 1..4767: mol_type = other DNA; note = Synthetic coding sequence

SEQ ID NO: 13661 - DNA, 63 bp, synthetic construct
  source 1..63: mol_type = other DNA; note = Synthetic coding sequence
atggccaccatgatcccccccgtgaagctgaagtggctggagcacctgaacagcagctggtag

SEQ ID NO: 13662 - DNA, 4389 bp, synthetic construct
  source 1..4389: mol_type = other DNA; note = Synthetic coding sequence
atgtaccagcccgaggacgacaacaacagcgacgtgaccagcgacgacgacatgaccagaaacagaagagagagcagccccccccacagcgtgcacagcttcagcgacagagactgggacagaagaggcagaagcagagacatggagcccagagacagatggagccacaccagaaaccccagaagcagaatgccccccagagacctgagcctgcccgtggtggccaagaccagcttcgagatggacagagaggacgacagagacagcagagcctacgagagcagaagccaggacgccgagagctaccagaacgtggtggacctggccgaggacagaaagccccacaacaccatccaggacaacatggagaactacagaaagctgctgagcctggtgcagctggccgaggacgacggccacagccacatgacccagggccacagcagcagaagcaagagaagcgcctaccccagcaccagcagaggcctgaagaccatgcccgaggccaagaagagcacccacagaagaggcatctgcgaggacgagagcagccacggcgtgatcatggagaagttcatcaaggacgtgagcagaagcagcaagagcggcagagccagagagagcagcgacagaagccagagattccccagaatgagcgacgacaactggaaggacatcagcctgaacaagagagagagcgtgatccagcagagagtgtacgagggcaacgccttcagaggcggcttcagattcaacagcaccctggtgagcagaaagagagtgctggagagaaagagaagataccacttcgacaccgacggcaagggcagcatccacgaccagaagggctgccccagaaagaagcccttcgagtgcggcagcgagatgagaaaggccatgagcgtgagcagcctgagcagcctgagcagccccagcttcaccgagagccagcccatcgacttcggcgccatgccctacgtgtgcgacgagtgcggcagaagcttcagcgtgatcagcgagttcgtggagcaccagatcatgcacaccagagagaacctgtacgagtacggcgagagcttcatccacagcgtggccgtgagcgaggtgcagaagagccaggtgggcggcaagagattcgagtgcaaggactgcggcgagaccttcaacaagagcgccgccctggccgagcacagaaagatccacgccagaggctacctggtggagtgcaagaaccaggagtgcgaggaggccttcatgcccagccccaccttcagcgagctgcagaagatctacggcaaggacaagttctacgagtgcagagtgtgcaaggagaccttcctgcacagcagcgccctgatcgagcaccagaagatccacttcggcgacgacaaggacaacgagagagagcacgagagagagagagagagagagagaggcgagaccttcagacccagccccgccctgaacgagttccagaagatgtacggcaaggagaagatgtacgagtgcaaggtgtgcggcgagaccttcctgcacagcagcagcctgaaggagcaccagaagatccacaccagaggcaaccccttcgagaacaagggcaaggtgtgcgaggagaccttcatccccggccagagcctgaagagaagacagaagacctacaacaaggagaagctgtgcgacttcaccgacggcagagacgccttcatgcagagcagcgagctgagcgagcaccagaagatccacagcagaaagaacctgttcgagggcagaggctacgagaagagcgtgatccacagcggccccttcaccgagagccagaagagccacaccatcaccagacccctggagagcgacgaggacgagaaggccttcaccatcagcagcaacccctacgagaaccagaagatccccaccaaggagaacgtgtacgaggccaagagctacgagagaagcgtgatccacagcctggccagcgtggaggcccagaagagccacagcgtggccggccccagcaagcccaaggtgatggccgagagcaccatccagagcttcgacgccatcaaccaccagagagtgagagccggcggcaacaccagcgagggcagagagtacagcagaagcgtgatccacagcctggtggccagcaagccccccagaagccacaacggcaacgagctggtggagagcaacgagaagggcgagagcagcatctacatcagcgacctgaacgacaagagacagaagatccccgccagagagaacccctgcgagggcggcagcaagaacagaaactacgaggacagcgtgatccagagcgtgttcagagccaagccccagaagagcgtgcccggcgagggcagcggcgagttcaagaaggacggcgagttcagcgtgcccagcagcaacgtgagagagtaccagaaggccagagccaagaagaagtacatcgagcacagaagcaacgagaccagcgtgatccacagcctgcccttcggcgagcagaccttcagacccagaggcatgctgtacgagtgccaggagtgcggcgagtgcttcgcccacagcagcgacctgaccgagcaccagaagatccacgacagagagaagcccagcggcagcagaaactacgagtggagcgtgatcagaagcctggcccccaccgacccccagaccagctacgcccaggagcagtacgccaaggagcaggccagaaacaagtgcaaggacttcagacagttcttcgccaccagcgaggacctgaacaccaaccagaagatctacgaccaggagaagagccacggcgaggagagccagggcgagaacaccgacggcgaggagacccacagcgaggagacccacggccaggagaccatcgaggaccccgtgatccagggcagcgacatggaggacccccagaaggacgaccccgacgacaagatctacgagtgcgaggactgcggcctgggcttcgtggacctgaccgacctgaccgaccaccagaaggtgcacagcagaaagtgcctggtggacagcagagagtacacccacagcgtgatccacacccacagcatcagcgagtaccagagagactacaccggcgagcagctgtacgagtgccccaagtgcggcgagagcttcatccacagcagcttcctgttcgagcaccagagaatccacgagcaggaccagctgtacagcatgaagggctgcgacgacggcttcatcgccctgctgcccatgaagcccagaagaaacagagccgccgagagaaaccccgccctggccggcagcgccatcagatgcctgctgtgcggccagggcttcatccacagcagcgccctgaacgagcacatgagactgcacagagaggacgacctgctggagcagagccagatggccgaggaggccatcatccccggcctggccctgaccgagttccagagaagccagaccgaggagagactgttcgagtgcgccgtgtgcggcgagagcttcgtgaaccccgccgagctggccgaccacgtgaccgtgcacaagaacgagccctacgagtacggcagcagctacacccacaccagcttcctgaccgagcccctgaagggcgccatccccttctacgagtgcaaggactgcggcaagagcttcatccacagcaccgtgctgaccaagcacaaggagctgcacctggaggaggaggaggaggacgaggccgccgccgccgccgccgccgccgcccaggaggtggaggccaacgtgcacgtgccccaggtggtgctgagaatccagggcctgaacgtggaggccgccgagcccgaggtggaggccgccgagcccgaggtggaggccgccgagcccgaggtggaggccgccgagcccaacggcgaggccgagggccccgacggcgaggccgccgagcccatcggcgaggccggccagcccaacggcgaggccgagcagcccaacggcgacgccgacgagcccgacggcgccggcatcgaggaccccgaggagagagccgaggagcccgagggcaaggccgaggagcccgagggcgacgccgacgagcccgacggcgtgggcatcgaggaccccgaggagggcgaggaccaggagatccaggtggaggagccctactacgactgccacgagtgcaccgagaccttcaccagcagcaccgccttcagcgagcacctgaagacccacgccagcatgatcatcttcgagcccgccaacgccttcggcgagtgcagcggctacatcgagagagccagcaccagcaccggcggcgccaaccaggccgacgagaagtacttcaagtgcgacgtgtgcggccagctgttcaacgacagactgagcctggccagacaccagaacacccacaccggctag

SEQ ID NO: 13663 - DNA, 438 bp, synthetic construct
  source 1..438: mol_type = other DNA; note = Synthetic coding sequence
atggccaccatgatcccccccgtgaagctgaagtggctggagcacctgaacagcagctggatcaccgaggacagcgagagcatcgccaccagagagggcgtggccgtgctgtacagcaagctggtgagcaacaaggaggtggtgcccctgccccagcaggtgctgtgcctgaagggcccccagctgcccgacttcgagagagagagcctgagcagcgacgagcaggaccactacctggacgccctgctgagcagccagctggccctggccaagatggtgtgcagcgacagccccttcgccggcgccctgagaaagagactgctggtgctgcagagagtgttctacgccctgagcaacaagtaccacgacaagggcaaggtgaagcagcagcagcacagccccgagagcagcagcggcagcgccgacgtgcacagctag

SEQ ID NO: 13664 - DNA, 4284 bp, synthetic construct
  source 1..4284: mol_type = other DNA; note = Synthetic coding sequence
tgagccaagcaggagagactggagatcgccagcctgagcaaccaggaccacaccagcaagaaggaccccggcggccacagaaccgccgccatcctgcacggcggcagccccgacttcgtgggcaacggcaagcacagagccaacagcagcggcagaagcagaagagagagacagtacagcgtgtgcaacagcgaggacagccccggcagctgcgagatcctgtacttcaacatgggcagccccgaccagctgatggtgcacaagggcaagtgcatcggcagcgacgagcagctgggcaagctggtgtacaacgccctggagaccgccaccggcggcttcgtgctgctgtacgagtgggtgctgcagtggcagaagaagatgggccccttcctgaccagccaggagaaggagaagatcgacaagtgcaagaagcagatccagggcaccgagaccgagttcaacagcctggtgaagctgagccaccccaacgtggtgagatacctggccatgaacctgaaggagcaggacgacagcatcgtggtggacatcctggtggagcacatcagcggcgtgagcctggccgcccacctgagccacagcggccccatccccgtgcaccagctgagaagatacaccgcccagctgctgagcggcctggactacctgcacagcaacagcgtggtgcacaaggtgctgagcgccagcaacgtgctggtggacgccgagggcaccgtgaagatcaccgactacagcatcagcaagagactggccgacatctgcaaggaggacgtgttcgagcagaccagagtgagattcagcgacaacgccctgccctacaagaccggcaagaagggcgacgtgtggagactgggcctgctgctgctgagcctgagccagggccaggagtgcggcgagtaccccgtgaccatccccagcgacctgcccgccgacttccaggacttcctgaagaagtgcgtgtgcctggacgacaaggagagatggagcccccagcagctgctgaagcacagcttcatcaacccccagcccaagatgcccctggtggagcagagccccgaggacagcgagggccaggactacgtggagaccgtgatccccagcaacagactgcccagcgccgccttcttcagcgagacccagagacagttcagcagatacttcatcgagttcgaggagctgcagctgctgggcaagggcgccttcggcgccgtgatcaaggtgcagaacaagctggacggctgctgctacgccgtgaagagaatccccatcaaccccgccagcagacagttcagaagaatcaagggcgaggtgaccctgctgagcagactgcaccacgagaacatcgtgagatactacaacgcctggatcgagagacacgagagacccgccggccccggcacccccccccccgacagcggccccctggccaaggacgacagagccgccagaggccagcccgccagcgacaccgacggcctggacagcgtggaggccgccgcccccccccccatcctgagcagcagcgtggagtggagcaccagcggcgagagaagcgccagcgccagattccccgccaccggccccggcagcagcgacgacgaggacgacgacgaggacgagcacggcggcgtgttcagccagagcttcctgcccgccagcgacagcgagagcgacatcatcttcgacaacgaggacgagaacagcaagagccagaaccagatggagtactgcgagaagagcaccctgagagacaccatcgaccagggcctgtacagagacaccgtgagactgtggagactgttcagagagatcctggacggcctggcctacatccacgagaagggcatgatccacagagacctgaagcccgtgaacatcttcctggacagcgacgaccacgtgaagatcggcgacttcggcctggccaccgaccacctggccttcagcgccgacagcaagcaggacgaccagaccggcgacctgatcaagagcgaccccagcggccacctgaccggcatggtgggcaccgccctgtacgtgagccccgaggtgcagggcagcaccaagagcgcctacaaccagaaggtggacctgttcagcctgggcatcatcttcttcgagatgagctaccaccccatggtgaccgccagcgagagaatcttcgtgctgaaccagctgagagaccccaccagccccaagttccccgaggacttcgacgacggcgagcacgccaagcagaagagcgtgatcagctggctgctgaaccacgaccccgccaagagacccaccgccaccgagctgctgaagagcgagctgctgccccccccccagatggaggagagcgagctgcacgaggtgctgcaccacaccctgaccaacgtggacggcaaggcctacagaaccatgatggcccagatcttcagccagagaatcagccccgccatcgactacacctacgacagcgacatcctgaagggcaacttcagcatcagaaccgccaagatgcagcagcacgtgtgcgagaccatcatcagaatcttcaagagacacggcgccgtgcagctgtgcacccccctgctgctgcccagaaacagacagatctacgagcacaacgaggccgccctgttcatggaccacagcggcatgctggtgatgctgcccttcgacctgagaatccccttcgccagatacgtggccagaaacaacatcctgaacctgaagagatactgcatcgagagagtgttcagacccagaaagctggacagattccaccccaaggagctgctggagtgcgccttcgacatcgtgaccagcaccaccaacagcttcctgcccaccgccgagatcatctacaccatctacgagatcatccaggagttccccgccctgcaggagagaaactacagcatctacctgaaccacaccatgctgctgaaggccatcctgctgcactgcggcatccccgaggacaagctgagccaggtgtacatcatcctgtacgacgccgtgaccgagaagctgaccagaagagaggtggaggccaagttctgcaacctgagcctgagcagcaacagcctgtgcagactgtacaagttcatcgagcagaagggcgacctgcaggacctgatgcccaccatcaacagcctgatcaagcagaagaccggcatcgcccagctggtgaagtacggcctgaaggacctggaggaggtggtgggcctgctgaagaagctgggcatcaagctgcaggtgctgatcaacctgggcctggtgtacaaggtgcagcagcacaacggcatcatcttccagttcgtggccttcatcaagagaagacagagagccgtgcccgagatcctggccgccggcggcagatacgacctgctgatcccccagttcagaggcccccaggccctgggccccgtgcccaccgccatcggcgtgagcatcgccatcgacaagatcagcgccgccgtgctgaacatggaggagagcgtgaccatcagcagctgcgacctgctggtggtgagcgtgggccagatgagcatgagcagagccatcaacctgacccagaagctgtggaccgccggcatcaccgccgagatcatgtacgactggagccagagccaggaggagctgcaggagtactgcagacaccacgagatcacctacgtggccctggtgagcgacaaggagggcagccacgtgaaggtgaagagcttcgagaaggagagacagaccgagaagagagtgctggagaccgagctggtggaccacgtgctgcagaagctgagaaccaaggtgaccgacgagagaaacggcagagaggccagcgacaacctggccgtgcagaacctgaagggcagcttcagcaacgccagcggcctgttcgagatccacggcgccaccgtggtgcccatcgtgagcgtgctggcccccgagaagctgagcgccagcaccagaagaagatacgagacccaggtgcagaccagactgcagaccagcctggccaacctgcaccagaagagcagcgagatcgagatcctggccgtggacctgcccaaggagaccatcctgcagttcctgagcctggagtgggacgccgacgagcaggccttcaacaccaccgtgaagcagctgctgagcagactgcccaagcagagatacctgaagctggtgtgcgacgagatctacaacatcaaggtggagaagaaggtgagcgtgctgttcctgtacagctacagagacgactactacagaatcctgttctag

SEQ ID NO: 13665 - DNA, 4767 bp, synthetic construct; identical to SEQ ID NO: 10006
  source 1..4767: mol_type = other DNA; note = Synthetic coding sequence

SEQ ID NO: 13666 - DNA, 3012 bp, synthetic construct; identical to SEQ ID NO: 12204
  source 1..3012: mol_type = other DNA; note = Synthetic coding sequence

SEQ ID NO: 13667 - DNA, 150 bp, synthetic construct
  source 1..150: mol_type = other DNA; note = Synthetic coding sequence
atggccctgccccacgacagcaacgagaccagctacctgctgccccccaacaacgaggactggggcagacagaccatccccgacttcgtgtacggccagaaggacctgatggccgagggcatccagtggcccagaaacgcccccggctag

SEQ ID NO: 13668 - DNA, 375 bp, synthetic construct; identical to SEQ ID NO: 10236
  source 1..375: mol_type = other DNA; note = Synthetic coding sequence

SEQ ID NO: 13669 - DNA, 93 bp, synthetic construct
  source 1..93: mol_type = other DNA; note = Synthetic coding sequence
atggccaccgacagctgggccctggccgtggacgagcaggaggccgccgccgagagcagaaccgagctgcccagcccctacagcaccagctag

SEQ ID NO: 13670 - DNA, 804 bp, synthetic construct; identical to SEQ ID NO: 12088
  source 1..804: mol_type = other DNA; note = Synthetic coding sequence

SEQ ID NO: 13671 - DNA, 1113 bp, synthetic construct; identical to SEQ ID NO: 11344
  source 1..1113: mol_type = other DNA; note = Synthetic coding sequence

SEQ ID NO: 13672 - DNA, 2712 bp, synthetic construct
  source 1..2712: mol_type = other DNA; note = Synthetic coding sequence
atggccaccagcgccgacagccccagcagccccctgggcgccgaggacctgctgagcgacagcagcgagccccccggcctgaaccaggtgagcagcgaggtgaccagccagctgtacgccagcctgagactgagcagacaggccgaggccaccgccagagcccagctgtacctgcccagcaccagccccccccacgagggcctggacggcttcgcccaggagctgagcagaagcctgagcgtgggcctggagaagaacctgaagaagaaggacggcagcaagcacatcttcgagatggagagcgtgagaggccagctgcagaccatgctgcagaccagcagagacaccgcctacagagaccccctgatccccggcgccggcagcgagagaagagaggaggacagcttcgacagcgacagcaccgccaccctgctgaacaccagacccctgcaggacctgagccccagcagcagcgcccaggccctggaggagctgttccccagatacaccagcctgagacccggcccccccctgaacccccccgacttccagggcctgagagacgccctggacagcgagcacaccagaagaaagcactgcgagagacacatccagagcctgcagaccagagtgctggagctgcagcagcagctggccgtggccgtggccgccgacagaaagaaggacaccatgatcgagcagctggacaagaccctggccagagtggtggagggctggaacagacacgaggccgagagaaccgaggtgctgagaggcctgcaggaggagcaccaggccgccgagctgaccagaagcaagcagcaggagaccgtgaccagactggagcagagcctgagcgaggccatggaggccctgaacagagagcaggagagcgccagactgcagcagagagagagagagaccctggaggaggagagacaggccctgaccctgagactggaggccgagcagcagagatgctgcgtgctgcaggaggagagagacgccgccagagccggccagctgagcgagcacagagagctggagaccctgagagccgccctggaggaggagagacagacctgggcccagcaggagcaccagctgaaggagcactaccaggccctgcaggaggagagccaggcccagctggagagagagaaggagaagagccagagagaggcccaggccgcctgggagacccagcaccagctggccctggtgcagagcgaggtgagaagactggagggcgagctggacaccgccagaagagagagagacgccctgcagctggagatgagcctggtgcaggccagatacgagagccagagaatccagctggagagcgagctggccgtgcagctggagcagagagtgaccgagagactggcccaggcccaggagagcagcctgagacaggccgccagcctgagagagcaccacagaaagcagctgcaggacctgagcggccagcaccagcaggagctggccagccagctggcccagttcaaggtggagatggccgagagagaggagagacagcagcaggtggccgaggactacgagctgagactggccagagagcaggccagagtgtgcgagctgcagagcggcaaccagcagctggaggagcagagagtggagctggtggagagactgcaggccatgctgcaggcccactgggacgaggccaaccagctgctgagcaccaccctgcccccccccaacccccccgccccccccgccggccccagcagccccggcccccaggagcccgagaaggaggagagaagagtgtggaccatgccccccatggccgtggccctgaagcccgtgctgcagcagagcagagaggccagagacgagctgcccggcgccccccccgtgctgtgcagcagcagcagcgacctgagcctgctgctgggccccagcttccagagccagcacagcttccagcccctggagcccaagcccgacctgaccagcagcaccgccggcgccttcagcgccctgggcgccttccaccccgaccacagagccgagagacccttccccgaggaggaccccggccccgacggcgagggcctgctgaagcagggcctgccccccgcccagctggagggcctgaagaacttcctgcaccagctgctggagaccgtgccccagaacaacgagaaccccagcgtggacctgctgccccccaagagcggccccctgaccgtgcccagctgggaggaggccccccaggtgcccagaatccccccccccgtgcacaagaccaaggtgcccctggccatggccagcagcctgttcagagtgcccgagccccccagcagccacagccagggcagcggccccagcagcggcagccccgagagaggcggcgacggcctgaccttccccagacagctgatggaggtgagccagctgctgagactgtaccaggccagaggctggggcgccctgcccgccgaggacctgctgctgtacctgaagagactggagcacagcggcaccgacggcagaggcgacaacgtgcccagaagaaacaccgacagcagactgggcgagatccccagaaaggagatccccagccaggccgtgcccagaagactggccaccgcccccaagaccgagaagccccccgccagaaagaagagcggccaccccgcccccagcagcatgagaagcagaggcggcgtgtggagatag

SEQ ID NO: 13673 - DNA, 138 bp, synthetic construct
  source 1..138: mol_type = other DNA; note = Synthetic coding sequence
atgcccctgctggtggagggcagaagagtgagactgccccagagcgccggcgacctggtgagagcccacccccccctggaggcccccagccccttctgggtgctgatgatgcccctgctggtgaccctgtggagctag

SEQ ID NO: 13674 - DNA, 1083 bp, synthetic construct; identical to SEQ ID NO: 9805
  source 1..1083: mol_type = other DNA; note = Synthetic coding sequence

SEQ ID NO: 13675 - DNA, 1353 bp, synthetic construct; identical to SEQ ID NO: 9393
  source 1..1353: mol_type = other DNA; note = Synthetic coding sequence

SEQ ID NO: 13676 - DNA, 1113 bp, synthetic construct; identical to SEQ ID NO: 11344
  source 1..1113: mol_type = other DNA; note = Synthetic coding sequence

SEQ ID NO: 13677 - DNA, 738 bp, synthetic construct
  source 1..738: mol_type = other DNA; note = Synthetic coding sequence
atgggcggcggctacgacctgaacctgttcgccagcccccccgacagcaacttcgtgtgcagcgtgtgccacggcgtgctgaagagacccgccagactgccctgcagccacatcttctgcaagaagtgcatcctgagatggctggccagacagaagacctgcccctgctgcagaaaggaggtgaagagaaagaaggtggtgcacatgaacaagctgagaaagaccatcggcagactggaggtgaagtgcaagaacgccgacgccggctgcatcgtgacctgccccctggcccacagaaagggccaccaggacagctgccccttcgagctgaccgcctgccccaacgagggctgcaccagccaggtgcccagaggcaccctggccgagcacagacagcactgccagcagggcagccagcagagatgccccctgggctgcggcgccaccctggaccccgccgagagagccagacacaactgctacagagagctgcacaacgcctggagcgtgagacaggagagaagaagacccctgctgctgagcctgctgagaagagtgagatggctggaccaggccaccagcgtggtgagaagagagctggccgagctgagcaacttcctggaggaggacaccgccctgctggagggcgccccccaggaggaggccgaggccgcccccgagggcaacgtgggcgccgaggtggtgggcgagcccagagccaacatcccctgcaagtag

SEQ ID NO: 13678 - DNA, 309 bp, synthetic construct; identical to SEQ ID NO: 10517
  source 1..309: mol_type = other DNA; note = Synthetic coding sequence

SEQ ID NO: 13679 - DNA, 1473 bp, synthetic construct; identical to SEQ ID NO: 11468
  source 1..1473: mol_type = other DNA; note = Synthetic coding sequence

SEQ ID NO: 13680 - DNA, 1809 bp, synthetic construct; identical to SEQ ID NO: 10212
  source 1..1809: mol_type = other DNA; note = Synthetic coding sequence

SEQ ID NO: 13681 - DNA, 618 bp, synthetic construct; identical to SEQ ID NO: 11163
  source 1..618: mol_type = other DNA; note = Synthetic coding sequence

SEQ ID NO: 13682 - DNA, 360 bp, synthetic construct; identical to SEQ ID NO: 10375
  source 1..360: mol_type = other DNA; note = Synthetic coding sequence

SEQ ID NO: 13683 - DNA, 1473 bp, synthetic construct
  source 1..1473: mol_type = other DNA; note = Synthetic coding sequence
atgcccatgcccaccgagggcacccccccccccctgagcggcacccccatccccgtgcccgcctacttcagacacgccgagcccggcttcagcctgaagagacccagaggcctgagcagaagcctgcccccccccccccccgccaagggcagcatccccatcagcagactgttcccccccagaacccccggctggcaccagctgcagcccagaagagtgagcttcagaggcgaggccagcgagaccctgcagagccccggctacgaccccagcagacccgagagcttcttccagcagagcttccagagactgagcagactgggccacggcagctacggcgaggtgttcaaggtgagaagcaaggaggacggcagactgtacgccgtgaagagaagcatgagccccttcagaggccccaaggacagagccagaaagctggccgaggtgggcagccacgagaaggtgggccagcacccctgctgcgtgagactggagcaggcctgggaggagggcggcatcctgtacctgcagaccgagctgtgcggccccagcctgcagcagcactgcgaggcctggggcgccagcctgcccgaggcccaggtgtggggctacctgagagacaccctgctggccctggcccacctgcacagccagggcctggtgcacctggacgtgaagcccgccaacatcttcctgggccccagaggcagatgcaagctgggcgacttcggcctgctggtggagctgggcaccgccggcgccggcgaggtgcaggagggcgaccccagatacatggcccccgagctgctgcagggcagctacggcaccgccgccgacgtgttcagcctgggcctgaccatcctggaggtggcctgcaacatggagctgccccacggcggcgagggctggcagcagctgagacagggctacctgccccccgagttcaccgccggcctgagcagcgagctgagaagcgtgctggtgatgatgctggagcccgaccccaagctgagagccaccgccgaggccctgctggccctgcccgtgctgagacagcccagagcctggggcgtgctgtggtgcatggccgccgaggccctgagcagaggctgggccctgtggcaggccctgctggccctgctgtgctggctgtggcacggcctggcccaccccgccagctggctgcagcccctgggcccccccgccaccccccccggcagccccccctgcagcctgctgctggacagcagcctgagcagcaactgggacgacgacagcctgggccccagcctgagccccgaggccgtgctggccagaaccgtgggcagcaccagcacccccagaagcagatgcacccccagagacgccctggacctgagcgacatcaacagcgagccccccagaggcagcttccccagcttcgagcccagaaacctgctgagcctgttcgaggacaccctggaccccacctag

SEQ ID NO: 13684 - DNA, 1293 bp, synthetic construct
  source 1..1293: mol_type = other DNA; note = Synthetic coding sequence
atgctggagagatggcaccagctgcagcccagaagagtgagcttcagaggcgaggccagcgagaccctgcagagccccggctacgaccccagcagacccgagagcttcttccagcagagcttccagagactgagcagactgggccacggcagctacggcgaggtgttcaaggtgagaagcaaggaggacggcagactgtacgccgtgaagagaagcatgagccccttcagaggccccaaggacagagccagaaagctggccgaggtgggcagccacgagaaggtgggccagcacccctgctgcgtgagactggagcaggcctgggaggagggcggcatcctgtacctgcagaccgagctgtgcggccccagcctgcagcagcactgcgaggcctggggcgccagcctgcccgaggcccaggtgtggggctacctgagagacaccctgctggccctggcccacctgcacagccagggcctggtgcacctggacgtgaagcccgccaacatcttcctgggccccagaggcagatgcaagctgggcgacttcggcctgctggtggagctgggcaccgccggcgccggcgaggtgcaggagggcgaccccagatacatggcccccgagctgctgcagggcagctacggcaccgccgccgacgtgttcagcctgggcctgaccatcctggaggtggcctgcaacatggagctgccccacggcggcgagggctggcagcagctgagacagggctacctgccccccgagttcaccgccggcctgagcagcgagctgagaagcgtgctggtgatgatgctggagcccgaccccaagctgagagccaccgccgaggccctgctggccctgcccgtgctgagacagcccagagcctggggcgtgctgtggtgcatggccgccgaggccctgagcagaggctgggccctgtggcaggccctgctggccctgctgtgctggctgtggcacggcctggcccaccccgccagctggctgcagcccctgggcccccccgccaccccccccggcagccccccctgcagcctgctgctggacagcagcctgagcagcaactgggacgacgacagcctgggccccagcctgagccccgaggccgtgctggccagaaccgtgggcagcaccagcacccccagaagcagatgcacccccagagacgccctggacctgagcgacatcaacagcgagccccccagaggcagcttccccagcttcgagcccagaaacctgctgagcctgttcgaggacaccctggaccccacctag

SEQ ID NO: 13685 - DNA, 666 bp, synthetic construct; identical to SEQ ID NO: 10386
  source 1..666: mol_type = other DNA; note = Synthetic coding sequence

SEQ ID NO: 13686 - DNA, 2232 bp, synthetic construct; identical to SEQ ID NO: 13489
  source 1..2232: mol_type = other DNA; note = Synthetic coding sequence

SEQ ID NO: 13687 - DNA, 579 bp, synthetic construct
  source 1..579: mol_type = other DNA; note = Synthetic coding sequence
atgagcaccgccgccgtgcccgagctgaagcagatcagcagagtggaggccatgagactgggccccggctggagccacagctgccacgccatgctgtacgccgccaaccccggccagctgttcggcagaatccccatgagattcagcgtgctgatgcagatgagattcgacggcctgctgggcttccccggcggcttcgtggacagaagattctggagcctggaggacggcctgaacagagtgctgggcctgggcctgggctgcctgagactgaccgaggccgactacctgagcagccacctgaccgagggcccccacagagtggtggcccacctgtacgccagacagctgaccctggagcagctgcacgccgtggagatcagcgccgtgcacagcagagaccacggcctggaggtgggccccccccccggccccagacccccccccagaggcctggccctggccccctggaaggcccccatgggcgccggccccagagccggccccgccgtgcaccccgagggccccagcagaagactgccccagctgcccgagcagagactgagagagcacggctag

SEQ ID NO: 13688 - DNA, 2553 bp, synthetic construct
  source 1..2553: mol_type = other DNA; note = Synthetic coding sequence
atgctggagagaagagccctgctgtggcagagagaggccggccccggctggggcgacagagccagagccggcaccggcggcgccggcggcggctgcggcggcgccatggccgagagaggccccgccttctgcggcctgtacgacaccagcagcctgctgagatactgcaacgacgacaacctgagcggcaccagcggcatggaggtggacgacagagtgagcgccctggagcagagactgcagctgcaggaggacgagctggccgtgctgaaggccgccctggccgacgccctgagaagactgagagcctgcgaggagcagggcgccgccctgagagccagaggcacccccaagggcagagccccccccagactgggcaccaccgccagcgtgtgccagctgctgaagggcctgcccaccagaacccccctgaacggcagcggcccccccagaagagtgggcggctacgccaccagccccagcagccccaagaaggaggccaccagcggcagaagcagcgtgagaagatacctgagccccgagagactggccagcgtgagaagagaggaccccagaagcagaaccaccagcagcagcagcaactgcagcgccaagaaggagggcaagaccaaggaggtgatcttcagcgtggaggacggcagcgtgaagatgttcctgagaggcagacccgtgcccatgatgatccccgacgagctggcccccacctacagcctggacaccagaagcgagctgcccagctgcagactgaagctggagtgggtgtacggctacagaggcagagactgcagagccaacctgtacctgctgcccaccggcgagatcgtgtacttcgtggccagcgtggccgtgctgtacagcgtggaggagcagagacagagacactacctgggccacaacgacgacatcaagtgcctggccatccaccccgacatggtgaccatcgccaccggccaggtggccggcaccaccaaggagggcaagcccctgcccccccacgtgagaatctgggacagcgtgagcctgagcaccctgcacgtgctgggcctgggcgtgttcgacagagccgtgtgctgcgtgggcttcagcaagagcaacggcggcaacctgctgtgcgccgtggacgagagcaacgaccacatgctgagcgtgtgggactgggccaaggagaccaaggtggtggacgtgaagtgcagcaacgaggccgtgctggtggccaccttccaccccaccgaccccaccgtgctgatcacctgcggcaagagccacatctacttctggaccctggagggcggcagcctgagcaagagacagggcctgttcgagaagcacgagaagcccaagtacgtgctgtgcgtgaccttcctggagggcggcgacgtggtgaccggcgacagcggcggcaacctgtacgtgtggggcaagggcggcaacagaatcacccaggccgtgctgggcgcccacgacggcggcgtgttcggcctgtgcgccctgagagacggcaccctggtgagcggcggcggcagagacagaagagtggtgctgtggggcagcgactacagcaagctgcaggaggtggaggtgcccgaggacttcggccccgtgagaaccgtggccgagggccacggcgacaccctgtacgtgggcaccaccagaaacagcatcctgcagggcagcgtgcacaccggcttcagcctgctggtgcagggccacgtggaggagctgtggggcctggccacccaccccagcagagcccagttcgtgacctgcggccaggacaagctggtgcacctgtggagcagcgacagccaccagcccctgtggagcagaatcatcgaggaccccgccagaagcgccggcttccaccccagcggcagcgtgctggccgtgggcaccgtgaccggcagatggctgctgctggacaccgagacccacgacctggtggccatccacaccgacggcaacgagcagatcagcgtggtgagcttcagccccgacggcgcctacctggccgtgggcagccacgacaacctggtgtacgtgtacaccgtggaccagggcggcagaaaggtgagcagactgggcaagtgcagcggccacagcagcttcatcacccacctggactgggcccaggacagcagctgcttcgtgaccaacagcggcgactacgagatcctgtactgggaccccgccacctgcaagcagatcaccagcgccgacgccgtgagaaacatggagtgggccaccgccacctgcgtgctgggcttcggcgtgttcggcatctggagcgagggcgccgacggcaccgacatcaacgccgtggccagaagccacgacggcaagctgctggccagcgccgacgacttcggcaaggtgcacctgttcagctacccctgctgccagcccagagccctgagccacaagtacggcggccacagcagccacgtgaccaacgtggccttcctgtgggacgacagcatggccctgaccaccggcggcaaggacaccagcgtgctgcagtggagagtggtgtag

SEQ ID NO: 13689 - DNA, 2502 bp, synthetic construct; identical to SEQ ID NO: 12300
  source 1..2502: mol_type = other DNA; note = Synthetic coding sequence

SEQ ID NO: 13690 - DNA, 3351 bp, synthetic construct; identical to SEQ ID NO: 10541
  source 1..3351: mol_type = other DNA; note = Synthetic coding sequence

SEQ ID NO: 13691 - DNA, 2055 bp, synthetic construct; identical to SEQ ID NO: 10439
  source 1..2055: mol_type = other DNA; note = Synthetic coding sequence

SEQ ID NO: 13692 - DNA, 378 bp, synthetic construct
  source 1..378: mol_type = other DNA; note = Synthetic coding sequence
atggccgacgaggagctggaggccctgagaagacagagactggccgagctgcaggccaagcacggcgaccccggcgacgccgcccagcaggaggccaagcacagagaggccgagatgagaaacagcatcctggcccaggtgctggaccagagcgccagagccagactgagcaacctggccctggtgaagcccgagaagaccaaggccgtggagaactacctgatccagatggccagatacggccagctgagcgagaaggtgagcgagcagggcctgatcgagatcctgaagaaggtgagccagcagaccgagaagaccaccaccgtgaagttcaacagaagaaaggtgatggacagcgacgaggacgacgactactag

SEQ ID NO: 13693 - DNA, 3327 bp, synthetic construct; identical to SEQ ID NO: 10204
  source 1..3327: mol_type = other DNA; note = Synthetic coding sequence

SEQ ID NO: 13694 - DNA, 594 bp, synthetic construct; identical to SEQ ID NO: 11983
  source 1..594: mol_type = other DNA; note = Synthetic coding sequence

SEQ ID NO: 13695 - DNA, 906 bp, synthetic construct; identical to SEQ ID NO: 10199
  source 1..906: mol_type = other DNA; note = Synthetic coding sequence

SEQ ID NO: 13696 - DNA, 990 bp, synthetic construct; identical to SEQ ID NO: 10497
  source 1..990: mol_type = other DNA; note = Synthetic coding sequence

SEQ ID NO: 13697 - DNA, 1263 bp, synthetic construct
  source 1..1263: mol_type = other DNA; note = Synthetic coding sequence
atgctgagcagcttccccgtggtgctgctggagaccatgagccactacaccgacgagcccagattcaccatcgagcagatcgacctgctgcagagactgagaagaaccggcatgaccaagcacgagatcctgcacgccctggagaccctggacagactggaccaggagcacagcgacaagttcggcagaagaagcagctacggcggcagcagctacggcaacagcaccaacaacgtgcccgccagcagcagcaccgccaccgccagcacccagacccagcacagcggcatgagccccagccccagcaacagctacgacaccagcccccagccctgcaccaccaaccagaacggcagagagaacaacgagagactgagcaccagcaacggcaagatgagccccaccagataccacgccaacagcatgggccagagaagctacagcttcgaggccagcgaggaggacctggacgtggacgacaaggtggaggagctgatgagaagagacagcagcgtgatcaaggaggagatcaaggccttcctggccaacagaagaatcagccaggccgtggtggcccaggtgaccggcatcagccagagcagaatcagccactggctgctgcagcagggcagcgacctgagcgagcagaagaagagagccttctacagatggtaccagctggagaagaccaaccccggcgccaccctgagcatgagacccgcccccatccccatcgaggaccccgagtggagacagacccccccccccgtgagcgccaccagcggcaccttcagactgagaagaggcagcagattcacctggagaaaggagtgcctggccgtgatggagagctacttcaacgagaaccagtaccccgacgaggccaagagagaggagatcgccaacgcctgcaacgccgtgatccagaagcccggcaagaagctgagcgacctggagagagtgaccagcctgaaggtgtacaactggttcgccaacagaagaaaggagatcaagagaagagccaacatcgaggccgccatcctggagagccacggcatcgacgtgcagagccccggcggccacagcaacagcgacgacgtggacggcaacgactacagcgagcaggacgacagcaccagccacagcgaccaccaggaccccatcagcctggccgtggagatggccgccgtgaaccacaccatcctggccctggccagacagggcgccaacgagatcaagaccgaggccctggacgacgactag

SEQ ID NO: 13698 - DNA, 1263 bp, synthetic construct; identical to SEQ ID NO: 13697
  source 1..1263: mol_type = other DNA; note = Synthetic coding sequence

SEQ ID NO: 13699 - DNA, 915 bp, synthetic construct
  source 1..915: mol_type = other DNA; note = Synthetic coding sequence
atgctgagcagcttccccgtggtgctgctggagaccatgagccactacaccgacgagcccagattcaccatcgagcagatcgacctgctgcagagactgagaagaaccggcatgaccaagcacgagatcctgcacgccctggagaccctggacagactggaccaggagcacagcgacaagttcggcagaagaagcagctacggcggcagcagctacggcaacagcaccaacaacgtgcccgccagcagcagcaccgccaccgccagcacccagacccagcacagcggcatgagccccagccccagcaacagctacgacaccagcccccagccctgcaccaccaaccagaacggcagagagaacaacgagagactgagcaccagcaacggcaagatgagccccaccagataccacgccaacagcatgggccagagaagctacagcttcgaggccagcgaggaggacctggacgtggacgacaaggtggaggagctgatgagaagagacagcagcgtgatcaaggaggagatcaaggccttcctggccaacagaagaatcagccaggccgtggtggcccaggtgaccggcatcagccagagcagaatcagccactggctgctgcagcagggcagcgacctgagcgagcagaagaagagagccttctacagatggtaccagctggagaagaccaaccccggcgccaccctgagcatgagacccgcccccatccccatcgaggaccccgagtggagacagacccccccccccgtgagcgccaccagcggcaccttcagactgagaagaggcagcagattcacctggagaaaggagtgcctggccgtgatggagagaaacacctggagccccgagagaagaatggaggagaacaagtggaagctgctgagcgccggctag

SEQ ID NO: 13700 - DNA, 1332 bp, synthetic construct
  source 1..1332: mol_type = other DNA; note = Synthetic coding sequence
atgctgagcagcttccccgtggtgctgctggagaccatgagccactacaccgacgagcccagattcaccatcgagcagatcgacctgctgcagagactgagaagaaccggcatgaccaagcacgagatcctgcacgccctggagaccctggacagactggaccaggagcacagcgacaagttcggcagaagaagcagctacggcggcagcagctacggcaacagcaccaacaacgtgcccgccagcagcagcaccgccaccgccagcacccagacccagcacagcggcatgagccccagccccagcaacagctacgacaccagcccccagccctgcaccaccaaccagaacggcagagagaacaacgagagactgagcaccagcaacggcaagatgagccccaccagataccacgccaacagcatgggccagagaagctacagcttcgaggccagcgaggaggacctggacgtggacgacaaggtggaggagctgatgagaagagacagcagcgtgatcaaggaggagatcaaggccttcctggccaacagaagaatcagccaggccgtggtggcccaggtgaccggcatcagccagagcagaatcagccactggctgctgcagcagggcagcgacctgagcgagcagaagaagagagccttctacagatggtaccagctggagaagaccaaccccggcgccaccctgagcatgagacccgcccccatccccatcgaggaccccgagtggagacagacccccccccccgtgagcgccaccagcggcaccttcagactgagaagaggcagcagattcacctggagaaaggagtgcctggccgtgatggagagctacttcaacgagaaccagtaccccgacgaggccaagagagaggagatcgccaacgcctgcaacgccgtgatccagaagcccggcaagaagctgagcgacctggagagagtgaccagcctgaaggtgtacaactggttcgccaacagaagaaaggagatcaagagaagagccaacatcgccgccatcctggagagccacggcatcgacgtgcagagccccggcggccacagcaacagcgacgacgtggacggcaacgactacagcgagcaggacacctggcaggtgagaaacggcgaggaggaggagggcagaagcagcgagggcggcagagaggccgagaaggacgacagcaccagccacagcgaccaccaggaccccatcagcctggccgtggagatggccgccgtgaaccacaccatcctggccctggccagacagggcgccaacgagatcaagaccgaggccctggacgacgactag

SEQ ID NO: 13701 - DNA, 357 bp, synthetic construct
  source 1..357: mol_type = other DNA; note = Synthetic coding sequence
atgctgagcagcttccccgtggtgctgctggagaccatgagccactacaccgacgagcccagattcaccatcgagcagatcgacctgctgcagagactgagaagaaccggcatgaccaagcacgagatcctgcacgccctggagaccctggacagactggaccaggagcacagcgacaagttcggcagaagaagcagctacggcggcagcagctacggcaacagcaccaacaacgtgcccgccagcagcagcaccgccaccgccagcacccagacccagcacagcggcatgagccccagccccagcaacagctacgacaccagcccccagccctgcaccaccaaccagaacggctag

SEQ ID NO: 13702 - DNA, 1332 bp, synthetic construct; identical to SEQ ID NO: 13700
  source 1..1332: mol_type = other DNA; note = Synthetic coding sequence

SEQ ID NO: 13703 - DNA, 1218 bp, synthetic construct
  source 1..1218: mol_type = other DNA; note = Synthetic coding sequence
atgctgagcagcttccccgtggtgctgctggagaccatgagccactacaccgacgagcccagattcaccatcgagcagatcgacctgctgcagagactgagaagaaccggcatgaccaagcacgagatcctgcacgccctggagaccctggacagactggaccaggagcacagcgacaagttcggcagaagaagcagctacggcggcagcagctacggcaacagcaccaacaacgtgcccgccagcagcagcaccgccaccgccagcacccagacccagcacagcggcatgagccccagccccagcaacagctacgacaccagcccccagccctgcaccaccaaccagaacggcagagagaacaacgagagactgagcaccagcaacggcaagatgagccccaccagataccacgccaacagcatgggccagagaagctacagcttcgaggccagcgaggaggacctggacgtggacgacaaggtggaggagctgatgagaagagacagcagcgtgatcaaggaggagatcaaggccttcctggccaacagaagaatcagccaggccgtggtggcccaggtgaccggcatcagccagagcagaatcagccactggctgctgcagcagggcagcgacctgagcgagcagaagaagagagccttctacagatggtaccagctggagaagaccaaccccggcgccaccctgagcatgagacccgcccccatccccatcgaggaccccgagtggagacagacccccccccccgtgagcgccaccagcggcaccttcagactgagaagaggcagcagattcacctggagaaaggagtgcctggccgtgatggagagctacttcaacgagaaccagtaccccgacgaggccaagagagaggagatcgccaacgcctgcaacgccgtgatccagaagcccggcaagaagctgagcgacctggagagagtgaccagcctgaaggtgtacaactggttcgccaacagaagaaaggagatcaagagaagagccaacatcgccgccatcctggagagccacggcatcgacgtgcagagccccggcggccacagcaacagcgacgacgtggacggcaacgactacagcgagcaggacacctggcaggtgagaaacggcgaggaggaggagggcagaagcagcgagggcggcagagaggccgagaaggtggaggaggagagaagaatctag

SEQ ID NO: 13704 - DNA, 1380 bp, synthetic construct
  source 1..1380: mol_type = other DNA; note = Synthetic coding sequence
atgacggccgaggagatgaaggcgacggaatctggtgcccagagtgcaccacttccaatggaaggagtcgatatatctccaaaacaggacgaaggcgtacttaaagtcatcaaacgagaaggcacaggtacagaaatgcctatgatcggagatagggtttttgtgcattacaccgggtggttactggatggcaccaaatttgacagtagcctcgaccggaaagacaaatttagtttcgatctgggaaaaggagaggttatcaaggcatgggacatcgcaatcgcaactatgaaagtcggtgaggtgtgtcatatcacttgtaaaccagagtacgcctatggaagcgccggcagcccccctaagatcccccccaacgctacgttggtttttgaagtggagctctttgagttcaagggagaagatctgactgaggaggaagacggcggcatcattcggcgcattcagacccgaggtgagggctatgccaaaccgaacgaaggcgctatcgtggaagtagccctggaggggtattataaggacaaacttttcgaccagagagaactccggttcgagatcggtgagggcgagaacctagacctcccctatggcctggagagggccatacagcgcatggaaaagggtgaacacagcatagtctacctgaaaccatcatatgctttcgggtcagtcggtaaggagaaattccagatcccacctaatgcagaactcaagtacgaactgcatctgaagtcattcgaaaaagctaaggaaagctgggaaatgaattctgaagagaagctagaacagtcaaccatcgtgaaggagagaggaacagtctatttcaaagagggaaagtacaagcaggcactgctgcagtacaagaaaatcgtaagctggcttgaatacgagtctagcttttccaatgaggaagctcagaaagcccaggcgttgcggctggcctcacaccttaatctggccatgtgccacctgaaactgcaggcgttttctgctgctattgagtcttgcaacaaggcccttgagctcgactccaataatgaaaagggcctcttccgaaggggtgaggcccatttagccgtcaacgattttgaactggcccgcgctgactttcagaaagtgctgcagctctatccaaataacaaggcagccaaaactcagctagcagtctgccaacagagaattaggcgacagctggctagagagaagaaactatacgcaaatatgtttgagaggctcgccgaggaagagaacaaagccaaggccgaagcctcgtctggcgatcaccccacagataccgaaatgaaagaggaacaaaagtctaatactgcagggtcacagtcacaggtggagacagaagcctag

SEQ ID NO: 13705 - DNA, 477 bp, synthetic construct
  source 1..477: mol_type = other DNA; note = Synthetic coding sequence
atggaaccacctgaaggagctggcacaggagagatcgtgaaagaggcggaagtcccgcaggctgccttgggagtcccagcccagggaacaggggataacggccacaccccagtggaagaagaggtcgggggtatccctgttcccgccccagggctgctccaggtgactgagcgaaggcagcctctgagtagtgtcagctcgcttgaggtgcattttgatttactggatctgaccgaactgactgacatgtcagatcaggaactggccgaagtattcgctgacagcgacgacgagaacctgaacaccgaatccccagctggcttgcatcccttacctcgcgctggttacctacgctccccttcatggacaagaacccgcgcggaacagtcgcatgaaaaacaacccctgggggacccggagcggcaggccaccgtccttgatacttttctaacggtggagagaccacaggaggattag

SEQ ID NO: 13706 - DNA, 954 bp, synthetic construct
  source 1..954: mol_type = other DNA; note = Synthetic coding sequence
atggcaagtgtgattccggcctctaacaggtccatgcgcagcgatcggaatacatacgttggcaagcgcttcgtccacgtgaagaacccctatctggatctcatggacgaggacatactgtaccacctcgacttagggactaagacgcacaacctccctgctatgtttggcgacgtgaagttcgtgtgtgtcggggggagcccaaatagaatgaaggctttcgcactgttcatgcataaggagctcggctttgaagaggccgaagaggacattaaggacatctgtgcagggactgacaggtactgtatgtacaagactgggccagttctggccatttcacacggcatgggcatcccttccatcagtatcatgctccatgaactgatcaaactgcttcatcatgccaggtgctgtgacgtgaccattatacgcattgggacctctgggggcatagggatcgctcccggaacagtggtgatcacagacatagcagtcgattcgttcttcaagccaagattcgagcaagtgatactcgacaacattgtcacgcggagcacagagctggataaggagctgagcgaggaactatttaactgctcaaaggagatccctaacttccctactctcgtgggtcatacgatgtgtacctacgacttttatgagggacaggggagactcgatggggctctgtgtagtttttctagggagaaaaagttggactatctgaagcgcgcttttaaagccggcgtccgtaatattgaaatggagtctactgtgtttgctgccatgtgtgggctgtgcggactcaaagcagctgttgtttgtgtgacgctcctcgatcggctggactgtgatcaaattaatctgccccatgacgtgctggtagagtaccaacaaagaccacagctcctgattagcaatttcatccggcgccgcctggggttgtgtgattag

SEQ ID NO: 13707 - DNA, 1095 bp, synthetic construct
  source 1..1095: mol_type = other DNA; note = Synthetic coding sequence
atgtccgaagtggaagctgccgccggggccaccgccgtgccagctgctactgtgccggcaacagcggctggcgtcgtggcagtagtcgttcccgttccagcaggcgaaccccagaaggggggaggagcaggcggtggcggcggtgcagcgagtggacccgccgctgggacccctagcgcgcccggtagcagaacgcccggaaatccagcaacggccgttagcggcaccccggcaccccctgcccgctctcaggctgacaaacccgttctggcgattcaggtgcttggaacagtgaaatggtttaatgtcagaaatgggtacggcttcatcaataggaacgataccaaagaggacgtttttgttcaccaaaccgcaataaagcggaacaatccccgaaaattcctgcgttccgttggagacggcgagacagtggagtttgatgtggtggaaggcgagaagggcgcggaggctaccaatgttacaggaccagggggagtcccagtaaaaggctcccgctacgccccaaaccggcgtaagtcccgaaggttcataccacggcccccaagcgttgcaccaccacctatggtggcagagataccctcagcgggcaccggaccaggttccaagggcgaaagagccgaagactctggccagaggcccagacgctggtgtccacctcctttcttctaccgccggaggttcgttaggggtccaaggccccctaatcagcagcaacctatagaggggactgacagggtggagcccaaggagacagcacccttggagggccaccaacagcagggagacgagagagtgcctcccccacgattccgcccaaggtatcgtagaccttttcgccctagaccaagacagcaaccaacgacagaaggcggtgatggcgagacaaagccttcgcagggtccagccgacggctcccggcctgagccgcagaggccaaggaaccggccatactttcagagacgacgacagcaggctccaggcccccaacaggcaccaggccctagacagcccgcggcacctgaaacctcggcaccagtgaattcgggggatcccactacaaccatcctggaatag

SEQ ID NO: 13708 - DNA, 5706 bp, synthetic construct
  source 1..5706: mol_type = other DNA; note = Synthetic coding sequence
atggcaacattcagaaataatcatatgaagacaaaagcgagtgtaagaaagtcgttttccgaggatgtcttccagtccgtgaagtccctgctgcagtcccagaaggagctgtgtagtgtgactgccgaagattgtctccaacaggacgagcacgcaaacctgacagaggtgaccttcttagggtttaacgaagagacagacgctgcccacattcaggacctggccgccgtgtccctagaactgccagacatccttaatagcctgcacttttgctcactgaatgaaaatgagattatttgtatgaagaacatcaataagccactggatattagttctgaccctttaaaccaatctcatccatcggggatgctgtgtgtaatgcgagtgtcccctaccagtccgcgcctgaggatcgatttcatcttttcactactgagcaagtacgccaccggcatccggtacaccctcgataccttcctgcatcagaagcaccagcttgaaacaacggacgaggacgatgacgataccaatcagagcgtttctagtatagaggacgactttgtcacagccttcgagcatttggaggaagaagaaactagtaaaccttacaacgatggtatgaacatcacagtcctccgctcccagtgtgatgccgcttcccagaccgtaaccggccatcacttggaaactcacgacctgaagatcctcatttcaagcggacaacagaagagtctggcaaaaccctccacaagtagcgtgaacgtgcttggccacaaagagctgccatcagttaagacatctgtgacaacctccatcagtgagccttggactcagagatctttctatcgttcaagcaatgcttctgataaagacagtgacctgcagaagacctttttcagctctagccccgcctacagctcagaaagcgagtgttcttccccctctcctgtcatcttcctcgacgaggaaggctaccagaagtccttaaaggccaagcttgaattacccaaaatccccgtgatgaaagatgacatcgaggatagcgatagtgaggtgtctgaatttttcgactctttcgaccagtttgatgagctcgagcaaacactggaaacctgcttgtttaataaagatcccgttatcgggaaaagctctcaaagaaaagggcacaaacatggaaaatcatgcatgaatccacagaagttcaagtttgacaggcccgccctgccggctaacgtccgtaaacccacccccaggaaacctgaaagcccatacggaaacctttgcgacgcccccgattcccctcggcccgtgaaggcgtcaagggaagattctggacttttctccccaatcaggagttcagcattctcccccctgggagggtgcacaccagctgagtgcttttgccagaccgatatcgggggcgaccggatacacgagaaccacgattctgtctattacacttacgaagactacgccaagtctatttcctgtgaggtgctggggtccgtgttaaggacacatcatactaatacattgtcgaacattaacagcattaaacatggcgagaataagacggttactttcaagcacggcaacctggaccaaaagaataagtccaagaacaagtcgttgatgatcaaggactcaatccagaaattcgccgccgacctggtggaaaaatcattcgggtccgcatttaaggacctgcagaagggcgtgagctcctgcaccaatgccctgtatcacctcgctatcaagctgacatcctcagtgctccagatggccttcgatgaattgagacgccagagggcattttctctgaaagaaagggccatcagtggtcttgctaatttcctggtctccgaagcactttcaaacgcactaaaagacctgcagtacgttaagaaacagatctttacaaatacggtagcgcggttcgccgctgacctcgctgaggaacttgttttcgagggcattatggaggtttgccagttcagctacccccagactccagctagccctcagtgtgggtcatttgattttgaggataaagtcgtcaaactgtatgccaaagatctctcagagtccgttatacaggaggcgttcatagagctgtcccaggtcgacgttacttttacaactaaggcagccgtctcagttagcactgataatattaagtatgtcagcgccgaatccgtggtgccttcgacccaggctgtgacattttctcctagcttccacaaccaggccattatggtgacgaagccagttcaagagtataagaaggaatataccgttcagcaggccctgttctgcacttctggtatcgtgacctctattccggttccgctcgccgggtccgctctcctgccttatcatatttccagcaccgcatgccaagccaaggcccacctatcatcagacgactccaattccaacggagactccgctcaagtgcatattgctactaaaaatcgtgaagaaaaagcagcctgcctcagaaacatatgcctaccatcagaacataaccccgggaaccagaacgactttaaacctaccaatgacgacatcgagatgcagtcttcaagcaaactcccaaacgatcccgctattattagtaatttttcagcagcggtcgtgcacacgatagtcaatgaaacgctggaatccatgacaagcttggaggtgacgaaaatggtcgacgagaggacagattatctaactaaatctctcaaggagaagaccccaccttttagtcactgtgatcaagctgttctgcagtgctctgaagccagctcaaataaagacatgttcgctgacagactgtccaagagcatcattaagcatagcattgataaaagcaagtcggttatacctaatatagataaaaatgctgtctacaaggaatctctgccggtgtccggggaagagtctcagctgaccccagaaaagagtcctaaattccctgacagccagaaccagctcacacattgctccctttctgcagccaaggattgcgtcccagagtgtaaagtgagtatggtgcacggatcctctttagagacgctcccgagttgcccagcggtgactggacagaagtcagatctgaaagaatcagccaaggatcagcctttgaagaagcataacttgaattcaacctcgctggaggcgctctcattcggccaagaaaaccctttccctcactcgcatacttttagctctaccgccttgacatgtgtcgatggtctccacgtcgaggacaagcagaaggtaagagaccgcaacgttatccccgatacgcctccttctacccctttggtacccagtcgcgcatcctctgagtgggatatcaaaaaactgactaaaaagttgaagggcgagctggctaaggaatttgctccggccacccccccttccacacctcataacagcagcgtcgggtccctctccgagaacgagcagaacacgatagagaaagaggagtttatgctgaagctgatgcgaagcttatccgaagaggtcgagagttcagaatcaggagaactgccagaagtcgacgtgaagagtgaacactccggcaagaaagtgcaattcgcggaagctctggcaacacacatcctgtccttggccactgagatggcggcctcccatctggataacaaaatcatccaggaaccaaaagttaagaacccctgcctgaatgtacaatcccagcggtcagtctcaccaacattcctcaatcctagtgacgaaaacctaaagactctctgtaattttgctggagacttggccgcagaggtgattaccgaggctgaaaagatcgctaaggtgcgtaactgcatgctctttaagcagaagaaaaatagctgttatgccgatggtgatgaagattataaggttgaagagaaactcgacatcgaggccgtcgtccatcctagggaggtggacccatttatattaagcctgcctcctagtagctgcatgtctggactgatgtataagtacccatcctgcgaatccgtgaccgatgagtatgccggtcatctgatccaaattttgaaacaggagggagggaacagcgaactcatcatggaccagtatgcgaaccggttggcctataggtcagtaaagagcggactacaggaagcggcaaaaaccaccaaagtacagtgtaactcgcggatgtttccagtgccctcttcccaggttaagaccaataaggaactgctgatgttctccaataaagaacaccatcaagaggccgacaaaaaacggcagtcgaagcgaaatgagggctacttctgtaagaatcagacatgtgagcgaacccttgatccctaccgcaatgaagtgagtcagctgtactccttttccacgtcgctagtgcacagcatcactaaggatgccaaggaggagctcactgcatcacttgtgggcctccccaagtctttgactgattcatgtctgttcgagaaatctgggtacgaggaagacaacgagtgccatgtcaccccagagctgcctaagtccctgcagccaagctcacagaatcaccggttttaccattccactggttctctgaatggctatggctgcggagacaacgtggttcaggcagtggaacaatacgccaagaaagttgtcgatgatacactggaacttaccctgggttccacagtcttccgggtgtccgaaacaacgaagtctgctgatcgcgtgacttatgccgagaagcttagtcctttgactgggcaagcctgccggtattgtgatctcaaggagctgcacaattgcactgggaattcttcccagcacttctttagacagggatctttggcctcgagcaaaccagccagcaatccaaagttctcatcccgctatcagaagtctaggatatttcatctgagcgtgccccagattcacgtcaacctggataagaaagctgttttagccgaaaagatcgtcgccgaggcaatagaaaaggcagaaagggagctgtccagcacatcgctggcagcagattcgggtattgggcaagagggagcttcttttgctgagagcctcgccacagaaacaatgaccgctgcagtcacgaatgtgggtcacgcggtctctagctcaaaggaaatcgaggatttccaaagcaccgaatcagtgtcctctcagcagatgaacttgtctattggcgatgactctactggttcttggtcaaacctttcttttgaagatgagcatcaggatgagtcttcatcctttcaccacctctcagagagcaatggcaattccagtagttggagttccctgggtttagaaggtgacctgtacgaggataatctgtcctttccgaccagcgactctgatggccccgacgacaaagatgaggagcatgaagacgaagttgaagggctggggcaggacggcaagaccttgttgatcaccaacattgatatggagccgtgcactgtcgacccccagctgcggatcatcctgcagtggcttatagcctctgaggccgaagtggccgaactttactttcacgactcagctaacaaagaattcatgctgctgagcaagcaactgcaggaaaagggatggaaagttggcgatttacttcaggccgttctgcagtactatgaggttatggagaaggcaagttccgaggagcggtgtaaatcattgttcgactggttgcttgaaaacgcctag

SEQ ID NO: 13709 - DNA, 417 bp, synthetic construct
  source 1..417: mol_type = other DNA; note = Synthetic coding sequence
atggccgaactgcagcagttgagggttcaggaagcagtcgagtcaatggtcaagtcgctcgaaagagagaacattcggaagatgcagggactgatgttcaggtgcagtgcttcctgctgtgaggatagccaggcatccatgaaacaggttcatcagtgtattgagaggtgccatgtgcctcttgctcaggcacaagctctggtgacttctgagctggaaaagtttcaggataggctcgcaaggtgtacgatgcactgtaatgacaaagctaaagatagcatagatgcaggatccaaggaactgcaagttaagcagcagctggactcatgtgtaaccaaatgcgttgatgatcatatgcatctgatcccaacaatgactaaaaaaatgaaagaggcccttctatccattggaaaatag

SEQ ID NO: 13710 - DNA, 1110 bp, synthetic construct
  source 1..1110: mol_type = other DNA; note = Synthetic coding sequence
atgaccttggaggctatcagatattcaaggggatcactgcagattctggaccaactgctcctccctaagcagagtcgctacgaggcagtcggaagtgtgcatcaggcctgggaggcaatccgcgctatgaaggtgcgtggcgcccctgccatcgctttggttggatgtctctcattggccgtcgaattgcaggccggagccggcggccccgggcttgccgccctcgttgcttttgttagggacaaattatctttcctggttacggcccggccaacagccgtcaacatggcgagagcggcgcgcgacttggctgacgtcgctgcaagggaggcggaacgtgagggcgcaaccgaggaggcagttcgggaaagagttatttgttgtactgaagatatgcttgagaaagatctccgcgataatcgttcaattggagacctgggtgctcggcatctgcttgagcgggtcgcgccctcagggggtaaggtgactgtcctcacccactgtaataccggtgcattagctaccgcaggctacggtacggctctgggcgtgatcaggtccctgcacagcttaggtcggcttgaacacgcattctgtaccgaaacgagaccttataaccaaggtgccaggttgacggctttcgaattagtctatgagcagatccccgccacattgatcacggactctatggtcgccgccgccatggcccataggggcgtgtctgccgtggttgtcggtgctgatcgcgtcgtggcaaatggagatacagctaacaaggtggggacctatcagttagccatcgtggccaagcaccatggcattccgttctacgtggctgccccgtcttcctcctgcgacctgcgcttggagactggtaaagaaatcatcatcgaagaaagacccggtcaggaactcacagacgtgaatggggttcgaatcgccgccccagggatcggcgtgtggaaccccgcctttgatgtgacgccgcacgacctgatcactgggggcatcattacagaacttggcgtgttcgccccagaggaactgcggacagccctgaccactactattagcagccgcgacggaacattggacggtcctcaaatgtag

SEQ ID NO: 13711 - DNA, 3660 bp, synthetic construct
  source 1..3660: mol_type = other DNA; note = Synthetic coding sequence
atgatgtccctcagcgtcaggccacagcgacggcttctttcggccagggtgaaccggagtcagagcttcgccggagtactcggtagccatgagagaggccccagatcatttcccgtctttagcccaccgggacctccacgaaagcctcccgcactctctcgggtttcaagaatgttctcagttgcccatcccgcagctaaggtgccccaacccgaaagactggatctagtctacaccgcccttaaaagaggcctcaccgcttatttggaggtgcaccagcaggaacaggagaaacttcagggccagatacgcgagtctaagaggaactcgcgactggggttcctgtatgatttggacaagcaggtgaaaagcattgagagattcctccggagactcgagttccatgcttcaaagattgacgaattgtatgaagcctattgcgtgcaacgacggttaagggacggcgcctacaacatggtgagggcctatactacagggagccccggatctagggaggcccgcgactcactggctgaggccacgagaggtcatagggagtacaccgagagtatgtgtctcctggagagcgaactggaggcacaactgggcgagttccatcttcgcatgaaaggcctcgcaggctttgcaagactgtgtgtgggcgaccagtatgaaatctgtatgaagtacggccgccagaggtggaagctgagaggtcgtattgaagggagcggtaagcaggtctgggacagtgaggagacgatcttcctgccgctcctgacagaattcctttctatcaaagtgactgagctcaaagggctagctaaccatgtggtcgtcggcagcgtttcttgcgagaccaaagatctgttcgcagccttaccccaggttgttgcagtagatatcaacgatttgggaactatcaagttgagcctggaggtgacatggagtcctttcgataaggatgaccagccatctgccgcttccagcgtcaataaagctagcactgtgactaagagattctccacgtactcccaatccccaccagatacaccttctctgcgggagcaggcattctacaacatgcttagacgccaggaggagctagagaatggcaccgcttggagcctctcctctgagtcttcggacgacagttccagtccccagctctccggcactgccagacatagccctgccccacgcccgctcgtgcaacagcccgagccactccctatccaggtggcgtttagacgcccagagaccccgtcttctggacccctggatgaggagggagcggtggcgccagtactggcgaacgggcacgcgccatactctaggactctgagccatattagtgaggcaagcgtcgacgcagccctcgcagaggcttcggtggaggcagtgggtccagaatccctggcttggggccctagtccgccgacccaccccgcacctacccatggcgagcacccctcacccgtccccccagccctggaccccggtcacagtgccactagctccactctcggaacgaccggatcagtgcccaccagtacagatcctgcaccatccgcccatctcgactccgttcacaaatccactgactccgggcctagtgagttacccggccctacgcacacaactaccggcagcacttattctgctattaccactacgcatagcgcccctagtcccctgactcacacaaccactggcagcacacataaaccaattatcagtacactaaccacaacaggaccaactttgaatattattggcccagtccaaactaccacaagtcccactcacacaatgccatcgccaacgcacaccactgcctccccgacgcacactagcacctcccctacccacacgcccacttcaccaacccataagacttctatgtcacctcctacaacgacgtctccaaccccatccggaatgggcttggtgcagacagccacctctcctacgcatccgacgacctctccaacacaccccaccacttctcctatcctaatcaatgtgagcccatctacctccttggagctcgcaacgctaagcagcccaagcaaacatagtgatcccacactccctgggactgattccctgccttgcagccccccagtaagcaactcatatacccaggcagatcctatggctccccgtacacctcatccaagtccagcacacagcagcagaaaacccctgacctcccccgcgcccgacccctccgagtcgaccgtacagtcactgagccctacaccttctccacctacccccgctcctcagcatagcgatctgtgtctagccatggctgtgcaaactcccgtaccaactgccgctggtggctccggcgaccgatcactggaagaggcacttggagcactgatggcagcccttgatgattacagaggccaattcccagaactacagggcctggagcaggaggtgacgcggctcgagtccttattgatgcaaaggcaggggctgacacggtctcgcgcttcatccctgtccattacggtggagcacgcactggaatctttcagttttctgaacgaagatgaggatgaggacaatgacgtccctggagaccgcccacctagttcgccagaggctggcgctgaagacagcatagattccccatcggcaaggcctctcagcaccggctgccccgccctcgatgccgcattggtgcgtcacctgtaccattgcagtcggctgctcctgaagttgggtacattcgggcccctccgctgtcaggaagcctgggctttggaacggttactgcgggaggcacgtgtcctggaggcagtgtgtgagtttagtcgccggtgggagatcccagcctcctccgctcaggaggtcgtgcagttcagtgcaagtcgaccaggctttttgactttctgggaccagtgcacggagaggttatcctgctttctgtgtcctgtcgaacgcgtcttactcactttttgtaaccagtacggtgcccgtctgagtctcagacagcccggcctggctgaggcagtctgcgtgaagtttttggaggatgccctgggacagaagctaccccgacggcctcagcccggaccgggtgagcaactgactgtgttccaattttggtcttttgtggagaccttggacagtcctaccatggaggcatacgtgaccgaaaccgccgaggaggtgcttctggtgcggaacctaaattcagacgatcaggccgtcgtcctcaaagcacttaggctggcacctgaaggacgccttagacgggacgggctgagggctctatctagtttgttggttcacggtaacaataaggtgatggctgccgtgagcactcagctgaggtcactcagtctcggcccaacttttcgtgagagagctttgctgtgcttcctggaccagctggaggacgaagacgtccagactagggtagcaggttgtctggcgctgggctgcattaaagcgccggagggcattgagcctctggtgtatctctgtcagacagatacagaggccgtcagagaagccgcacgtcagtctctgcagcagtgcggtgaagaagggcagtctgcccataggagacttgaggagtccctcgacgccctgcctcgaatcttcggtcccggttctatggcctcgacagccttttag

SEQ ID NO: 13712 - DNA, 1326 bp, synthetic construct
  source 1..1326: mol_type = other DNA; note = Synthetic coding sequence
atggcaagtgttgccgctgcaagagccgtccccgttggaagcggcctgaggggactgcagagaacactgcccctggtcgttatattgggcgcaacgggtacaggaaagtccactctcgcgctgcaactgggccaaaggctcggtggtgaaatcgtaagcgccgactcaatgcaagtctatgaggggctcgacataatcactaataaggtcagcgcacaggagcaaagaatttgccgacaccatatgattagctttgtggatccactggtgacgaattatacggttgtggatttccgaaatagggccaccgcgctcattgaggacatcttcgcaagggacaagatcccaatcgtcgtcggaggtaccaattactatatcgagtcactgctctggaaggtcctcgtcaacaccaaacctcaggaaatggggaccgagaaggtgatcgaccggaaggtggaactggagaaagaagatggcctggttctccacaaacgactgtcacaggtggacccagagatggccgccaagttgcacccccacgacaaacgaaaagtggcacgatctctgcaggtgttcgaagagactggaataagtcactccgaatttttacataggcagcacacagaagagggaggaggtcccctcggcggaccgctaaaattcagcaacccttgcattttgtggctgcacgccgatcaggctgtcctggacgaacgcctggataaacgggtagatgatatgctggcagccggcctccttgaggagctgcgcgactttcacagaagatacaaccagaaaaacgtgtctgagaattcccaggactaccagcatggcatctttcagtctataggtttcaaggagtttcacgagtacctgataacagaagggaaatgtacattggaaacatctaaccagctcctgaagaaaggccctgggcctatcgtgccccccgtctacggcctcgaagtgtccgacgtgtccaagtgggaggagtccgtcctcgagcctgcccttgagatcgtacaatcatttattcagggtcataaaccaacagctactcccattaagatgccttataacgaagccgaaaataagcgcagttaccatctgtgtgacctgtgtgaccggataattatcggtgatagagagtgggccgctcatatcaaaagcaaaagtcacctgaaccagttaaagaaaagacggaggctggacagtgacgctgtcaacactatcgaaagtcaatcggtgtcccctgatcacaacaaggagcccaaggagaagggctcacctggacagaacgaccaggaacttaagtgctcagtgtag

SEQ ID NO: 13713 - DNA, 618 bp, synthetic construct
  source 1..618: mol_type = other DNA; note = Synthetic coding sequence
atggccgaaccccttcaaccagacccaggtgccgccgaagatgccgctgcgcaggctgtcgaaacccccgggtggaaagcccctgaagatgctggaccacagccaggtagctacgaaatccgtcactatgggccggctaaatgggtcagtacatctgtcgagtctatggactgggattcggccatacaaaccggtttcactaagcttaactcatacatccaagggaagaacgagaaggaaatgaagatcaagatgactgccccggtgacaagctatgttgaacctggatctggaccttttagcgagtccacgatcactattagcttatatatcccaagcgaacaacagtttgacccacctaggcccctggagtccgacgtgttcatcgaagaccgggccgaaatgacagtgttcgtcaggtcctttgacggattttcgtccgctcagaagaaccaggaacagctcctgacattggcctccattctcagagaggatggtaaagtgttcgatgagaaggtctattacaccgcaggctataacagccccgtgaagctgctcaatcgaaacaacgaggtttggctgattcagaaaaacgaaccaactaaagagaacgaatag

SEQ ID NO: 13714 - DNA, 624 bp, synthetic construct
  source 1..624: mol_type = other DNA; note = Synthetic coding sequence
atgtcctgcaccatcgaaaaaatcctgaccgatgcaaaaaccctcttggaacggctgcgtgagcacgacgctgccgctgaatctctggtcgatcagagtgcagcgctccacagaagggtggcggctatgcgggaggcaggtactgccttaccggaccagtaccaggaggacgctagtgatatgaaagatatgagcaagtacaagccccatatcctcctatcccaagagaatactcagatccgggacctccaacaggagaaccgggaactgtggattagcttggaggagcaccaagacgcactcgaacttatcatgtccaagtatcgcaaacagatgctccagctaatggtggcgaaaaaagcggtagatgccgagcctgtcctgaaagctcatcagagtcactcagctgaaatcgagtcccaaatcgatcgcatctgcgagatgggagaggttatgcggaaagccgtgcaggttgatgacgaccagttctgcaagatccaggagaagctggcccagttggaactggaaaacaaagagctccgtgaactcttaagcatttcctcagagtcattacaggctaggaaagagaactctatggataccgcctcccaggctatcaagtag

SEQ ID NO: 13715 - DNA, 1032 bp, synthetic construct
  source 1..1032: mol_type = other DNA; note = Synthetic coding sequence
atgaatatccataggagcacaccaatcacaatcgccaggtatgggagaagtcggaataagactcaagatttcgaggaactgtctagtattcggtccgcagagccatcacaaagcttctctcccaacctgggctctccttccccccccgaaacacccaacctgtcacattgcgtgagctgtatcggaaaatatcttctgctcgaacctttagaaggtgaccatgtgtttagggccgtacacctccattcaggagaggaactagtgtgtaaggtgttcgacatctcttgttaccaagaatcgttggctccgtgcttttgtcttagtgctcatagcaatataaatcagataacggaaattatattaggagaaacaaaggcctatgtgttcttcgagcggtcctatggcgatatgcattcattcgttcgcacgtgtaagaaactgcgcgaggaagaagctgccaggctgttttaccagatagcatcagccgttgcccactgccacgacggaggattagtgttaagggacctgaagcttagaaagtttattttcaaggatgaggagcggactagagtgaagctggagtccctggaggacgcctacattttgcgcggcgatgatgactcactatctgacaaacatggctgccccgcttatgtctctcctgaaatcttaaataccagtggcagctattctggtaaagccgccgatgtgtggtccctgggtgtgatgttgtatactatgttggtgggaagatacccatttcatgacatcgaaccgtccagtttgtttagcaaaattagaagagggcaatttaacattcctgagacactgagcccaaaggctaagtgtctgattaggtcaatactgcgacgggagccttctgagaggctgacctcacaggagattctcgaccacccttggttctccacggacttcagcgtctcaaattctgcatatggggcaaaggaagtgtcagaccagctggtccccgacgtcaatatggaagaaaacctcgatcctttcttcaactag

SEQ ID NO: 13716 - DNA, 3048 bp, synthetic construct
  source 1..3048: mol_type = other DNA; note = Synthetic coding sequence
atgagacggtttctcagacctggccatgatcctgttcgcgaacgcctgaagcgagacctgttccaattcaataaaactgtggaacacggtttcccccaccagccatctgctcttgggtacagtcctagcctccgaatactcgccatcggaacaagaagtggcgcgattaagctctacggagctcctggggtggaattcatgggtctccatcaagaaaataacgcagtgacacagatccatctgttgccgggacagtgccagttagtgacgctgctggacgataacagcctgcacctatggtcactgaaggtcaaaggtggtgcgtccgaactccaggaagacgaatcatttaccctgagaggccctcctggcgccgcaccctccgcgacccagataacagtggtattaccccactcctcttgcgagctactgtatttgggcactgagtctggtaacgtgttcgtggtccaactcccggctttccgggcactagaggacaggacaatctcatcagacgctgtgctgcaacggctgcctgaggaagcacggcaccgaagagtttttgaaatggtcgaggctcttcaggaacaccctcgggacccgaaccagatccttattggctattccagaggactcgtggtcatttgggacctgcaaggcagccgggtgttgtatcacttccttagcagtcagcagctagagaacatttggtggcagcgcgacggcagactactcgtttcatgccacagcgatggcagttactgccaatggcctgtttctagcgaggcgcaacagcctgagccactgcggagtctggtcccatatggtcctttcccttgcaaggctattacccgcatcctgtggttgaccaccaggcagggtctccccttcaccatcttccaggggggtatgccccgagcttcctacggcgatagacattgcatttccgtgatccacgatggtcaacagactgcctttgacttcaccagccgggtgattggtttcaccgtcctgacggaagccgaccctgccgctacttttgacgatccatacgcactggtggtgctagcagaggaggaactagtcgtcatcgatctccagacagccggctggccgcccgtgcagttgccatatctggcctccctgcactgctccgcgatcacctgttctcaccacgtgagcaatatccctcttaagttgtgggagaggattatcgctgcaggctctcgccagaacgctcatttctctactatggaatggcctattgatggaggcactagtcttacccccgcgccaccccagagagacctactgctgacaggacatgaggacggaaccgttcggttttgggacgcctcaggagtgtgcctacgtctcctgtataagctctccactgtgcgagttttcctaaccgataccgacccaaacgagaattttagcgcccagggcgaagacgagtggccccctttgcgaaaagtcggctcatttgatccctatagcgatgatccgcgtcttggaattcagaagatttttctttgcaaatatagtggttatctcgctgtggcggggaccgccggccaagttctggtgctcgaactcaacgacgaggcggcagagcaggctgtggagcaggtggaagccgatctcctccaagaccaagaagggtaccgctggaaaggtcacgaaaggctggccgccagatcaggacccgtcaggttcgagccaggcttccaaccattcgttctggtccaatgccagcccccagctgttgtcacaagcctggcgcttcattctgaatggcgtctcgtcgcttttggaaccagccacgggttcggcctcttcgaccatcagcagcggcgccaagtctttgttaaatgtacactacatccctccgaccagctggccctcgagggccccctttcaagagtgaaatctcttaagaagtcactgcgacaatcattcaggcggatgaggagatccagggtgagctcacggaagcggcacccagcgggacctcccggcgaagcccaggagggatccgctaaagccgagcggccaggtctgcagaatatggagcttgccccagtccagaggaagatcgaagcccgaagcgcagaagattccttcactgggttcgtgcgcactctctacttcgcggacacttacctcaaagatagcagtaggcactgcccaagcctctgggccgggacgaatggtgggacaatctatgctttctcgctcagagtacctccagcggagcgccgcatggacgagcctgtgagagcagagcaggcgaaagagattcagctcatgcacagagcacccgttgtcggaatcctcgttttggacggacacagcgtgcccttgcctgaacccctcgaggttgcacatgacctatccaagtcgccggatatgcagggcagtcatcagctactggtagtctcagaagagcagtttaaggtctttactctgcctaaggtctcagccaagctcaagctcaaactcacggccctagaggggtcacgagtgaggagggtcagcgttgcgcattttggcagcaggcgggccgaggattacggagagcaccacctcgccgtgttgaccaatttgggcgatatccaggtagtgagtctccctctgcttaaacctcaagtcagatactcctgtattaggagggaggacgtttccggcatagccagctgtgtgttcaccaagtatggacagggattctacctgatcagcccctcggagttcgagagatttagcctctcaaccaagtggttggtagagccgaggtgccttgtggacagtgcagagacaaaaaaccaccggcccgggaacggagctggccctaaaaaggctccctctagggcgcggaattctgggacacagtctgatggagaggaaaaacagcccgggctggtcatggagagggccttgctgagcgacgaaagagccgccaccggcgttcacatcgagcccccatggggagccgccagtgccatggctgagcagagtgagtggctgtctgtccaggctgcccgatag

SEQ ID NO: 13717 - DNA, 897 bp, synthetic construct
  source 1..897: mol_type = other DNA; note = Synthetic coding sequence
atggccgcagcggagccggcagtgctggctctgcccaattccggagcgggtggagctggtgcaccatctggaaccgtgccagtgctgttttgcttctctgtatttgctaggccatctagcgttcctcacggtgctggttatgaactcctgatacaaaaatttctgagcctgtacggagatcagatcgatatgcaccgtaagtttgtggtacaactgttcgccgaggagtggggccagtatgtggaccttcctaagggtttcgcggtgagcgaacggtgtaaggtgagattagtccccttgcagattcagctgaccacactcggcaacctgactcccagcagcacagtcttcttttgttgtgatatgcaggagagattcaggccagccatcaagtactttggcgacattatctctgtgggccaaagacttttgcagggagcccggattcttgggatcccggtaattgtgacggaacaatatccgaaagggctcggatccacagtgcaggaaattgacctgactggcgttaagcttgtgctccctaaaacgaagttttccatggtcctgcccgaagttgaggctgccctggcggagatccctggagtcaggagcgtcgttctttttggtgtcgaaacccacgtgtgcattcagcagacggccttagaattagtgggaaggggagtcgaggtgcacattgttgccgacgccacaagcagcagaagcatgatggatcgaatgttcgcacttgagcgccttgctagaacggggattatcgtgacaacctccgaagccgtcctgcttcagttggtggctgacaaggaccatcccaagtttaaagaaattcagaacctgattaaagcttcagcccccgaatctggtctcctgagcaaggtatag

SEQ ID NO: 13718 - DNA, 2439 bp, synthetic construct
  source 1..2439: mol_type = other DNA; note = Synthetic coding sequence
atgagcgagcagggggacctgaatcaggctatcgctgaggaaggcggcaccgaacaggagaccgccactcccgagaatgggattgtcaaaagtgaatctctggatgaggaggagaaactggaactgcaacgcagattggaggcacagaaccaggaacggcggaaatcgaagagcggagcaggcaaaggtaaactgaccaggagcctggcagtgtgtgaggaaagctctgcccgaccaggcggagaatcacttcaggaccaggagagcatccaccttcaactgagctctttttccagcttgcaggaggaggataaatctagaaaggatgactcagagcgtgaaaaagaaaaggacaagaacaaagataaaacaagtgagaaaccaaagatcaggatgctgtctaaagattgctcccaggaatatacagattctaccggtatcgacctacatgagttcttgatcaacaccctcaaaaacaattcgcgggacaggatgattcttttgaaaatggagcaggaaataatcgacttcatagctgataacaataaccattacaagaagtttccacagatgtcatcctaccagcgtatgctggtacatcgcgtcgctgcctatttcggcctggaccataacgtcgaccagacgggcaaatctgtgattatcaacaaaacgtccagtacccgaatcccagagcagcggttttgcgagcacctgaaagacgagaagggggaggaaagtcagaaacgattcatactgaaacgggataactcttcaatcgacaaagaggataaccagcaaaatcgtatgcacccattccgggatgacagacggagtaagtccatcgaggagagggaggaagaataccaacgcgtacgcgagcgaatatttgcgcacgattctgtgtgctcacaggaatctcttttcgtagagaacagtagacttctcgaggacagcaacatttgcaacgaaacttataagaagcgtcagctgttcagaggcaacagagatggaagcggcaggacatctgggtctcggcagagttcgagcgaaaacgaactcaagtggtccgatcaccagcgggcatggtcttcaaccgactctgacagtagcaataggaacctgaaacctgcgatgacgaagaccgccagtttcggtgggatcaccgtgctcacgcgtggagatagtaccagctcgacccggagtacagggaagctgtccaaggcagggtctgaatcatctagctccgccggctcttctgggtccctgtctcggacccatccccccctgcagtcaactccactggtctctggggtcgccgcaggaagcccaggctgcgtgccgtacccagagaacggtatcggcggccaggttgcaccctcaagcacatcatatatcctgcttccattggaggccgctactggtatccccccagggtccattctcctgaacccacatacaggccagccctttgtgaatcccgacggcacccctgccatttacaacccacctacctcccagcagcctttacgtagcgccatggtgggacagtcccagcagcagccaccccaacagcaacccagcccacagccccagcagcaggtccaaccacctcagcctcagatggcaggccccctggtgacccaaagggatgatgtcgccacgcaattcggccagatgacactatctcggcaatctagtggcgaaacccccgaaccaccttcaggccctgtttatccaagctctctgatgcctcagccagcacagcagccctcctacgtaatagcttctacaggacagcagcttccaacgggcggctttagcggctccggcccccctatctcacagcaagttctgcagcccccaccttcacctcagggcttcgtgcagcagcctcccccggcccagatgcccgtctattattatccaagcggtcagtaccctacatccacaacacagcagtacaggcctatggcgccagtccagtacaacgctcagcggagccaacagatgccacaggctgcccagcaagccggctaccagcctgtcctgtcgggccaacaaggattccagggtctgatcggagtgcagcagccccctcagagccagaatgtgatcaacaatcagcagggcaccccagtccaaagcgtgatggtctcctaccctacgatgagctcctaccaggtgcccatgacacagggcagccagggcctccctcaacaaagttatcagcaacctatcatgctgcccaatcaggcgggacaaggctcactgcctgccactggcatgccagtgtattgcaacgtcaccccaccaactccgcagaacaaccttaggctgattggaccacattgcccctcatctactgtgcccgtaatgagcgcctcctgccggaccaattgtgccagcatgagcaatgctgggtggcaggtcaagttctag

SEQ ID NO: 13719 - DNA, 1191 bp, synthetic construct
  source 1..1191: mol_type = other DNA; note = Synthetic coding sequence
atgaccaccttagtcctcgacaacggcgcttacaacgcgaagatcggctatagtcatgagaacgtgtcagtgattcctaactgtcaattccggagcaaaaccgcacgtctgaagacattcacagcgaaccagatcgacgagatcaaagacccatctggcctgttttatatcttgcccttccagaaaggatatctagttaattgggacgtgcagagacaggtgtgggactacctgttcggaaaggagatgtaccaagtagactttctcgacacaaacatcattataaccgagccttattttaactttacgtccattcaagagtccatgaatgaaatactatttgaagagtaccaattccaagcggtactccgggttaatgcaggagctctgtctgctcataggtacttcagggacaatccatctgagttgtgttgtatcattgttgactctggatacagctttacacacatagtcccttactgccgctccaagaagaaaaaggaagcgatcatcaggataaatgtcggagggaagctgcttaccaaccatttaaaggaaatcatctcttatagacaattacacgtgatggatgaaacacacgtgattaaccaggtgaaggaagatgtctgctatgttagccaggatttctatcgggacatggatatcgccaaactaaaaggagaagaaaataccgtcatgattgactacgtgttacctgacttcagcactatcaagaaaggattttgtaagcctagggaggagatggtgttgagcggtaaatataagtccggagaacaaatccttcggctcgctaatgagaggttcgccgtacctgagatcttgtttaatccttcagatatcggcatccaagaaatgggcattccggaagccatagtgtacagcattcagaaccttcccgaagaaatgcagccacattttttcaaaaatatcgtgctcactggcggaaacagtctcttcccaggcttccgagatagagtttactccgaggtcagatgcctgaccccaaccgattacgatgtctccgtagtgctgccagagaaccccattacctatgcatgggaagggggcaaactgatcagtgaaaatgatgatttcgaagacatggtggtgaccagggaagactacgaagagaacggccacagcgtttgcgaagagaaatttgatatatag

SEQ ID NO: 13720 - DNA, 1005 bp, synthetic construct
  source 1..1005: mol_type = other DNA; note = Synthetic coding sequence
atggaacctggacccactgcagctcagcggagatgctcgctccctccgtggttgcctctgggtctactgttgtggtctgggctcgccttaggcgcccttccgttcggctctagcccacacagagtcttccacgatctgctttctgaacagcaactgctggaggtcgaggacctctctttgagcctacttcaggggggtgggcttgggcctttgtcgttgccccccgatctgccggacttggacccagagtgccgggaactactgctggattttgctaacagttccgcagagctgacagggtgcctcgtgcgctcagctcgccccgtcaggctatgccagacctgttatcctctgttccaacaggtggtgagtaaaatggacaacatttcgcgcgccgcagggaataccagcgaaagccagagctgcgcgcgcagcctgcttatggccgatcggatgcagattgttgtgatactaagcgaattcttcaataccacttggcaggaagccaactgtgccaactgtttgaccaacaacagcgaggaattatccaacagcactgtgtatttcctgaatttattcaatcatacactcacttgcttcgaacataacctacaaggtaatgctcactctctgctacagaccaagaactactctgaggtatgcaagaactgccgcgaggcatataagaccctgagctccctgtacagcgagatgcaaaagatgaacgagctcgagaataaagccgaaccgggaactcacctgtgcattgatgtggaggacgctatgaacattaccaggaagttgtggagtcggacctttaattgttctgtgccctgctccgatacagtccctgtgatcgcagtgagtgtctttatcctgtttttacccgtggtcttttacctctcctcttttctgcactctgaacagaaaaagaggaagttgatcctgcccaaacggctcaagtccagcacatcatttgcaaatatccaagaaaatagcaactag

SEQ ID NO: 13721 - DNA, 2172 bp, synthetic construct
  source 1..2172: mol_type = other DNA; note = Synthetic coding sequence
atgagcacggcgactggccccgaggcggcccctaaacccagcgctaagtccatctacgaacagcgcaagcgctattctacagttgtgatggccgacgtctcccagtatcccgtcaaccacttagtgaccttttgtctaggggaagatgacggagtgcataccgtggaggacgcaagcaggaaacttgctgtgatggatagtcagggtcgagtctgggcccaggaaatgttacttcgcgtttcaccagaccacgtgacactgttggatccagctagcaaggaggagctagaaagttacccccttggagctattgttaggtgcgatgcagtcatgccgccgggccggtcacggagtctgctgctgctggtgtgccaggagccggaacgcgcccaaccagacgtgcatttctttcagggcttacggctgggggcagaattgattagagaagatatccagggggccctgcacaattataggagtggaagaggcgagcgaagagccgcagcacttcgggctacacaggaggagctgcaacgcgacagaagtcctgcggccgagacccccccccttcagcggcgcccgtccgtgcgagccgtgatctcgaccgtagaacgaggagcggggcgcggccggccgcaagctaagccaattcctgaggccgaggaagcccagaggcctgagcccgtgggcactagctcaaacgcagacagtgcatcacccgacctaggaccaagaggcccggacctggcggtacttcaagccgagagagaggtcgatatattaaatcacgtttttgatgatgtcgaatccttcgtgagccgactccagaaatcagctgaggctgccagagttctggagcacagagagcgaggacgcaggagtagacggcgcgctgccggagaaggccttctcaccctccgcgcaaagcccccgtctgaggccgagtacacagacgtgttacaaaaaataaagtatgctttctcacttctggcgcggctcaggggcaatattgcagatccatctagccctgagttgctccactttctcttcggacctctacagatgattgtgaatactagtggtggcccagagtttgcgagttccgtgagaaggcctcacctgacgtcagatgcagttgccctgctgagggataacgtgactccgcgtgagaacgagctgtggacctccttgggagatagctggactagacctggcttggagctgagccctgaagaagggcccccctaccgcccagaattcttttctggatgggaacccccggttactgatccacaaagcagggcctgggaggatcctgtggagaaacagctgcagcacgaaagacgtcgcagacagcaatctgcgccccaagtggccgtaaatgggcatcgcgatctcgagccagaatccgagcctcagcttgagtccgaaacagccggcaagtgggtgctttgcaactacgacttccaagctagaaactctagtgaattgtcagttaaacaaagggacgttctggaggtcttggacgacagcagaaagtggtggaaggttcgggaccctgctggccaggagggttacgtcccctataatatactcacgccctatccaggcccccgcctgcaccacagtcaaagccctgccaggtcccttaacagtactccgcctccccctccagcacccgccccagcccctcccccagccctcgcccggcctagatgggaccggcccagatgggattcgtgtgatagcctcaacggcttggacccaagcgagaaggaaaaatttagtcagatgctcattgtgaatgaggagctccaggctcgcctcgctcagggtagatctggacctagccgagcggtgcccggtcctcgggccccagagccacagctgagccccggctctgacgcatccgaagtcagagcttggctgcaagccaaggggttttcatcaggtacagtggacgcccttggcgtgctgactggggcccagttattcagcctgcagaaggaagagctacgcgccgtcagtcctgaagagggcgccagagtgtatagccaagtgactgtccagaggtccctcctggaggacaaggaaaaagtaagcgagctggaagctgttatggagaagcagaagaagaaggtcgagggcgaagtcgagatggaagttatttag

SEQ ID NO: 13722 - DNA, 5622 bp, synthetic construct
  source 1..5622: mol_type = other DNA; note = Synthetic coding sequence
atgttctcaagacgcagtcacggggacgtgaagaagtctacccaaaaagtgttggacccaaaaaaagacgtcttaaccagacttaagcacttgagggccctgttagataacgtcgacgcgaacgacctaaagcagtttttcgagaccaactattctcagatttatttcatcttctacgagaatttcattgccttagaaaattctctgaagctaaaagggaacaataagagccaacgcgaagagctggactcaattctgttcttgtttgaaaagatcctgcagttcttgcctgagcgcatttttttccgatggcactaccaatccattgggtccacgttgaagaaattactccatacaggcaattcaatcaagattaggtgcgaaggcattcgactttttttgctttggcttcaggcactccaaaccaactgtgctgaagaacaggtgctgatatttgcatgcttggtgcctggattccccgccgtgatgagcagccgaggcccttgtaccctggagacactgattaatcccagccctagcgtcgccgacgtgaagatatacccggaagagatcactcccctcttgcccgccatttcaggggagaaaattgcagaggaccagacttgtttctttctccagattctcctaaaatatatggtgatccaggccgcctccctagaatggaagaataaggagaaccaggatacaggctttaaatttctcttcacgttgttccggaaatattacctcccacacctttttccctctttcaccaaactcactaacatttacaagcccgtactggacatcccgcacttgagacctaaacccgtgtacatcaccacaacacgggataatgaaaacatatactccacgaaaataccatatatggccgcccgggtggtcttcattaaatggattgtcacttttttccttgagaaaaagtatctgactgctacacagaacaccaaaaatggcgttgacgtgctgcccaagatcattcagactgtcggcggcggcgccgtacaagagcgtgcccccgaattggatgggggtgggcctaccgagcaggataagagccattcgaatagctccaccctgtccgatcgcagattaagtaactcctccctgtgcagtatcgaggaggaacacagaatggtctacgagatggtccagagaatcctcttgtccacaagaggttatgtgaactttgtcaatgaggtcttccaccaggcgttcctgcttccttcatgcgagatagccgtcaccagaaaggtggtccaggtctaccgcaagtggattctccaggacaaacctgtcttcatggaagaacctgatcgcaaagatgtggcgcaggaagacgccgaaaagctcggctttagcgagaccgactctaaagaggcttcgtccgaatcttctggtcacaagagaagctccagctggggacggacatatagctttacttccgccatgtctaggggctgcgtcaccgaagaagaaaatactaacgttaaagcgggtgtccaggccctgctgcaggtgttcctgactaattcggccaatatcttcctgcttgaaccctgcgccgaagtaccggtcctcctgaaagaacaggtagatgcttgcaaggccgtgctgatcatctttcgacggatgattatggagctgactatgaataagaagacctgggaacagatgctgcagatactgctgaggatcaccgaagccgttatgcaaaagcctaaagacaaacaaattaaagatcttttcgcccaatcgctcgcaggactgctattccgaaccctgatggtcgcatggattagagcaaatctctgcgtatacatctccagggaactgtgggatgattttctgggggtcctgtcttctcttacagaatgggaagaactgatcaatgagtgggctaatattatggattcattaactgccgtccttgcccggactgtttacggggtggagatgacaaatctgccattagataagttgtcagaacagaaagagaaaaaacagcgaggtaagggctgtgtgttggacccccaaaaggggacaacagtcggaagatccttctcactttcctggcgcagccaccctgatgtcacggaacccatgcgcttccgaagcgccaccacttctggtgccccaggagtggagaaagccaggaatatcgtgcggcagaaggcaaccgaagtggaagagtgccagcagtcagagaacgcgccagccgccggctcaggacatctgacagtgggccagcagcagcaggtgcttaggagtagttctacttcagacatccctgagcccctgtgtagtgattcctctcaaggacaaaaagctgaaaatactcaaaatagttcatcctctgaaccacagcctattcaagagaataaaggacatgttaaacgggaacacgaggggataacgattctcgtccggcggtcttcctccccggctgagcttgatctaaaagatgatctccagcagacccaaggcaagtgccgtgagcgccaaaaatccgagagcaccaactccgatacaacccttggatgtacaaacgaagcggagctgtctatgggtccatggcagacatgtgaggaagatcctgagttgaacacccctaccgatgtagtggcagatgccgatgctcgacactggctgcaattgagccctaccgatgcatccaatctaactgacagctccgaatgcctgacagacgattgttccataattgccggcggaagccttaccgggtggcatcctgactcggccgcagtcctgtggaggagagtattagggatcctgggtgacgtgaataatatccaaagccctaaaatacacgctagagtgttctgctacctgtatgagctctggtacaagctagccaagattagggataacctagccatctccctggataaccaatccagtccttcgcctccggtcctaatcccgcccctgcgcatgtttgcctcatggttatttaaggccgccaccctccctaatgagtataaggagggaaaattgcaggcataccgcctgatctgtgccatgatgacgagacgccaggatgtgctgcccaacagcgacttcttggtccacttctatctcgtgatgcacctgggactgaccagtgaggaccaggacatactgaacaccataatccggcactgccctcccaggttcttctctctaggtttccctggctttagtatgctggtaggcgacttcattactgctgctgccagggtgctttctacagacattttgactgccccaaggtctgaggcggttacagtgttgggcagcctcgtgtgtttccctaatacgtatcaggagatccctctacttcaatctgtgccagaagttaatgaagcgatcaccggcaccgaggatgttaagcattacctaatcaacattctgcttaaaaacgccaccgaagaacctaatgaatacgcacggtgtatagccgtgtgttcactcggagtctggatctgtgaggaactggcacagtgcacctctcacccgcaagtgaaagaggcgattaatgtcatcggcgtgacccttaaatttcccaacaagatcgtggcccaggtggcctgcgatgttttacaactgctggtttcgtactgggaaaagttacaaatgtttgagacctcactgcctcgcaagatggctgagatactggtggccacagtagccttcctactccctagcgcagagtacagttcagttgagaccgataagaagtttatagtctcactgctcctttgcctgctggattggtgcatggcactcccagtgtccgtgctgttgcatcctgtctccacagccgttctagaagagcagcatagcgccagagccccacttttggattatatctatagagtgcttcattgttgtgtgtgtgggtcaagcacatatacccagcagtcacattacatcctgactctggcggacctgtcctcgaccgactacgaccccttccttcccctcgcaaatgtgaaaagcagtgagcccgtccagtaccattctagtgccgagctgggaaacttgctcacagtggaggaagagaaaaaacggaggtcactggagctgatccctttgaccgctagaatggtcatggcacatctggtcaaccacctgggccactatcccttgtcgggtggccctgctatcctacacagcttggtctccgagaatcatgacaacgcacatgtcgaaggttcggagttgagcttcgaggtgtttcggtctcccaatctccagctctttgtctttaatgatagtacactgatctcctacctgcagacacccacagaagggccagtcggcgggtcccctgtagggagccttagcgatgtcagggtgattgtgcgcgatatcagcggaaaatattcatgggatgggaaagtgctatacggcccactcgaaggttgcctcgcccctaacggaagaaatccatcctttctgatcagttcttggcatcgagatacattcggaccgcagaaagattccagccaagtggaggagggagacgacgtgctggacaagctgctagaaaatataggccatacatctcctgaatgcctcctcccctcgcaacttaatctaaatgaaccgtccttgactccttgtggcatgaactacgatcaggagaaggagattattgaggtgatcctgcggcagaatgctcaggaagacgaatacatccagagtcacaacttcgactcggcaatgaaagtgacgtctcagggccaaccttcgccggtcgagccccgcgggccattctatttctgccgtctgttgcttgatgatctgggtatgaattcttgggatcgtcgcaagaatttccacttgctcaaaaaaaacagcaagctactgcgcgagcttaagaacctggactctagacagtgccgcgagacacacaaaattgctgtattttacattgccgaagggcaagaggataagtgttctattctctctaacgagagaggatctcaggcttatgaggacttcgtggccggacttggctgggaagtcgatctgtccacgcactgtgggttcatgggaggcctccagagaaacggcagtactggacaaacagctccgtattacgccacctccactgtcgaggttatctttcatgtgagtacacgcatgccctcagactccgatgatagtttgactaagaaattgcgccacctggggaacgacgaggttcacattgtctggagcgaacattccagggattatcgaaggggcatcatccctactgcctttggagacgttagcataatcatctatccaatgaagaatcacatgtttttcatcgctattacaaaaaaaccggaagtgccattctttgggcccctgttcgacggcgccattgtatccggcaagctgctcccttctttggtatgtgccacgtgtattaacgcaagtcgcgcagttaagtgcctgatcccattgtatcagtccttttacgaagaacgggccctgtacctagaggctattattcaaaatcatcgagaggtgatgaccttcgaggactttgcagctcaggttttcagcccatcaccatcatactccttaagtggaacagactag

SEQ ID NO: 13723 - DNA, 1041 bp, synthetic construct
  source 1..1041: mol_type = other DNA; note = Synthetic coding sequence
atggctcgacctggacagagatggctggggaagtggttggtggcaatggtggtgtgggctttgtgccggttggctaccccattggcgaaaaatctcgagcccgtgtcttggagctctttgaacccgaagtttctgtccggcaaagggctggttatttaccctaaaataggtgataaattggatataatctgtccccgggccgaagccgggcgtccatatgaatattataagctgtacctggtgcggcccgagcaggccgctgcctgctctacagtgctggaccctaatgttctggttacgtgcaataggcctgaacaggaaatcaggtttacgattaaatttcaggaatttagccccaattacatggggctcgagtttaagaaacatcacgattattacataacgtcgacctccaatggatccctcgaaggcctcgaaaatagggagggtggtgtatgcaggactagaactatgaagattatcatgaaagtagggcaggacccaaacgctgtgacacccgagcagctgacaactagcaggccatcaaaggaggccgataacacagtgaaaatggctacacaggcccctggatctcgtggatccttaggcgattccgacggcaaacatgaaactgtcaatcaggaagaaaaatccgggccaggcgcgtcaggcgggagctctggtgatccggatggtttcttcaatagcaaagtggcacttttcgcagcggtgggggctggttgtgttatatttctcctgattatcattttcttgacagtcctgctcctgaaacttcggaaaagacatagaaagcatacacagcagcgcgccgccgctttgtctttgagcaccttggcgtctcccaaagggggatctggaaccgccggcaccgagccgagcgacatcattatccctctaagaaccaccgagaacaactattgtccgcactacgaaaaggtcagcggcgattacgggcacccggtttacatcgtgcaggaaatgcccccacagagccccgcgaacatttattacaaggtatag

SEQ ID NO: 13724 - DNA, 1617 bp, synthetic construct
  source 1..1617: mol_type = other DNA; note = Synthetic coding sequence
atggcctccgatcccattttcacgctcgccccacctcttcattgccattatggcgcgttcccgccaaacgccagcggatgggagcagccaccaaatgcatctggcgtgagtgtggcaagcgccgcactcgctgcttccgcggctagccgcgtagccacctccactgacccatcttgcagcgggtttgctcccccagacttcaaccactgtcttaaggactgggactacaatgggctcccagtgctgaccacaaacgctattggacagtgggatctggtgtgtgatctgggatggcaggtgatcttggagcagatcttattcatcctcggctttgcctctggctacctgtttctgggctatcccgctgataggtttgggcgacgcggcattgtactccttaccctcggcctggtcgggccttgcggggtgggcggtgcagccgccggatcgtccacaggggtaatggcattacggtttttgctcgggtttctcctcgccggcgtagatctgggtgtgtatttgatgcgattggagctgtgcgaccctactcagagattacgcgtggctttggctggggaactcgtcggtgttggaggtcattttctctttcttggccttgctctggtctccaaagattggagatttctccagcgaatgatcaccgccccttgcattctgttcctcttttacggttggcccggcctttttcttgaaagtgcccgctggcttattgttaaacggcagatcgaagaagcccagtcagtgctgagaatactcgccgaaagaaatagacctcacggccagatgctgggggaagaagcccaggaggcgctacaggacttagagaacacctgtccgttgcccgccacgagcagcttcagcttcgcgagtttgttgaactatcgtaatatctggaaaaatctgctgatcctagggttcacaaacttcatcgctcatgccatccgacactgctatcagccagtcggtggcggcggcagtcccagtgacttttacttatgcagcttgctggcatccggtacggcagcccttgcctgtgtttttctgggggtgactgtggatcggttcggccggcgagggattctcctgctgtctatgactctgacaggcatcgccagtctggtattattaggactatgggattgcgagcatccaatttttcccaccgtctgggctcaacaaggcaaccctaacagggacctcaacgaagctgcgatcacaacattttctgttttgggtctgtttagttcccaggccgccgccatcctgagcactttgctggcagccgaggtgattcccaccacagttagaggacgaggtctggggctaattatggctctgggagctctcggcggcctctctgggcctgctcaacgcctgcacatgggacacggagctttcctgcagcatgtggtcctcgccgcctgcgctctcctgtgtatattgagtataatgctgctacccgaaactaagcgcaagctgttgcccgaggtccttcgggacggtgagctttgtcggcggccctctctcctgagacagccacctcccacacgatgcgaccacgtgccgcttctggctacacccaatcccgctctctag

SEQ ID NO: 13725 - DNA, 1128 bp, synthetic construct
  source 1..1128: mol_type = other DNA; note = Synthetic coding sequence
atgagcacggccgggaaggtgattaaatgcaaggctgcagttttgtgggagctcaagaaacctttttccatcgaggaagtggaggtggccccgcccaaagcccacgaggttcgcataaaaatggttgccgtagggatctgtggaactgatgatcacgtcgtttctggaactatggtgacacctctgccggtgattctgggtcacgaagccgcggggatcgtggaaagcgttggggaaggtgtcacaaccgtgaagcccggggataaagtcatacccctcgccattcctcagtgtggaaagtgcagaatctgcaaaaacccagagtcaaactattgcctgaaaaatgatgtgtctaatcctcaaggaacattgcaggacggcacttccaggttcacttgccgcaggaaaccgattcatcatttcctcggaatctccaccttttcccagtacacagtagtcgacgagaatgccgtcgctaagatcgacgctgcatctccccttgagaaggtgtgtcttatcggctgcggtttctccacaggatacggatctgccgtgaacgtggcaaaagtcactccaggaagtacatgcgcggtgtttggactgggaggcgtgggtctttccgccattatgggctgcaaggccgccggggccgctcgtatcattgcagtagacatcaataaggacaaattcgctaaagccaaagagttgggagctacagaatgcataaatccacaggattacaaaaagcccattcaggaagtcctcaaagaaatgactgacgggggtgtggacttctcatttgaggtcattggcaggctggacactatgatggcctctcttctgtgctgccacgaggcctgcggcacatctgtgatagtgggcgtaccacccgactcccagaatctgagcatgaatcctatgttactgcttacaggtcggacatggaagggcgcaatcttaggaggttttaagtcgaaagaatgtgttccaaaactcgtggcggattttatggctaagaagttttccttggatgccctcataactcacgtgctgccatttgagaaaatcaacgaggggtttgatctcctgcactctgggaagtccatccgtaccattcttatgttctag

SEQ ID NO: 13726 - DNA, 1641 bp, synthetic construct
  source 1..1641: mol_type = other DNA; note = Synthetic coding sequence
atgtgcagcctgggcctcttcccccctccccctccaaggggccaggtgacactatatgaacacaacaacgagctagtaacgggtagtagctatgagtcccctccacctgactttcgcggccagtggatcaacctccccgtcctgcagcttacaaaggatccgctgaaaaccccgggccggctggaccacggaacaaggacagcttttattcaccatcgagaacaggtgtggaagaggtgcatcaatatctggcgggacgtagggctgttcggcgtgctgaacgagattgccaatagcgaggaggaagtgttcgagtgggtgaaaaccgccagcgggtgggcactcgctctctgcaggtgggctagctccctgcatgggagtctctttcctcacctatccttaagatcagaagatttaattgctgagttcgctcaagtcacaaactggagtagttgctgtctgagagtgttcgcctggcaccctcataccaacaagttcgctgtcgcattgctggacgattctgttagagtctataatgcttcaagcactattgtgcctagcctgaaacaccgcctgcagcggaatgtcgcttctctggcttggaagcctctgtctgcaagcgtgttagcagtggcttgccagtcttgcatcttgatctggaccctcgaccctacttccttgtctactaggccctcatctggctgcgcccaggtgctgagccatcccggtcatacacctgtgacatcacttgcttgggcaccttccggcgggcgattgctgagcgcctcaccagtcgacgcagccattcgcgtgtgggacgtgtctacagagacctgcgttcccttaccatggttccgaggaggcggggtgactaacttgctatggtcaccggacggctctaaaatcctcgccaccacaccaagtgccgtgttccgcgtgtgggaggcccagatgtggacttgcgagagatggccaacactaagcggccgatgccaaaccgggtgttggtcaccggacggaagcagattgctgtttaccgtgctcggcgagccactaatatacagcctaagcttccccgaacgctgtggcgaggggaaggggtgtgtcggtggtgccaaatctgcgacaattgtggccgatctgtctgaaactacaatccaaacacctgacggagaagagagactcggaggcgaagcccattctatggtctgggacccatcgggagaacgactcgccgtgttaatgaaggggaagccacgcgtgcaagacggcaaaccagtcatactactgtttaggactagaaactcccccgttttcgagctgctaccgtgtggaatcattcagggagagcccggagcccaaccccagctgattacgttccatccaagctttaataagggcgccctcctgagtgtcggttggagcacaggacggatcgcccacatccctctgtacttcgtgaatgcacagttcccaaggttctccccagtgctcggcagggcccaggaacccccagcaggtggcggaggctctatccacgatttaccattgttcaccgagacatcaccaacatcagctccctgggacccactccctggtccaccaccagtcctcccgcacagtcctcactcccatctgtag

SEQ ID NO: 13727 - DNA, 576 bp, synthetic construct
  source 1..576: mol_type = other DNA; note = Synthetic coding sequence
atgggaaagaaaacgaagaggactgccgatagcagctcgtcagaagatgaagaggaatatgttgtcgagaaggtgctcgacaggcgggtcgtgaaaggccaggtggagtatcttctgaagtggaagggcttctcggaagaacacaacacgtgggagccagagaagaatctagattgccctgagctcatatccgaattcatgaaaaaatataaaaagatgaaggagggagaaaacaataaacctcgtgagaaatccgaaagcaataaaaggaagagcaacttctccaactccgcagacgacatcaagtcgaagaagaaacgtgagcaatcgaatgacatcgcaaggggcttcgagcggggcctcgaacccgagaaaatcatcggggctacggacagctgtggcgacttaatgtttctaatgaaatggaaggacacagacgaggcggacctggtcctggcaaaggaagcgaatgtcaagtgccctcagatcgtaattgctttttatgaagagcggctgacatggcacgcttatcctgaggacgcggaaaacaaggaaaaagagaccgccaaatcctag

SEQ ID NO: 13728 - DNA, 1554 bp, synthetic construct
  source 1..1554: mol_type = other DNA; note = Synthetic coding sequence
atggggaggaaatccaaaaaatggggcaaaaaggtgtctcggtacgagggtaaggtgcggctgaaaaaagtcccagcaaaaaagctggtccctgcatggaaggaaaaggtcctgtgggcactgcttgccgtgctcctcgcaagctggaggctgtgggctatcaaagacttccaggagtgcacatggcaagtagtcctgaacgagtttaaacgagttggggagtctggagtttctgactccttttttgagcaggagcctgttgataccgtgagttctctcttccatatgctggtggattcacctattgacccatctgagaaataccttggcttcccatactacctgaaaattaactattcctgtgaggagaagccttccgaggacctggtgcggatgggtcatctcacaggactcaagccgctcgtactagtgaccttccagagcccggtaaacttctataggtggaaaatcgaacagctgcaaatccaaatggaagcagcgccatttcgcagcaagggcgggccgggcggtggtggacgcgatagaaatcttgcgggcatgaacatcaacggttttctcaagagggacagggacaataacatccaatttactgtgggcgaagaattgtttaatctgatgccacagtacttcgttggggtgagttccagaccgctgtggcacacagtggatcagtcgcctgtgctcattctgggaggaattcctaacgagaaatatgttcttatgaccgatacatctttcaaagacttctccctggttgaagtgaacggcgtcggccagatgctgtcaattgactcttgttgggttggttctttttactgtccccactctggatttacggcgaccatttatgatacgatagccactgagagcacattgttcattcgccagaaccagcttgtatattattttacaggtacgtacacaacactgtacgagcgcaaccggggcagcggcgagtgtgcagttgccgggccgactccaggggaagggacattggttaacccgagcacggagggttcctggattagagtccttgcttctgaatgtattaaaaaactgtgcccagtgtactttcacagcaatggaagtgagtatattatggccctgacaaccggtaagcatgagggatacgtgcactttggcactatccgtgtgacgacctgctcaatcatttggtccgagtatatagccggcgagtatactctgcttctgctcgtagagtccggctatggcaatgcatccaaacggtttcaagtggtgtcctacaatacagcgtccgatgatttagagctcctctaccacatccccgagtttatccctgaagcccgagggctcgagtttctgatgatcttaggcacagagtcctataccagcacggccatggctcctaaagggatcttctgcaatccttataacaatctcatctttatttgggggaacttcctgttgcagcgttcaggcaccagttggcgcgccgctactggctcaacctcgtgttccctgccacgcgctggaagatgtacttctgcctag

SEQ ID NO: 13729 - DNA, 1203 bp, synthetic construct
  source 1..1203: mol_type = other DNA; note = Synthetic coding sequence
atgagcggtagagtgggtgatctgagccctaagcaggctgagacgctggccaaatttagagaaaacgtccaggacgtgctccccgccctgccaaatccagatgactactttttgctcagatggctgcgcgcccgaaacttcgacctccagaaatcagaagctctcctgcgaaagtatatggaatttcgaaaaaccatggacattgatcacatccttgattggcagcctcctgaagtaatccagaagtatatgcctggcgggttgtgtggatatgatcgcgacggatgtcccgtgtggtatgatatcatcgggcctctggatcctaagggcctgctgttctccgttactaagcaggatttgctgaagaccaagatgagagattgcgagagaattctacatgagtgcgacctccagacagaacgtctgggaaagaagatcgagacgatcgtgatgatcttcgattgtgagggattaggattaaagcacttttggaaaccacttgtggaggtgtaccaggaattttttggactactggaagaaaactaccctgagacactgaaattcatgctgatagttaaggccactaagcttttccccgtgggttacaacctcatgaagcctttccttagcgaagacactcggagaaagattattgtattgggaaacaattggaaggaggggctcctgaaactgatcagtccagaagagctgcccgcccagtttggtggaactctcacggaccccgacggtaatccaaagtgtctcactaaaatcaactacggaggggagattccgaagtccatgtatgtgcgggatcaggtgaaaacccagtatgagcactccgtacagattaatcgagggtcgagccaccaggtagagtacgagattttatttcctggatgtgtgctgcgctggcagttctccagtgatggcgccgacattggttttggggtgtttctgaaaactaagatgggagagcgacaacgtgccggggagatgactgacgtgctgcctagtcagagatataacgcccacatggtccctgaagatgggaatcttacttgcagcgaggcaggggtgtatgtgctaaggttcgacaatacctacagttttgtgcatgctaagaaggtcagttttactgtcgaagtgctcctccccgatgagggtatgcagaagtatgacaaggagcttacccccgtctag

SEQ ID NO: 13730 - DNA, 636 bp, synthetic construct
  source 1..636: mol_type = other DNA; note = Synthetic coding sequence
atggccgagcaacatggagcacccgagcaggctgcagccggtaagtcccacggggatctcggggggtcatataaggtgattctttatgaactggaaaatttccaaggtaagcggtgtgagctgtcagccgagtgcccatctctgaccgatagtctgctcgaaaaagtgggtagtatccaggtggagtcagggccctggctggctttcgaatctcgagcctttagaggggaacaattcgtcctagagaaaggggactatccaaggtgggacgcatggtccaattccagggactccgatagtcttctctcgttgaggcccctgaatatcgatagccctcaccacaagttacacctctttgagaatcccgcgttcagtgggcgaaaaatggagattgttgatgatgatgtgccttccctctgggcccacggctttcaggaccgggtggccagcgttcgcgccatcaacggcacttgggtaggctacgaatttcccgggtatagaggccggcaatatgtctttgagcgcggagaatatcggcattggaatgagtgggacgccagccagcctcaattgcaaagcgtacgccggattcgcgaccagaaatggcacaagagaggccggtttccctcttcctag

SEQ ID NO: 13731 - DNA, 387 bp, synthetic construct
  source 1..387: mol_type = other DNA; note = Synthetic coding sequence
atgacggaagccgatgtcaatcccaaagcttacccactggcagacgctcacctgaccaagaagctgctggacttagtccaacaaagttgcaattataagcaattacggaaaggtgctaatgaggcaaccaagactctcaatagaggaatctcggagtttattgtgatggctgccgacgccgagcctttagaaataatcctccacctgcccctgctctgcgaggataagaatgtcccctatgtattcgtgcggagcaagcaagccctagggcgggcctgtggcgttagccgcccagtaatcgcttgcagcgtgactataaaggaggggtcacagctgaagcagcagattcaaagcatccagcagtcaatcgagagactcctggtgtag

SEQ ID NO: 13732 - DNA, 2592 bp, synthetic construct
  source 1..2592: mol_type = other DNA; note = Synthetic coding sequence
atggccggtccacgaggagcattgttggcttggtgcagacgacaatgcgaggggtatagaggggtggaaatccgtgaccttagctcatcctttagggacggcctggcattctgtgccatccttcatcggcatagacccgatctgctggacttcgacagcctaagcaaggacaacgtgttcgaaaataatcggctcgcgtttgaggtcgctgagaaggaactgggcattccagctttgttggacccaaatgatatggtcagcatgtccgtgcccgactgcttgtcaatcatgacctacgtgtctcaatactacaatcatttctgctctcctggacaagcgggagtaagtcctccgcgcaagggactcgctccctgcagcccgccctctgtggctcctacaccggtcgaacccgaggacgtagcccagggagaggagttatctagtgggtccctcagtgaacagggtacaggccagacacctagttcgacatgtgccgcatgtcagcagcacgtgcacctcgtgcagcgatacttagccgacggccgcctctaccatcgtcactgttttaggtgccgccgctgctccagtactctcctgccaggagcttacgagaatggtcccgaagagggaacttttgtgtgcgctgagcactgcgctaggctgggccctggcacacgtagtgggacacgccccgggcctttcagccagccaaagcagcagcaccagcagcagttggccgaagatgctaaggacgtccctggaggagggcccagcagtagcgcccctgccggtgccgaagctgacggacccaaagcgtcccccgaagctcgcccacagatacctacaaagccccgtgtgcccggaaaactgcaggagttagccagtccccctgctggtcgtcccacaccagcacctcgtaaggccagcgaatctacaactccagccccacccacgccacgtccgaggagctctttgcaacaggaaaacctggtagagcaggccggaagttccagcctggtcaatggccgactgcacgagctgccagtcccgaaaccaaggggcacgcctaaaccttcagaagggacccctgcccccaggaaggaccctccctggatcactctcgtgcaggccgagccaaaaaaaaagcccgcccctctgccacccagtagcagccccggccctccttcacaggatagtcggcaggtggagaacggagggacagaggaggtggcacagccgtcgccaacagcgagcctcgagtctaagccctacaacccattcgaggaggaagaagaggacaaagaagaggaggcccccgcggcccctagcctggccacaagccccgctttggggcacccggaatcaacacccaaaagcctgcatccttggtatggaatcacccctacgagctcccctaagaccaaaaaacgccccgcgccacgggctccaagtgctagcccgctggcactgcacgcttctcggctgtctcactctgaaccccccagtgccacaccgtctccagctctgtcagtagagtccctaagctcggaaagtgcttcgcaaacagccggggccgagttactggaacctccagccgtgccaaaaagcagctccgagcccgccgtgcacgccccagggacgccgggaaacccagtgtctctgagtaccaacagctccttggcttcatcaggagaactggtcgagcctcgcgttgaacaaatgcctcaggcgtccccaggtttggcgccccggacgagggggagtagcggccctcagcccgccaaaccatgcagcggagctactccgacacctcttctcctggtgggggatcgttccccagtgccatcgccaggatctagtagcccccagttgcaggttaagagctcgtgtaaagagaacccctttaatcgaaaaccttcacctgctgcaagccctgcaacaaagaaagccacaaagggaagcaaacctgtacggccgcctgcaccgggccacggtttcccacttatcaagcggaaggtgcaagcagatcagtacatcccagaggaggacatccatggcgagatggatactattgaaagaagactggatgctctggaacaccgaggagtccttttggaagagaagctccgaggggggttgaatgagggtagagaggatgatatgcttgttgactggtttaaactgattcatgagaaacatctcctcgtccgtcgagagagcgagctcatatacgtctttaaacagcagaacctcgaacagcggcaggccgacgtggaatatgagcttcggtgccttcttaacaaaccagaaaaggattggactgaggaggaccgggcccgggagaaggtcctgatgcaggaactagtgacgctgatcgagcagagaaatgccatcatcaattgtctggatgaagacagacagcgggaagaggaagaggataagatgcttgaggccatgattaaaaagaaggagttccagcgggaagcggaaccagaaggtaaaaagaaaggaaaatttaagacgatgaaaatgctgaaactgctgggaaacaagcgcgacgccaagtcaaaatcacctcgggacaagagttag

SEQ ID NO: 13733 - DNA, 708 bp, synthetic construct
  source 1..708: mol_type = other DNA; note = Synthetic coding sequence
atgtggaggggtagagctggagcactcctgagagtgtggggcttctggcccacaggcgtcccaaggaggagacctcttagctgcgatgcagcaagccaagccgggagtaattatcctagatgttggaactgtgggggcccctggggtcccggccgcgaagacaggttcttttgcccccagtgcagagctctccaagcacccgatcctacccgggactatttttctctcatggactgcaacagatccttccgggtggatacagcaaaactccagcataggtatcagcagctccagcgactagtgcacccagacttcttctcccagcgcagccagactgaaaaagatttttccgagaagcactcgacactggttaacgatgcctacaaaactctgctcgcccctctctcccgaggattgtatctgttgaaactgcacggaatcgaaattccagaacgcactgactacgaaatggaccgacaattcctgatcgaaatcatggaaattaacgagaaactggccgaggctgagagcgaggctgccatgaaggaaattgagagcatagtcaaggcaaaacaaaaggagttcacagataatgttagttccgccttcgagcaggacgatttcgaagaggctaaagaaatcctgactaagatgaggtacttttctaatatcgaagaaaagattaagctgaagaaaattcctttatag

SEQ ID NO: 13734 - DNA, 2010 bp, synthetic construct
  source 1..2010: mol_type = other DNA; note = Synthetic coding sequence
atggctaccgaacgcagccggtctgccatggacagtcctgtgccggcatctatgttcgcccccgaaccatcctctcccggggctgctagagcggccgccgcagcagcaaggctgcacggagggttcgacagcgactgttctgaggacggggaggcgctaaacggcgaacccgagcttgatctgacctccaaactagtattggtctcccctacgagcgaacaatacgatagccttctacgccagatgtgggaaagaatggatgaggggtgcggggagacgatctacgtgatagggcagggttcagacgggactgaatacggactttcggaggcggacatggaagcatcttacgctacggtcaagtctatggcagagcagattgaggccgacgtgattctcctgagggagcggcaagaggctggggggagagttagggactatttggttaggaaaagagtgggggataatgactttttggaggttcgggttgctgtggtgggcaacgtggatgccggcaaatcaaccctgcttggggtcctcacccatggagagctcgataacgggcgaggatttgcacgacagaaacttttccggcacaagcacgagatcgaatctggccgcacctcgtctgtcggtaacgatatcctaggttttgatagcgagggcaacgtcgtgaacaagccagacagccatggcggatctctcgagtggacaaaaatatgtgaaaagagcaccaaggtgattactttcatcgacttagcgggccacgagaagtatctaaagactacggtgtttggtatgactggacacctgcccgacttctgtatgcttatggtgggtagcaacgcgggaatcgtgggtatgacaaaggagcacctcgggctggctctggcgctgaatgtccctgtttttgtcgttgtgactaagatcgacatgtgccccgctaacattttgcaagaaacactgaaactcctgcagaggctgctcaaatcacctgggtgtaggaaaatcccagtgctggtgcagagcaaagacgacgttatcgtcactgcatctaacttttcatcagagaggatgtgccccattttccagatcagcaacgttacgggcgaaaatctagatctgctgaagatgttcctcaatcttctgtcaccccgaacttcatatcgggaggaagaacccgccgaatttcagattgacgatacgtactctgtcccaggcgttggtacagtcgtgtctggaacaaccctgcgcgggttaatcaaactcaacgacaccctccttctcgggccagaccctttgggaaacttcctcagtatcgccgtgaaaagtatccacagaaaaagaatgcccgtgaaagaagtcaggggcgggcagaccgcctcctttgcccttaaaaaaattaaaagatcttctatccggaagggaatggtgatggtctcaccccgcctaaatccccaggcgtcttgggaatttgaggcagagattctggttctgcaccaccctaccacaatctcaccaaggtaccaggctatggttcactgcggtagcatccgtcagaccgcaactatcttgagtatggacaaggactgcctgagaacaggcgacaaggcaactgtgcattttaggttcattaagacgcccgaatacctgcatatcgaccaaaggctggtctttagggagggccggacaaaggccgtaggcacaatcaccaaactcctccagacgacaaacaattccccgatgaatagtaaaccacagcagataaaaatgcaaagtacgaagaagggccccctgaccaagcgggacgagggcggaccctccggaggcccagcggtcggggctccacctcccggcgatgaagcctctagtgtcggtgctgggcaaccagctgcttccagtaatctccagccccagccaaaaccatctagcggcggacgacgcagaggaggacaacggcacaaagtcaagtcgcagggtgcttgcgtaacaccagcttctggctgctag

SEQ ID NO: 13735 - DNA, 1656 bp, synthetic construct
  source 1..1656: mol_type = other DNA; note = Synthetic coding sequence
atggctgcaccagctctatcctggcgacttccattgctcatccttctgctccccctggctacctcgtgggcctcagcagccgttaatggaacctcccagtttacttgcttttacaactcaagagcgaatatttcatgcgtgtggtcacaggatggcgccctccaggacacatcctgccaggtacacgcatggccagacagacggagatggaatcagacatgtgagttgctgcccgtgagccaagcttcgtgggcctgtaatttgattttaggagcccctgatagtcagaaactgacaactgttgatatcgtcacactgcgtgtgttgtgccgcgagggcgttcggtggagagtgatggcgatccaagattttaagcctttcgagaacttaagactgatggctccaattagtttacaggtggtgcacgtcgagacgcaccgttgtaacatttcctgggaaatttcacaagcctctcattactttgagagacacctggagtttgaggcccggacactgtcacccggtcacacctgggaggaggcccctctcctgacgcttaaacagaaacaagaatggatctgcctggagactcttacacctgatactcagtatgagtttcaagtccgagtgaagcccctccaaggtgaatttaccacatggagtccgtggtctcaaccgcttgccttcagaacaaagcctgctgcattgggtaaggataccataccctggctgggacatctcttggtcggtctctccggcgcttttgggttcatcattctggtgtacctcctcatcaactgcagaaataccggcccttggcttaagaaggtgctgaagtgcaatacccctgacccctctaagttcttttctcagctttcatccgaacacggcggcgatgtccaaaaatggctgtcgagtccctttccaagcagcagctttagcccaggagggcttgctcccgagattagccccttggaggtgctcgagcgggacaaagtcacacaactactgcttcagcaagacaaagtgcctgagcctgccagcctatcttccaaccactccctaactagttgttttacaaaccagggatatttttttttccacttgcccgacgcgctcgaaattgaagcgtgtcaggtgtatttcacttacgatccttactctgaagaggaccccgatgagggagtagcgggggctcccaccggctcttcaccacagccgctgcagccgctctctggagaggatgacgcatactgcacttttccatctagagatgatctgctgcttttctcaccctcactgctggggggccccagccctccatccaccgcgccaggcgggtcgggcgcaggagaagagaggatgccacccagtttgcaggagcgagtgcccagggactgggaccctcagcccctcggccctcctaccccaggggtacctgatctggtggacttccagcctccgccagaactcgtcttaagagaagccggtgaagaggtcccggatgccgggcctcgcgaaggcgtgtcatttccttggtcgcggcctcctggacagggggagtttcgtgccttgaacgctaggctgcctctgaataccgatgcctatctgagcttgcaagagcttcagggccaagatcctacacacctcgtgtag

SEQ ID NO: 13736 - DNA, 3516 bp, synthetic construct
  source 1..3516: mol_type = other DNA; note = Synthetic coding sequence
atggaaaacaaccttaagacctgtcctaaggaagatggtgatttcgtttctgataaaatcaaatttaaaatcgaggaggaggacgatgacgggatcccaccagacagtctggagagaatggacttcaaatctgagcaggaagatatgaaacaaactgatagtggaggagagcgcgcaggcctggggggaacaggctgcagttgcaaacctccaggaaagtacctctccgccgagtccgaagacgactatggcgcccttttttcccagtactctagcacattgtacgacgtcgccatggaggcggtcacacaatccttgctgtcctcccgtaacatgtcttcccgaaaaaagtcacctgcatggaaacacttttttatctccccgcgcgactctaccaaggccatctgtatgtattgcgtaaaggagttttctagggggaaaaatgaaaaggatttgtccacaagttgcctgatgcggcatgtccggcgggcacatccaacagtactgattcaggagaatggtagtgtgagtgcggtgtctagctttccttcacccagcctcctgttacccccccagccagccgacgctggcgaccttagtaccatcctgtcaccaattaagctcgtgcagaaagtggccagcaagataccaagcccagaccgcatcactgaggaatccgtcagcgttgtgtctagcgaggagattagttctgatatgagtgtgtcagagaaatgcgggagagaggaggcacttgtgggctcaagtcctcatctgcctgctctgcactatgatgaacccgccgagaatcttgccgagaagagcctccctctacctaagtctacctcagggagccgtcggaggtctgctgtgtggaagcatttttacttgagtcctctggataactccaaagcagtctgtattcactgtatgaatgagttctcccgaggcaagaatggcaaggacttaggcacaagttgcctaatccgtcatatgtggagggcccacagagccatcgtgctgcaggagaatggtgggacaggaattcctcctctgtactccacgccccctacactgctgccatccctcctgcctcctgagggagagctgagcagcgttagctctagccctgtgaagcccgtgcgcgagtccccctcagcttctagcagccccgaccgactcacagaagacctccagtctcacttgaaccccggggacggactgatggaagatgtggcggccttcagcagcagtgatgacataggagaggcatctgcttccagccccgagaagcagcaggccgatggattatccccccgtctctttgagtctggcgccatctttcagcagaataagaaggtgatgaaacgcctgaagagtgaagtttggcaccatttttctctggcgccgatggacagcctgaaggcagagtgccgatattgtggatgcgcaatatcccgagggaagaaaggtgatgtgggaacgagctgcctcatgcggcacctgtatagacgccacccagaggttgtggggtctcagaaagggtttctgggggcgtccttagctaacagcccctacgccacattggcatctgccgagtctagcagctcgaagctaactgatctaccgaccgtggtgaccaagaacaatcaagttatgtttcctgttaactcaaaaaaaacgtccaagctctggaaccatttttctatctgttccgcggatagcacgaaggtggtctgtttacattgcggacgcaccataagtagggggaaaaagccaaccaacctcggtacatcatgcctgttgaggcacttacagagattccattctaacgtcctgaagacggaagtctcagaaactgcgaggccatctagcccagatacccgcgtgcccaggggcacagagcttagcggcgcgtccagctttgacgacacaaatgaaaagttttacgattctcatccggtagccaaaaagatcacatccctcattgctgagatgatcgctctcgacctacaaccctatagtttcgtcgataacgtcggctttaatcgtctgcttgaatatttaaaaccacagtattctttgcctgctccaagctacttcagtaggaccgccatccccggcatgtatgataatgtgaagcagattattatgagccacctgaaggaagccgaatcaggggttatacacttcacttcaggcatttggatgagtaaccagactcgagagtacctgaccctaaccgcccactgggtgtctttcgagtcacccgcccgacctaggtgcgacgaccatcactgcagtgccttactcgacgtgtcccaggttgactgcgactacagtggcaacagcattcaaaaacagctggagtgttggtgggaggcttgggtgactagcaccggactgcaagttggcataacggtcaccgacaatgcatccattgggaaaaccctcaatgagggcgaacatagctctgtgcagtgcttctcacataccgtaaatcttattgtctctgaagcaatcaaatcccagcgaatggtccaaaatctcctctccctcgcaagaaaaatctgcgagagagtacatcgtagccctaaagcaaaagagaaactagctgaactgcagcgcgaatacgccctcccccagcatcatctgattcaggatgtgccctcaaaatggtccacttctttccacatgctcgaaagactcatagaacagaagcgggctatcaatgaaatgagtgttgagtgcaacttcagagagcttatcagctgtgaccagtgggaggtcatgcagagtgtatgtagagctcttaaaccatttgaagctgccagcagagagatgagcactcagatgtcaaccctgagtcaagtcatcccaatggtgcatatcctgaaccgtaaagtggagatgcttttcgaggagacaatgggtatcgataccatgctccgaagcctgaaagaagctatggtttcgagactgagcgcaacgttacacgatcccagatacgttttcgctacattactagatccccgctacaaggcctcactcttcaccgaagaggaggctgagcagtacaagcaggacctgatccgggagttggaattaatgaatagcactagtgaagatgtagctgcttctcaccgatgcgacgcaggctccccttcgaaagactccgccgccgaggagaatttgtggtcattggtggccaaggttaagaaaaaagatccccgagaaaagctgcctgaggctatggtactagcctacctggaggaggaggtcttagaacactcctgtgatccgctgacctattggaacctcaagaaggcctcctggccaggattgagtgctctggccgttcgattcctgggctgccccccgtctatagtccccagcgaaaaattgttcaacacaccaacagagaatggcagcttaggtcagtcccgcctcatgatggagcatttcgaaaagctcatcttcctcaaggtcaacttgccgctcatttatttccagtactag

SEQ ID NO: 13737 - DNA, 744 bp, synthetic construct
  source 1..744: mol_type = other DNA; note = Synthetic coding sequence
atgcagccaatactgcttctactagcattcctgctgttaccgcgcgctgacgccggagagattattggtgggcacgaggccaagccccactcccggccctatatggcttacctgatgatctgggaccagaagtctctgaagagatgcggaggcttcctaattcgcgatgattttgtgttgaccgcagcccactgttgggggagctccattaatgttaccctcggcgctcacaatattaaagagcaggagccaacccagcaattcatccccgtcaaacgccctattcctcatccggcatacaacccaaagaatttctcaaacgatatcatgttgttacagctggagaggaaggccaagcgcaccagggccgtgcaaccacttaggctcccttcaaataaagcgcaggttaagcctggacaaacttgttcagtcgccgggtgggggcagaccgcacctcttggcaaacatagccatacgctgcaagaggtgaaaatgacagtgcaagaggaccgcaagtgcgaaagcgaccttaggcactactacgacagtacgatcgagctgtgcgtcggagatccggaaatcaagaaaacttctttcaagggagacagcggcggcccgctcgtttgtaataaagtggcacagggcatcgtgtcctatggccggaataacggaatgcccccaagggcctgcaccaaagtttcttccttcgtgcactggataaaaaagaccatgaagaggtactag

SEQ ID NO: 13738 - DNA, 1062 bp, synthetic construct
  source 1..1062: mol_type = other DNA; note = Synthetic coding sequence
atggaggatggagtgttgaaagaaggcttcctagttaaaaggggtcatattgtccataactggaaggcccgctggttcatcctgcgccagaacaccttggtttactacaagctagaaggtggacggagagtgacccctccgaagggccgaatcctcctggatgggtgtactattacgtgtccttgcttggagtacgagaatcgccctttactgattaagctgaaaacccaaacctctactgaatactttctggaggcttgctctagggaggaacgcgatgcatgggcatttgaaatcaccggcgccattcacgcagggcagcccgggaaggtccagcaactgcactcattgagaaatagttttaagctcccaccccatattagtcttcacaggattgtggacaaaatgcacgattccaacactgggatccggtcttcgccaaacatggagcagggttcgacatacaaaaaaacattccttggatctagtctggtggattggctgattagcaattctttcacggcaagtcgcttagaagccgtgacactcgcctccatgctgatggaagagaacttcctgagacccgtcggcgtccgaagtatgggagcaattcgctccggtgatcttgcagaacaattcctcgatgactctacggcactttacactttcgccgaatcatataaaaagaagataagccctaaggaggagataagcctctcgactgtggaactcagcgggaccgtcgtgaagcagggttatttagccaagcaaggtcacaaacgaaaaaactggaaggttagaagattcgtgcttcgcaaagacccggcttttttgcactactacgatccttccaaagaagagaaccggcccgtggggggtttttctttaagggggtcgctcgtctcggccttggaagacaatggggtgcctaccggcgttaaggggaacgtgcagggaaacctgttcaaagtcattaccaaggacgacacgcattattacatacaggcatcatcaaaagctgagcgtgccgagtggattgaggcaattaagaagctgacatag

SEQ ID NO: 13739 - DNA, 2025 bp, synthetic construct
  source 1..2025: mol_type = other DNA; note = Synthetic coding sequence
atggcagaagtgccagaggactatgactcaggccctgacgaggacggagagttggagccggagcgccccgaactccccgggttacacaaactgtacgagaacgcagaacctgacaccatggccaaagctgactctaagctgcctgcagagatataccaggaacctcagcccgaaacggaggaggaggattttaaagaaggcgagcctgattccgcgaaaaacgtccagctgaaacctgggggcacgtcgcaggagggaatcgctaaagagagcaaacgggacgttccatctgaaacagagccagggattcaccaggaggttaagtcagaaaccagccgggagatgggggagtttttcaaggacctcgaggctcctatggacgagacacataaagagagcgacctggaacctcctgaagaggcaaagcccaatgtaaccgaggatgtttttctcgaaagcgccatggagacagaccctgatccagtaccacccaccgaaaccatgtcagaagtatccggggcaaccgtgcgcgagagaaatctggagttactggaggaggagacagagcccggcgtgccagaagagagcctcagggtgcagcatgaagagacaggcttggaacccccagagcaaaccaagcaggatttcccctccgagaagctgggtgaatccctagaggagacagatttgcaaccgcctaaaatgaccaagcctgagacacccgaagaaacccagcgggaatcaaccgaaaaaaagcggacagagcctcctgaacaggctcgcctcgaattcctggagaaggagccgaggaagtcctccgaagaggctgggctggagccacccgaagagacacagcccgaagtacccgaggagatgcagcgcaaagctaccgaagagaagggaacagaactgccagaaaggaccaagccagattttcctgatcataaaccgaggaaatccaccgacgaaaacgttccagaaccactggaagaaattaagcttgagtttccagaagaagagagtaggaagaccaatgaagagactatcctggagcagagcgagatgatgaaaccggaatctcctgaggagatccgcaagtccaacgagaagaagaatccacagccccccgaagagactggaccagtccttccccaggaaatcaacccccaggttgaggagaagacccaaaccaagcccactgaaaaaattctggagctgcccgatgaaacaaagccccgagaaacccatgtggagttttcgaaagaggaccggcccgagcctatcaaatcgaagtatagtgttggtaacgacgagctggaacaccgggaacctaagaggggcaagctcagtctgtcagataagttccggaaggagtattacgcattagggagcctgcgtgagagtgaggaatctatcggaacccactacgagttcctgcagccactgcagaagctgcttaatgtatccgaagaatgctcatattctgacccgtctgaatcccagacggagcttagtgagttcgtccacgaaaaagaggtcgtagacctgagccaggagctgaaagagcgggtgtccgaagacgatgaaacacagcccgaaaaggggactgaacttcaattcgaacatctgaactgggaccccgaagaagtcgccgagtggatctcccagttggggtttccacagtataaggagtgttttattacaaactttatctccgggcggaagctcatccacgtaaactgtagtaacttaccacagatgggcattactaactttgaggatatgaaagccatcagtcgacacacccaggaactcctggagatcgaggagcctctgtttaaacgctccatttccttgccgtatcgcgatatcatcggcctgtatctggaacagaagggccatacaggcatcaagtccgatagtctgaccctctccgagttcgtgaaggcggccgggctgcaggattatgcacctgaaatcacagctcctgaagaaaacgaagaattgccatgcacagaaccttag

SEQ ID NO: 13740 - DNA, 1689 bp, synthetic construct
  source 1..1689: mol_type = other DNA; note = Synthetic coding sequence
atgagacccgagccgggggggtgctgctgcaggagaacggtacgcgctaatggctgtgtggctaacggcgaggttagaaatgggtacgtgcgctcttctgcagccgcggccgctgctgctgctgctggtcaaatccatcacgtaactcagaacgggggcttatacaagcgtcctttcaacgaagcttttgaggagacaccaatgctagttgccgttctcacatacgtcggatacggtgtcctgaccctgttcgggtacttgagggacttcctgcgctactggcggatcgagaagtgccatcacgcaactgagcgggaagaacagaaggactttgtgtccctctaccaggatttcgagaacttttatacaaggaacctttacatgagaattagggacaattggaataggccaatttgtagcgttcctggcgcccgcgtcgatatcatggagagacagtctcacgattacaattggtccttcaagtacacaggcaacatcatcaaaggtgtgattaacatggggtcttataactacctgggctttgcccgaaacaccgggtcttgccaagaggctgctgccaaggtgcttgaagagtacggggccggagtgtgctcaacccgccaggaaataggaaaccttgacaaacatgaggagctcgaggagctggtggcaaggttcctgggcgtggaagccgctatggcctatggcatggggttcgccaccaactccatgaacatcccggctctggtaggcaaggggtgcctgatattatcggatgaactgaatcatgcctctttagtacttggagcccgtctgtcgggggccacaattcgcatattcaaacataacaacatgcagtcattggagaagctgctcaaggacgccatcgtctatggccagccaagaacacgccgaccctggaagaagattcttatactcgtggaaggtatatatagcatggaagggtccatcgtcagacttcccgaggtgattgcgctcaagaaaaagtacaaagcctatctgtacctggatgaggctcatagcattggggcactgggacccaccgggagaggcgttgtggagtatttcggcctggaccctgaagacgtggacgtcatgatggggacctttaccaaatcatttggagcgtctggcggctacatcggtggtaagaaagagcttattgattacttgagaacccactctcactctgcagtctacgccacatccctgtcgcctccagtggtggagcaaataattacttctatgaagtgtataatggggcaggacggcactagtctgggtaaagaatgtgttcaacagctggccgagaacactcggtacttccgccggcgcttgaaggaaatgggatttataatctatggtaacgaggattctccagtggtccccctgatgttgtatatgcctgcaaagatcggggcttttggcagagagatgctaaaaagaaacatcggtgttgtggttgtaggattcccagcaacacccatcatcgagtcccgcgcgagattctgtctgtctgcagcccacaccaaggaaatcctggacaccgctctgaaggaaatcgatgaagttggcgaccttctacaactaaagtactcacgacaccggttagtcccgttgttggatagacctttcgacgaaaccacgtatgaggaaactgaggactag

SEQ ID NO: 13741 - DNA, 2346 bp, synthetic construct
  source 1..2346: mol_type = other DNA; note = Synthetic coding sequence
atgtccagcagctccccgaccggacagatagcaagtgcagccgatatcaaacaggagaacggaatggaatctgcatccgagggacaagaggctcatagagaggtcgcgggcggggccgccgtgggcctgtctccgcccgctcccgcacccttccccctggagcccggtgatgccgctactgctgccgctagggtgtccggtgaggagggagctgtggcagctgccgcagctggcgccgccgccgatcaggtgcagctccactctgagttgcttgggcgacaccaccatgcggccgccgcagccgctcaaacccccctggcatttagtcccgaccacgtcgcttgtgtgtgcgaggctctgcagcaaggggggaacttagatagacttgcccgattcctttggtccctgccacagagtgacctgctccgcggtaatgagtcccttcttaaggctagagccctggtggctttccaccagggaatctatccagagctctactctatattggagagtcactcttttgagagtgcgaaccaccctctgctacaacagctgtggtacaaagcccgatacacagaagccgagcgagccagaggcaggcccttgggcgcagtggataaatatcgccttcgacgcaaatttcctctgcctcggacaatctgggacggtgaagagaccgtttactgttttaaagaaaagagtcgtaacgccctgaaagagctgtataagcagaacaggtatccatcccctgcagaaaaacggcacttggccaagatcacaggactgtcccttacccaggtcagtaattggtttaaaaacaggaggcaacgagataggaacccttctgagactcaatctaagtctgagagcgatgggaacccaagtaccgaggatgagagtagcaaaggacacgaagacctcagtcctcaccccctttctagtagctctgacgggatcacgaaccttagtctgtcctcccacatggagcctgtgtatatgcaacagatcggtaatgcgaagatttcgctgtcatcctccggagtgttgttaaatggttcactggtgccagccagcacgtcaccagtattcttaaatggtaacagtttcatccaagggccaagtggagtgatcttgaacggtctcaacgtggggaacacccaagccgtggcgctaaacccgccaaagatgtcctccaacattgtgtccaacggaataagtatgacagacattctggggtccaccagccaagacgtgaaggaattcaaggtccttcagtctagtgctaactctgcaacgacaaccagctatagtcccagtgtccccgtgagctttcctggattgatcccttccacagaagtaaagcgtgaaggaatccagacagtcgcaagccaggatggtggaagcgtagtgaccttcacaacgcctgtccagatcaatcagtatggcatcgtacagattccaaattccggagccaatagtcagttccttaacggatccatagggtttagtcctctccaacttccccccgtgagtgtggctgcttcacagggcaacatttctgtgtcctcatctacctcagatgggtccacgttcacgtcagagtccactacagttcagcaaggaaaagtgtttttgagtagccttgccccgtctgctgtcgtgtacacagtgccgaataccggccagacaatcggttctgtgaagcaggagggccttgagcgcagcctagtctttagccaattaatgcctgtgaaccagaacgctcaggtaaacgctaatctgtcttccgaaaacatctccggctcaggactacacccccttgcctctagcctggtcaatgtcagtcccacccataatttttctctgagcccaagcaccttgctgaaccctaccgaattgaatagagatatcgccgactcccagccaatgtctgcgccggttgccagcaaatcaacagttacgagtgtgtcaaatacaaattacgccaccctgcagaattgcagcctcatcacaggtcaagatttgctgtcagttcccatgacccaggcggcactgggagagattgtacccacagctgaggaccaggttggtcacccctctcccgcggtgcatcaggatttcgtgcaggaacacaggctggtgctgcagagcgtcgcaaacatgaaagagaacttcctttctaactccgaaagcaaggcgacatcttcgttgatgatgctggatagcaaatcgaagtatgtgttagatggcatggtggacaccgtttgcgaggacctagagacagataaaaaggagttggctaagcttcagaccgtacagctggatgaagacatgcaggatctttag

SEQ ID NO: 13742 - DNA, 1392 bp, synthetic construct
  source 1..1392: mol_type = other DNA; note = Synthetic coding sequence
atgggaaaagaaaaaacacatattaacatcgtggttatcggccacgtggatagcggtaagtccaccaccaccgggcacttgatttacaagtgcggcggaatcgataagcgaacgatagagaaattcgagaaggaagctgctgaaatgggtaaaggctccttcaaatatgcctgggttctggataaactgaaagctgagcgcgaacgtggcataacaattgatatctctctctggaaattcgagactaccaagtactacattactatcatcgatgccccggggcatcgtgactttattaaaaatatgattacaggaaccagtcaagcggattgtgcggtgctcattgtggctgctggtgttggagagtttgaggccggcatctccaagaatggccagacaagagagcacgctttgctcgcctacacactgggagtcaagcagcttatcgtgggtgtgaacaagatggattccaccgagcctgcgtactctgagaaaaggtatgacgaaatagtcaaggaggtttccgcatacataaagaaaattggatacaatcccgctacggttccctttgtgcctatcagcgggtggcatggtgataacatgctggaaccttctccaaacatgccctggtttaaaggatggaaggtcgaaagaaaggagggcaacgccagtggagtgtccctcttagaagcactggacaccatcctgccccctacccgtccgaccgacaaacctctgagactgcccttgcaggacgtttataagatagggggcattggaacagtgccggtggggcgcgtcgaaacaggaattttacggccgggcatggtggtcacctttgcaccagtgaatattactacggaagtcaagtctgtggaaatgcatcacgaagcactctctgaggcgctgcccggggataatgtgggattcaacgtgaaaaatgtatcggtgaaagatatccgaagggggaacgtgtgtggcgacagtaagtcagaccctccgcaggaggccgcacagtttacaagccaggtgataatattgaatcatccaggccagatatctgccgggtactcacctgttatcgattgccacacagcccacatcgcttgcaaattcgctgagcttaaagaaaaaatcgataggcggagtgggaagaagctggaggataaccccaagagccttaagtcaggggatgcggccattgttgaaatggtgccagggaaaccgatgtgtgtggaatcttttagccaataccccccccttggacgcttcgccgtccgcgacatgaggcagacggtggctgtcggtgttatcaaaaacgttgaaaagaaatccggaggagccggcaaagtgaccaaaagcgcccagaaagcacagaaggctggcaaatag

SEQ ID NO: 13743 - DNA, 600 bp, synthetic construct
  source 1..600: mol_type = other DNA; note = Synthetic coding sequence
atggctgctgccaacaaggggaaatgtctaccgggcgtcgtgggtctggcccaggccctcccagtggggcctggtagacgcgctatcgctgcgggcaacaaaccgagggtccgatcgattcgcttcgcggccggccacgacgccgagggatcgcattcacatgtgcatttcgacgagaaacttcatgactccgtggtgatggtgactcaggagtccgacagtagcttccttgtgaaggtgggctttcttaaaatcctgcatcgctatgaaattacctttaccttgccgcccgtgcacagactgagcaaggacgtgcgggaagctccggtccctagcttgcatctaaaactactatccgtggtacctgtccctgaaggttactccgtcaaatgtgaatactctgcccacaaggagggtgttctgaaggaagagatcctccttgcatgcgagggtgggacggggacctgtgtaagagtaacggtgcaggctagggtgatggatagacatcacggtacgcccatgctgcttgacggtgtgaaatgtgtgggtgcggagctagaatatgatagtgaacattctgactggcacggtttcgattag

SEQ ID NO: 13744 - DNA, 270 bp, synthetic construct
  source 1..270: mol_type = other DNA; note = Synthetic coding sequence
atgcaactgcaggcaagtctatcattcctgcttattctgacactgtgccttgagctccgctctgagctcgcccgcgataccatcaaggacctgttacccaacgtgtgcgcattcccgatggagaaggggccctgtcaaacctacatgacccggtggttcttcaatttcgagaccggcgagtgtgagctgttcgcctatggtgggtgtggaggtaactccaacaactttcttcgcaaagaaaagtgtgaaaaattttgcaagttcacgtag

SEQ ID NO: 13745 - DNA, 1251 bp, synthetic construct
  source 1..1251: mol_type = other DNA; note = Synthetic coding sequence
atgtcggaggcagacggacttcgtcagagacgccctttgcgtccacaggtagtcactgatgacgatggccaggctcccgaagccaaggacggctccagcttttccggacgcgtctttcgcgtcaccttccttatgctggccgtgagcctgacagtgccactgctgggagccatgatgttgctggagtctcccattgatccccagccactcagtttcaaagaaccacccttgctgctgggggttctacaccctaacaccaaactgcgacaggccgagcggctcttcgaaaaccagctcgtgggtcccgaaagcatcgcgcacataggcgacgtaatgttcaccggtaccgctgacgggcgcgttgtgaaacttgagaacggtgagatcgagacaattgcaaggtttgggtccggaccctgcaaaacacgggacgatgagccggtgtgcggaaggcctctggggatccgcgccgggcccaatgggactctctttgtggcagatgcatacaagggcctctttgaggtaaatccctggaagcgcgaagtcaaactcctattaagcagtgagacgcctatcgaggggaagaatatgtcttttgtgaacgatttgaccgttacacaggacgggcgaaagatctatttcacggactcttcatccaaatggcagagaagggactacctcttacttgttatggaggggaccgacgatggaaggctcctggagtatgacactgttactagagaggtgaaggtcctgttggatcaattaaggtttcctaacggagtacaactaagtccagctgaagacttcgtgctcgtggcagaaacaacgatggcccgcattaggagggtttatgtcagtgggctgatgaagggaggggcggatctgttcgtagaaaatatgccaggttttccagacaatatccggccatcctcttctggtggttactgggtaggaatgagtacaatacggccaaacccagggttctctatgttagattttctgagtgagagaccctggattaagcgcatgatcttcaagctcttttcacaggagactgtcatgaagtttgtcccacgctacagccttgttctcgagctgagcgacagcggtgcatttcgcagatctcttcatgaccccgatgggctagtagcaacctacattagcgaggtgcacgaacacgacggccatctgtaccttggcagttttcgatccccgttcctgtgcaggttaagcctgcaggcagtgtag

SEQ ID NO: 13746 - DNA, 870 bp, synthetic construct
  source 1..870: mol_type = other DNA; note = Synthetic coding sequence
atggtgggggtcaaacctgtcggctctgatcccgactttcaacctgagttgagcggagccgggagccggctagccgtcgtcaagttcacaatgcgaggatgtggaccgtgcttgagaattgcccccgctttctcctcaatgtccaataaatacccacaggccgtttttctggaagtcgatgtccatcagtgccagggaacagctgccaccaacaacatttcagctactcccacgttcttgttcttccgcaacaaggtcaggattgatcagtaccagggagcagacgccgtgggcctagaggaaaaaatcaaacagcacctggaaaacgaccccgggagcaacgaagataccgatatacctaagggttacatggacctcatgccttttatcaataaagctggctgtgagtgccttaatgaatcagacgagcacggattcgacaattgccttcgaaaggatacaaccttccttgagagtgactgcgatgagcagctcctaatcacagtggcttttaaccagccagtcaagctctattcgatgaagtttcagggccctgataacggtcaggggcctaaatacgtgaaaatttttatcaatcttccacggtcaatggattttgaggaggctgagcggagtgagccaacacaagccctggaacttaccgaagacgacattaaggaagatggcattgtgcccctgcgatatgtgaagttccagaacgtgaatagcgttacaatttttgtgcagtctaatcagggtgaagaggagactacacgcatctcgtactttaccttcatcggaacacccgtgcaggcaactaatatgaatgattttaaacgggtcgtcggcaagaaaggcgagtcccactag

SEQ ID NO: 13747 - DNA, 1164 bp, synthetic construct
  source 1..1164: mol_type = other DNA; note = Synthetic coding sequence
atggtgtttgctttctggaaggttttcttaattttgagttgtctagcaggacaagttagcgttgtacaggtgaccattccagacggctttgtgaacgtgaccgttggatctaacgtcacattgatctgtatctacaccacgactgtcgccagccgggagcagctgagcatccaatggtctttcttccacaaaaaagagatggaaccgatctcaatctacttcagccaaggcggacaggctgtcgccataggccaattcaaagacaggatcactggaagtaacgatcccggaaatgcctccataaccatctcccatatgcagcctgcagattcaggcatttatatctgtgacgtgaataaccccccagactttctggggcagaatcagggcattctcaatgtgtcagttctggtgaagcctagtaagcccctgtgtagtgtgcaaggacgccctgagactgggcacactattagtctctcctgcctgtcagcgttgggcactcctagtcctgtgtactattggcacaagctggaagggagagatatcgtccctgtgaaggagaactttaacccaacaaccgggattctggtgattggaaatcttacaaactttgaacaagggtactatcagtgcacagctattaataggctgggaaacagctcgtgtgaaatagatttgacttcttctcaccctgaagttggcatcattgttggagccctcatcggttctctggttggtgcggcaatcatcattagtgttgtttgtttcgcgaggaataaagccaaggcaaaggcaaaggagaggaacagtaaaacaatcgccgagttggagccaatgactaagatcaaccctagaggagaatctgaagccatgccaagagaagatgcaacacaacttgaagtcacacttccttcctcaattcacgagacaggacctgatacaatccaagaacccgattacgagcccaagccaacgcaggaaccggcccctgaacctgctccaggttctgagccaatggccgtgccagaccttgatatcgaactcgagctggaacccgagacccagagtgagttagagccagagcctgagccagaacccgaatccgagcccggggttgtcgtggagcccctctccgaggatgagaaaggggttgtgaaggcatag

SEQ ID NO: 13748 - DNA, 1821 bp, synthetic construct
  source 1..1821: mol_type = other DNA; note = Synthetic coding sequence
atgagcgatacatcggagagtggcgccggcctgaccagatttcaggctgaagccagtgaaaaggattcttcctctatgatgcagacactgcttaccgtgactcagaacgtggaggtcccggagacacctaaggcttcaaaagctctggaagtctcggaagacgttaaggtgtcaaaagcaagtggtgtaagtaaagccacggaagtctccaaaaccccagaggcacgggaagctcctgcaactcaagcctcctctacgactcagctcaccgatacccaggtgcttgccgcggagaacaagtcactcgccgccgacactaagaaacagaatgctgatcctcaagcggtaacaatgcccgccacggaaactaagaaggtgtcgcacgtggcggacacaaaagtcaatacaaaagcccaggagaccgaggccgcaccctcccaggccccggcagatgagcctgagcctgaatccgcagcagcccaatcccaggaaaatcaggataccagaccaaaggtcaaagccaagaaggcacgcaaggtcaagcacctggatggggaagaagacggaagttctgaccaaagccaggcaagcggaactacagggggccgaagggtttcaaaggccctcatggcatctatggcccggcgggcttctaggggtcccattgctttttgggctaggcgggcaagccgcaccaggctcgcggcctgggccaggagagctttactcagcctgaggtctcccaaggcgagaagagggaaggcacggaggagggctgcgaaacttcaatcaagccaggagcctgaagcccctcctcctcgggacgttgccttactccagggacgcgctaatgatctcgttaagtacctgttggccaaggaccagaccaagatccctatcaaaagatctgatatgctcaaggacatcatcaaagaatacaccgatgtttatccagagataatcgaacgggccggttattcactcgaaaaggtcttcggaatacagctgaaggagattgacaaaaatgaccacctctatatattgctgagcacgcttgaacccacagatgctggcattctgggcaccaccaaggactcgcccaagttggggctgctcatggtattgctgagcattattttcatgaacggaaaccgctcgagtgaggccgtgatctgggaagtgctcagaaaactgggactacggcccggtattcaccacagccttttcggcgatgtaaaaaagctcatcaccgatgaatttgtcaagcaaaaatatctcgactacgctagagtccccaactcaaatccccccgaatatgagtttttctggggacttcgcagctattacgaaacctccaaaatgaaggtactgaagtttgcatgcaaagtccagaagaaggatcccaaagagtgggccgcgcaatacagggaggcaatggaagcagacctcaaagccgcagcggaggctgctgccgaagctaaggcgagagctgagatcagagcccgcatggggatcgggctgggaagcgagaacgccgcaggaccctgtaattgggacgaggctgacattggtccatgggccaaggcaaggattcaggctggtgcagaggccaaggccaaagctcaggagagcggatctgcttctaccggagccagcacctcgaccaacaatagcgcatctgccagtgcctctactagcggtggcttctcagccggcgcctcgctaaccgcgacactgacttttggtctgttcgccggacttgggggagctggcgcaagtacctccggcagttcaggagcttgcggcttctcttataaatag

SEQ ID NO: 13749 - DNA, 369 bp, synthetic construct
  source 1..369: mol_type = other DNA; note = Synthetic coding sequence
atgactacggctacaagacaggaagtgctggggctatatcgtagcatttttcggctggcgaggaagtggcaggctacctcgggacaaatggaagataccatcaaagaaaagcagtatatcctaaacgaagctcggactctctttagaaaaaataaaaatcttactgatacagacctgattaagcagtgcattgacgaatgcaccgctagaattgagattgggttgcactacaaaattccatatccccgtcccatccatctcccgcccatgggactgaccccactcagaggccgtggattgaggtctcaggaaaagctgcgcaagctctcaaagcccgtctatctccggagccatgacgaagttagctag

SEQ ID NO: 13750 - DNA, 582 bp, synthetic construct
  source 1..582: mol_type = other DNA; note = Synthetic coding sequence
atgctgggagttcttgagctgctcctcctgggggcagcttggctggccggccctgcccgggggcagaacgagaccgagcctatagtacttgagggtaaatgtctcgtggtctgcgacagcaatcctacctccgatcccactggaactgctttaggcatttcggtccggagtggatccgccaaagtggccttttctgcaattcgctccacaaatcacgagcctagcgagatgagcaatcgtactatgatcatctacttcgaccaggtactggttaatatcggcaacaatttcgactccgagcgatccacttttattgcgccacgaaagggtatctactctttcaactttcacgtagtcaaggtttacaaccggcaaaccattcaggtgtcacttatgctgaacggctggcccgtcataagcgcttttgccggggatcaagacgtcactcgggaggccgcctctaacggggtcctgattcagatggaaaaaggggaccgggcctatctgaaactggagagagggaacttgatgggcgggtggaagtactccactttctcaggtttcttggtgtttcctttgtag

SEQ ID NO: 13751 - DNA, 1578 bp, synthetic construct
  source 1..1578: mol_type = other DNA; note = Synthetic coding sequence
atgtcgcgacagctgctacctgttctgttgcttctgttgcttcgcgcatcttgcccatggggtcaagagcagggtgctagatcacctagcgaggagcccccagaggaagaaattcctaaggaagacggaattttggtcctgtctcgccacactctgggtcttgctttgcgggagcatcccgcactgctggtggaattttatgccccctggtgtggccactgtcaggccttggctcctgaatacagcaaagccgccgctgtgttggccgctgagtctatggttgtgacactggccaaggtggacggcccagcacagcgagagctggccgaagagttcggcgtgactgagtatcccaccctaaagttctttcgcaatggtaaccgcacacaccctgaggagtatacgggcccacgtgatgccgagggcatcgccgaatggttgcgcagacgggttgggccgtccgccatgcgactggaggatgaagccgctgcccaagcccttatcggcgggcgggatctcgttgtgataggcttcttccaggacctgcaggatgaagacgtggccaccttcctcgccttggcacaggacgctttggatatgacattcgggctgactgacaggccacgactcttccagcaatttgggcttacgaaggacactgtggttcttttcaaaaaattcgacgagggtagggccgactttccggtagacgaagagcttgggctggatctgggcgacttgagccgctttctagtaactcactcgatgcgtctcgtgaccgagttcaattcacaaacgtcggccaagatattcgctgcccggatcctcaaccacctgttgctgttcgttaatcaaacattagcagcccatagagagctgcttgccggtttcggcgaggctgctcctcggttccgggggcaggtgttattcgtggtggtggacgtggccgctgacaacgagcacgtacttcaatattttggcctaaaagctgaggctgcgcctacactccgtctggtgaatcttgagactactaagaagtatgctcctgttgacggggggccagtaaccgccgcttctattaccgccttttgccacgcggttttaaatggccaggttaagccttacctgctctctcaagaaattcctcccgattgggatcagagacctgttaaaacccttgtcggaaagaatttcgaacaggttgcgttcgatgagactaaaaatgtgttcgtgaagttttacgctccgtggtgcacccattgtaaagagatggccccagcctgggaggcccttgccgaaaagtatcaggatcatgaagacatcattattgctgagcttgacgcaacggctaatgagctggatgccttcgccgttcacggcttccctactctgaagtactttccagctgggccaggccgcaaagtgatcgagtataagtccacccgtgatctggagacattcagcaagttcctggacaatggtggagtgcttcctacagaagagcctccagaggagccggccgcaccattccctgagcccccggcaaatagtacgatgggcagcaaagaagagctgtag

SEQ ID NO: 13752 - DNA, 2262 bp, synthetic construct
  source 1..2262: mol_type = other DNA; note = Synthetic coding sequence
atggcagacaagcgcaagctgcaaggggagatcgataggtgccttaagaaggtgagtgaaggcgttgaacagttcgaagacatctggcagaagctccataacgccgctaacgccaatcaaaaagagaagtacgaagctgatcttaagaaggaaattaagaagctgcagagactgcgggatcaaatcaagacttgggtggcctcaaatgagataaaggacaaaaggcagttgatcgataaccggaaactcatcgaaacgcagatggaaagatttaaggtagtggaaagagagaccaaaactaaagcctatagcaaggaaggcttggggctggctcagaaagttgaccctgcacagaaggagaaagaagaagtggggcaatggcttacaaacactatcgataccctgaacatgcaagtggaccagtttgaatctgaagtggaaagcttatcggtgcagactcgaaagaagaagggggacaaggacaagcaagaccgcattgagggactcaaacgacatatcgagaaacatagataccacgtgcgcatgctcgagacaatcctgagaatgctggataatgactcaatactggtcgacgcaattagaaagattaaagacgacgttgagtattatgtggatagctcgcaggatcctgattttgaggagaacgagttcctgtacgacgatcttgatctcgaggacataccacaggcactggtcgcaactagcccgccaagccactctcatatggaggatgagatcttcaatcaatcaagctctacccccacctctaccacaagtagctcccccattccacctagccccgctaattgcactactgaaaactctgaagatgacaagaagcgcggccgatccaccgattccgaagtgtcacaatcgcctgctaagaacgggagtaagcccgtacatagcaatcagcacccccagagcccagccgttccacccacctaccccagcgggccaccacccgccgcctccgcattatccactacgccggggaacaacggtgtgcctgcacccgccgcacctccaagtgccctggggcccaaagcatcacccgcaccttcccataattcggggactccagcaccctacgctcaggctgtggcccctcctgccccatctgggccttccaccactcaacctcggcctccctcagtacaaccctccggcggcggcggaggaggaagcggcgggggtggctcctcatccagcagtaactcatctgcaggcggcggagcgggcaaacaaaatggcgctacatcatacagctctgtggttgcagactccccagcggaggtcgctctgtcttcttccggaggcaataacgcctcttcgcaggcactcgggccgccttccgggccccacaacccccccccatctacctcaaaagagcctagcgctgcggcacccactggggcaggcggtgttgcgcccgggagcggaaataacagcggcggaccttccctgctggtccccctcccggtcaacccacccagttcccccacaccctcattttccgatgccaaagccgcaggagccctcctgaacgggcccccccagttctcgacggcacccgagattaaagccccagaaccattatcaagcctgaagagtatggcggagcgggcggcaatctcatctggcatcgaagacccagttcccacactccaccttacagaacgggacatcattcttagttccaccagtgcaccaccagctagcgcgcagccccctcttcaattgagcgaggtgaacataccgctgtctctgggagtttgccctctcggcccagtacccctgacaaaagagcaactgtatcagcaggctatggaggaggccgcctggcaccatatgccccatccttctgactctgagcgaattcggcaatacctgccaagaaatccgtgcccaacgcctccctatcaccaccagatgcctcccccacatagcgataccgttgaattttatcaacggctgagtaccgagactttatttttcatcttctattacctggaaggcaccaaggctcagtatctggcagctaaagctctgaagaagcagtcctggcgcttccacacaaaatacatgatgtggttccagcgccacgaggagcctaagaccattacagatgaattcgagcaggggacctatatctacttcgactacgaaaaatggggccagcggaagaaggagggtttcacatttgaatataggtatctagaggatagagatctgcaatag

SEQ ID NO: 13753 - DNA, 1146 bp, synthetic construct
  source 1..1146: mol_type = other DNA; note = Synthetic coding sequence
atgcccttcggaaatacccataacaaatttaaactgaactacaaaccagaagaggagtaccctgacctgagcaaacacaacaaccacatggctaaggtgctaacacttgagctgtacaaaaagctgagggacaaagagacacccagcgggttcaccgtggacgatgttatccaaaccggtgttgacaatccgggtcacccatttataatgactgtgggctgcgtcgctggagacgaggaatcctatgaggtgtttaaggaactgtttgatcccatcatttcagacagacatgggggctataagccaacagacaaacacaagacagacctcaatcacgagaacctgaagggaggagacgatcttgatcctaactatgttctgagttctagagtgagaaccggccgcagcataaagggttacacactcccacctcattgttcacgaggggaaaggagagctgtggagaagctatcagttgaagcactgaactccttgaccggcgaattcaaagggaaatattacccattaaagtccatgacagagaaagagcagcagcagctcatagatgaccatttcctgtttgacaagcccgtgtcccctctactcttagcttctgggatggcacgcgattggcccgacgcacgcgggatctggcataacgataacaaatcatttctagtgtgggtcaatgaagaagatcatctcagggtaatttctatggagaaggggggcaatatgaaagaggtatttaggaggttctgcgtcggtctgcagaagattgaagagatcttcaagaaagcaggtcatcccttcatgtggaatcagcacctcggatacgtcctgacttgtccaagcaacctggggaccggactccgcggtggggtccatgtgaagctcgctcatctgtcaaaacatcctaagtttgaggaaatccttaccaggctcagattacagaaaagaggcaccggaggagtcgacaccgcggcagtggggagcgtattcgacgtaagcaatgctgaccgactgggatctagcgaggtcgagcaggttcaattggtagtcgatggcgtgaaactgatggtggaaatggaaaaaaaactcgaaaagggacagagtatagatgatatgattcccgcacagaaatag

SEQ ID NO: 13754 - DNA, 300 bp, synthetic construct
  source 1..300: mol_type = other DNA; note = Synthetic coding sequence
atggcccagggccagagaaaatttcaggctcataaaccggccaagtctaaaaccgccgctgccgcctcagaaaaaaatcggggtcccagaaaagggggcagggtcatcgccccgaaaaaggctagggtagtgcaacaacaaaagcttaagaagaacttggaagtgggcattagaaaaaaaattgaacacgacgttgttatgaaggcttcctcctccttgcctaagaagctggcactacttaaagctcccgccaagaaaaaaggcgcagccgcagccacttccagcaagacccccagttag

SEQ ID NO: 13755 - DNA, 1491 bp, synthetic construct
  source 1..1491: mol_type = other DNA; note = Synthetic coding sequence
atggacgatgtgcccgcgccaacacctgccccagcaccaccggcggcagcggccccaagggtgccctttcattgcagtgagtgtgggaaaagctttaggtaccggagtgaccttcggcgccatttcgccagacacacggcgttgaagccccacgcctgtccccggtgcggcaaaggcttcaaacatagtttcaacctggctaaccacctgaggagtcatacgggcgaaagaccttatcggtgcagcgcctgtcctaaggggttccgggactcaactgggcttcttcaccaccaagtggtccacactggcgagaagccatattgctgccttgtgtgtgaactgaggttttcttcccgtagttccctcgggcgccatctgaaaaggcaacataggggtgtccttccctctcctttgcaacctgggccgggattacccgctctgtccgctccttgctcggtgtgctgcaatgtgggtccctgtagcgtgtgcggaggctctggcgccggtgggggagaggggcccgagggagcaggggcaggcttaggaagctggggtctggccgaagccgccgccgctgctgccgcctctctgcctcccttcgcctgtggggcttgcgcaagacgattcgaccacggtagggaactggccgcccactgggcggcacacaccgatgtaaaacctttcaaatgccctcgctgtgagcgggattttaatgcccctgcccttctagaacggcacaaactcacccacgatcttcaaggtccgggtgctccccccgcgcaggcttgggcagccggaccaggcgcgggaccagaaacagctggcgaggggactgccgcagaggctggcgatgcgccactcgcgagtgacaggcggctgcttcttggcccggcggggggtggtgtgccaaagctaggtggactgcttcccgaaggcggtggggaggccccagccccggccgctgcagccgagccgtccgaggatacattataccagtgtgattgcggaactttctttgcctccgctgctgcactggcgtctcacctggaagcccattctgggccggccacctatggctgtggtcattgtggcgccctgtatgcggctctggccgcacttgaggaacacaggcgagtgtcacacggcgagggggggggtgaggaggcagccacagctgctagggagcgggaacctgcttctggcgagcctccctccggctcaggaagaggcaagaagatcttcggatgtagtgagtgcgagaaattgtttaggtccccccgagacttggagaggcatgtactcgtacataccggggaaaagccctttccatgtctggagtgtggcaagttcttccgtcatgagtgctacctgaagcgccaccggctccttcatggcacagagaggccatttccatgtcacatttgtggtaaaggatttattaccttgagcaacttgagtcgccacttgaagttacatcgcgggatggactag

SEQ ID NO: 13756 - DNA, 663 bp, synthetic construct
  source 1..663: mol_type = other DNA; note = Synthetic coding sequence
atgaaaagcgtaatctaccacgcactgtcccagaaagaggcaaatgacagcgatgtgcagcctagcggcgctcagcgggcagaggcgtttgtgcgagcattcctgaaaaggagcactccaaggatgtcccctcaagcccgcgaagatcagctgcagagaaaggccgtggttctagagtacttcaccagacataaaaggaaagaaaagaagaaaaaagctaaaggcctgagcgcacggcaacgcagggagttaagattgttcgatatcaagcccgaacagcagcgatatagtttatttctcccccttcacgagctgtggaaacagtacattagagatctgtgctctggattaaagccagacacacaacctcagatgattcaagctaagttgctgaaagccgacttgcacggtgcaataatttctgtgaccaaatcaaagtgtccatcctacgtgggcatcacaggaatcttactgcaggaaaccaagcatatcttcaagataatcacaaaggaagacaggctcaaggttatcccgaagttgaactgcgtgtttactgttgaaactgacggttttatcagttacatctatggctccaaatttcagcttagaagcagtgagcgcagcgccaagaaattcaaggctaagggaaccatcgatctttag

SEQ ID NO: 13757 - DNA, 768 bp, synthetic construct
  source 1..768: mol_type = other DNA; note = Synthetic coding sequence
atggctcgagcgaaagcactgctgggaggtccaggcgaagagctagaagccgatacagagtacttagacccgttcgatgcccagccacaccctgccccaccagacgacggctacatggaaccatacgacgcacagtgggtcatgtctgaacttcccggccgcggtgtccagctttatgacacaccttacgaagagcaagatccagagacagcggacgggccccccagcggtcagaagccccgccaatcccgcatgccacaagaggatgaaagacccgccgatgagtatgatcagccatgggaatggaaaaaagaccacatcagccgcgccttcgctgtgcagttcgacagccccgaatgggagaggacacccgggtcagccaaggagctgaggaggccacctccgcgttctccacaacctgcagagagggtggatcccgctctacccctcgaaaagcagccttggttccatggacccttgaacagagcagatgccgaatcattactaagtctatgtaaagagggatcgtacttagtgaggttgtccgagactaatccccaagactgcagcctgtctctgcgctcatctcagggttttttacaccttaaattcgctcgcacacgtgagaatcaagtggtgctggggcagcactcaggcccattcccctccgtcccagagctggtcctgcattattccagtcgccccctgcctgttcagggggccgagcacctggctctcctttatccagttgtgactcagaccccctag

SEQ ID NO: 13758 - DNA, 858 bp, synthetic construct
  source 1..858: mol_type = other DNA; note = Synthetic coding sequence
atgagtgacgatttcctttggttcgagggaatcgcctttcccactatggggttccgcagtgagacgttacgcaaggtaagagatgagtttgtcatccgggacgaagacgtgattatactgacataccccaagtctggtaccaactggctcgccgagatcctttgtctgatgcattcgaagggagacgccaagtggattcagtccgtacctatttgggagcgatccccttgggtggagtctgagattgggtacaccgccttgagcgaaactgagtctccccgactattttcttcccacctgcctatccagctgtttccgaaaagctttttttcctcaaaagccaaagtcatatacctcatgcggaacccgcgggacgtgttagtatcaggctattttttctggaagaatatgaagttcataaagaaacccaagtcgtgggaggaatactttgaatggttctgccagggaaccgttctttatggcagctggttcgatcacatacatgggtggatgccaatgcgtgaggaaaagaatttccttctgcttagctacgaggagctcaagcaagatacaggtagaacaatagagaagatctgccagtttcttgggaagacactggaacccgaagaattaaatcttatccttaaaaacagctctttccaatctatgaaagagaataagatgagcaattacagccttctgagtgttgactatgtagtggacaaggcccagttgctgcgaaagggcgtgtctggagactggaagaatcactttaccgttgcccaagcggaggatttcgacaagctgttccaggagaaaatggctgatcttccccgtgagcttttcccatgggaatag

SEQ ID NO: 13759 - DNA, 1647 bp, synthetic construct
  source 1..1647: mol_type = other DNA; note = Synthetic coding sequence
atgaaaaccccagcggacacagggttcgcatttcccgattgggcttacaagccagaatccagcccaggcagcagacagatacaactttggcacttcattctggagcttcttcgaaaggaggaatatcagggcgtcattgcttggcaaggtgactatggcgaattcgtgatcaaagaccccgatgaggtcgcccgcctctggggtgtgagaaaatgtaagccgcaaatgaattacgacaaattgtctagggctttgagatactactacaataagaggatcctgcacaaaacaaagggcaaaagattcacttataaattcaattttaacaaactagttctcgttaactatccatttattgacgtgggcctcgccggaggtgcagtccctcagtccgcccctccagttccgagcggggggtctcactttaggttcccaccctctacaccatccgaggtattgagcccaaccgaggatccgcgctccccgccggcctgctcatcttcgtcgtcgtcactcttcagtgccgtcgtggcgaggcggttgggacgggggtccgtttccgattgcagcgatggaacctctgagctcgaggaacccctcggcgaagacccgcgtgcccggccccccggcccaccggatctgggagctttcaggggacctcctttagcaaggctgccacacgaccctggcgtcttccgggtctacccgcggccacgagggggccccgaacccctctccccctttcctgtgagccctttggctggccctggctcattgctgcccccccagctctctcctgcactgcccatgactcctacccatctggcctacacccctagccccactttgagccctatgtatccctccgggggcggtggcccttcgggaagcggcggtgggagccatttctcttttagtccggaggatatgaagcgctacctgcaggcgcacactcagtctgtgtacaattatcatctgagcccacgggctttcctacactacccaggactggttgttccgcagccgcagcggccggacaagtgtccgcttcccccgatggcccccgaaacccctccggtgccctcgtctgcatcctctagctccagctccagcagtagtccattcaagtttaagcttcagccaccacctctcgggagacggcaaagggctgctggcgaaaaggccgtggccggcgcggacaagagtggaggatctgctggaggactggctgaaggggccggagcactcgcacccccgcctccgccaccccagatcaaagttgaaccaatatcagaaggcgaaagcgaagaagtcgaggtgaccgatatcagcgatgaagacgaggaggatggcgaggtgttcaaaacacccagggcgccgccagctcctccaaaaccagagcctggcgaagcccctggtgcctcccaatgcatgcccttgaagctacggtttaagagacgctggagtgaggactgcaggttggaaggtgggggtggaccagccggaggcttcgaggacgaaggtgaggacaagaaagtgcggggtgaagggcccggggaagccggcggcccgctgaccccgagacgggtgtcctcagatctgcagcacgccaccgcccaactgtccttggagcaccgagactcttag

SEQ ID NO: 13760 - DNA, 1530 bp, synthetic construct
  source 1..1530: mol_type = other DNA; note = Synthetic coding sequence
atgggagttctcaagtttaaacatatctttttccgaagcttcgtgaaaagcagcggggtctcgcagattgtattcacatttctactcataccctgctgtctgactctgaattttcgcgcccccccagtgatccccaatgttccttttctgtgggcctggaacgctccctccgagttttgcttgggtaagtttgatgagccactcgacatgagccttttttcttttattgggtcccctaggattaatgccactgggcagggggtgacaatcttttacgtagaccgtctggggtattacccttatatcgacagcatcacaggcgtgactgttaacggggggatcccgcagaagattagcttacaggaccacctggacaaagccaaaaaggacatcacattctacatgcccgtggacaatctgggcatggcagtcatagattgggaagagtggagacctacttgggcccggaactggaaaccgaaagacgtatacaaaaaccgctccatcgagcttgtacaacaacagaacgtccagctcagtcttacagaggctacagaaaaagctaaacaagagtttgaaaaggcagggaaggacttcctagttgagactatcaagttgggcaagctgctgcgccccaatcatctctggggctactacctgttccccgactgttacaaccatcactataagaaaccaggttacaatggcagctgcttcaatgtcgaaatcaagaggaatgatgacctgagttggctatggaacgagtcgaccgccctttacccctccatttacctgaacacacagcagtctcccgtggccgccacgctttacgtgagaaaccgagtgagggaagcaataagggtcagtaaaataccggatgccaagtcccctctgcccgttttcgcatacacacgcattgtattcaccgaccaggtgttgaaattcttgagccaggacgagttggtgtacacctttggcgaaacggtggcgcttggcgcctccggaatcgtgatctgggggacactgtctataatgcgaagtatgaaaagctgcctcctgcttgataactatatggagactatccttaatccctacataatcaatgtcactctggccgccaagatgtgcagtcaggtcctatgtcaggagcagggagtatgcatcagaaaaaattggaactcgtccgactacctgcacttgaaccctgacaattttgccatccaactggagaagggaggcaagtttactgtccgagggaaacctaccctcgaggatcttgagcaatttagcgagaaattctactgctcatgttactccactctcagttgcaaggaaaaagccgatgtgaaggacacagatgctgtcgacgtgtgcattgccgacggtgtctgtatcgacgcattcctcaagccgccaatggaaacagaggagccccagatcttttataacgcctcgccctctacattatctgccacaatgttcatcgtgtctattctgtttctgatcatcagtagcgtggccagtttgtag

SEQ ID NO: 13761 - DNA, 1041 bp, synthetic construct
  source 1..1041: mol_type = other DNA; note = Synthetic coding sequence
atggagacacagttgtcaaacggcccaacatgtaacaacacagcaaacgggcctactactatcaataacaattgctcgagtccggttgattctgggaacactgaggatagcaagaccaatctaatcgtcaactatctgccgcagaatatgacgcaggaagagctcaagtccctcttcggaagcatcggcgagatcgagtcctgcaaactggtgcgcgataaaataacaggacagagtctgggatatgggtttgttaactatatcgatcctaaagatgctgagaaggccattaataccctaaatgggctgcgcctgcagactaagactatcaaagtttcctacgctcgtccttcctcagccagtatccgcgacgcaaacctttacgttagcgggctcccgaaaaccatgacccagaaggaactcgagcagctcttcagccagtacggtaggatcattacaagccggatcctggtagatcaggtgactgggatctctcgcggggtaggattcattcggttcgataaaaggatagaagcagaggaggctatcaagggactcaacggccagaagcctcctggcgcaactgaacctataaccgtgaagtttgcaaacaatcctagccagaaaaccaatcaggctattctttcccagttatatcagagtcctaatagacgttacccaggccctctagctcagcaggcacaaaggttccgtttctctcccatgaccattgacggcatgacgagcttagccgggattaacatccctgggcatcctggaaccggttggtgtatcttcgtgtataatcttgccccagacgctgatgaatcaatcctgtggcagatgttcggcccatttggcgctgtcaccaatgtgaaggtgatacgcgactttaatacaaacaagtgcaaaggattcggttttgtgactatgaccaattatgacgaggccgcgatggcgatcgcttccctaaacggctaccggctcggcgacagagtactccaggtatctttcaagactaacaagacgcacaaagcttag

SEQ ID NO: 13762 - DNA, 1437 bp, synthetic construct
  source 1..1437: mol_type = other DNA; note = Synthetic coding sequence
atggcccatgtgcctgctagaacttcccccggcccaggacctcagcttctgttgctcttgctcccgctatttttactgctccttcgggacgtagccggttcccaccgagcaccggcctggagcgccctgcccgccgcagctgatggcctgcagggcgatcgagacttacagcgtcatcccggagatgcggcggccacactgggcccctctgcacaggacatggttgccgttcacatgcatcgcctatacgagaagtactcccggcaaggggcacgccccggtggcggcaacaccgtaagatctttccgagccagattagaagtcgtggaccaaaaagccgtgtacttttttaacctgacaagcatgcaggactctgaaatgatcctaacggccacatttcatttctactccgagccccccaggtggcctcgggctctcgaagtgttgtgcaagccgcgggcaaaaaatgcgtccgggcgacctctccccctgggcccacccacacgtcagcacttgctgtttcgctccctgtctcagaataccgcaacccagggattactcagaggtgcaatggcacttgcaccacctccaagagggctgtggcaggccaaggatatcagcccgatcgtgaaggctgcgcgccgcgacggcgagctgttgctgagtgcccaactcgactccgaggaaagggacccgggggtaccgagacctagcccttacgctccttatatactggtctatgcgaatgacctggcaatctcggagcccaactctgtcgctgtcaccctccagagatatgatcctttcccggcgggtgatcctgaaccgagagcggccccaaacaactccgcggaccctagagtaagacgcgccgcacaggctacaggcccacttcaggataacgagctgcctgggcttgatgagcgcccaccgcgcgcacacgcacagcacttccacaaacaccaactgtggccctcaccattccgcgctttgaagccacgaccagggcgaaaagaccgtcggaagaagggccaggaagtgtttatggctgcctcccaagtgctggacttcgacgaaaaaactatgcaaaaggcacggcgtaaacagtgggatgagccccgcgtgtgcagcagacggtacctcaaggtggactttgctgacatcggctggaacgagtggatcatctctcctaagtccttcgacgcctattactgtgctggagcatgtgagttccccatgccaaaaatcgtgcgcccatccaatcatgcaaccattcagagcattgtgcgggccgtgggtatcatccccggcattcccgagccatgctgtgtgcccgataagatgaactccttgggtgtcctgttcctagacgaaaaccgaaatgtcgtactgaaggtttaccccaacatgtctgtagatacctgcgcgtgtcgatag

SEQ ID NO: 13763 - DNA, 978 bp, synthetic construct
  source 1..978: mol_type = other DNA; note = Synthetic coding sequence
atggaatccaaaatgggtgagcttccacttgatattaatattcaggagccaagatgggaccagtcgacatttttaggaagggctagacatttttttacggtgaccgacccgcggaacctgctgttgtcgggggcccagctggaggccagccgcaacatagtccaaaattaccgcgctggggtggtgacccctggtattaccgaagaccagctgtggcgggcaaaatacgtctatgatagcgcattccacccagacaccggggagaaagtggtactgatcgggagaatgagcgctcaagttcctatgaacatgactattacaggttgtatgctgactttttatcgcaaaactcccacggttgtgttttggcagtgggtaaatcaatcatttaacgcaattgtcaactacagcaataggagtggagacacccctataaccgtgaggcagttgggcaccgcctatgtcagcgcaactacaggcgccgtggcaacggccctcggactgaagagtcttaccaaacatctccccccgcttgtggggcggttcgtacccttcgccgccgtggctgccgccaactgcatcaacatcccacttatgcggcagagggagctccaggtcggaataccggtagcagacgaagccggacagcgcctcggctacagtgtgacggctgctaagcagggcatcttccaagtggtcatcagccggatttgcatggcaattccagcgatggcaatcccgccgttaatcatggacacactggaaaagaaggacttcctgaaacgccggccttggctcggggcacccttacaggttggcttggttggcttttgccttgtgtttgccacacccctctgctgtgccctcttccctcagaagagttctatccacattagcaatcttgaacccgagctgcgggctcaaatccatgaacagaacccttctgttgaggtggtctattacaacaaaggcctatag

SEQ ID NO: 13764 - DNA, 1068 bp, synthetic construct
  source 1..1068: mol_type = other DNA; note = Synthetic coding sequence
atggaacctcacctgctgggactgttactgggcttgctactgggcggcactcgcgtacttgccggctaccccatttggtggtcacttgcactcgggcaacaatataccagcctgggtagtcagcccctgctgtgcggctcaatccctgggctcgtccctaagcagttgagattctgccgaaattacatcgagattatgccgtctgtggcagagggcgtcaagttggggattcaggagtgccaacatcagttcaggggaaggcgctggaactgcaccaccatcgacgatagccttgccatctttggcccagtactggacaaagctaccagggagagtgccttcgtgcacgctattgcaagcgctggggtggcctttgcggtgactcgttcctgcgctgagggaacctctaccatctgtggatgcgattcacatcataagggccctccaggcgaaggctggaagtggggaggctgtagcgaagatgctgattttggggtgctcgtgtcacgggagtttgcagatgctagagagaaccgcccagacgcgcgaagtgcaatgaataagcacaacaatgaggctggaagaacaaccatccttgatcacatgcaccttaaatgtaaatgccatggactgtctggtagctgtgaggtcaaaacttgctggtgggcccaaccagacttcagagcaatcggcgattttctgaaagataagtacgactccgcttctgagatggttgttgagaaacatcgagaatccagaggctgggttgaaaccctccgcgccaagtattccctgttcaagccccctaccgagcgggatctagtgtactatgaaaatagcccgaacttttgcgaaccaaatcctgagacgggttcctttggcacacgagaccggacctgcaacgtgacctcacacgggatagatgggtgtgacttgctctgttgcggccggggccataacacacgcacagaaaagcgcaaagaaaagtgtcactgcatcttccattggtgttgttacgtctcatgtcaggaatgcatccggatctacgatgtgcacacctgcaagtag

SEQ ID NO: 13765 - DNA, 1437 bp, synthetic construct
  source 1..1437: mol_type = other DNA; note = Synthetic coding sequence
atggctgccaggcccattacactgggaatcgatctcggaacaacatctgttaaagcagctcttctgcgggccgccccggatgacccgtccggattcgcagtgctggcatcttgtgcccgcgccgcacgggccgaagctgctgtggagtctgcagttgcgggcccgcagggccgggagcaggatgtgagtcggatcctgcaggcactgcacgaatgtcttgccgctctgcctagacctcagctccgatctgtagtgggcattggagtgtctggccaaatgcacggcgttgtcttctggaagacgggtcaagggtgtgaatggactgagggggggatcacacccgtatttgaacctcgtgccgtctcccatctggtcacttggcaggacgggcgctgcagttctgaattcctggcgtccctacctcagcctaagtctcacctgtcagtggcaactggatttgggtgcgcaaccattttttggctgttgaagtacagaccagagtttctgaaatcttacgacgctgcggggactattcacgattatgtggtagctatgctgtgcggcctgcctcggccactgatgtccgaccagaacgccgcgtcatgggggtacttcaatacacagtctcagtcgtggaatgtggaaaccctccgcagtagtggcttccctgtacatttgctgcctgacatagccgaacctggttcggtcgccggcagaaccagccacatgtggtttgagatcccgaagggaactcaagtaggggtcgcccttggagacctgcaggccagtgtatacagttgtatggcccagcggacagacgctgtcttgaacatttccaccagtgtgcaattggccgcttcgatgccatccggattccaacccgcacagacgcctgaccccacagcccctgtggcttactttccctattttaatcggacctacttaggggtggctgcttccttgaatggcggcaatgtcctcgcaacatttgtgcacatgctcgtccaatggatggctgatctgggcctggaggtcgaggagtctacagtttattccaggatgatccaggctgccgtgcagcaacgagacacccatttgactataacaccaacagtattgggggaaaggcacctcccggaccagctggctagcgtgacacggatctcctcctctgatcttagcctgggccacgtgacacgagctctgtgcagaggcattgtgcagaatttgcattccatgctccctatccagcagttgcaggattggggagtggagcgagtgatggggtccggctccgcgttaagtcggaatgacgtgttgaagcaggaagtacagcgagctttcccccttcctatgtcctttggacaggacgtcgacgcagctgtcggggctgcgctggtgatgttgcgacgacacttaaatcagaaagagtcatag

SEQ ID NO: 13766 - DNA, 1578 bp, synthetic construct
  source 1..1578: mol_type = other DNA; note = Synthetic coding sequence
atgaggcgccggaggcgacgcgacgggttctacccagctcctgacttccgagaccgagaagccgaggacatggccggagtgttcgacatcgatctcgaccagcccgaagatgcaggctcagaagacgaactagaggagggcggccagctcaacgagagcatggaccacgggggggtgggcccctatgagcttgggatggagcattgtgagaaattcgaaataagtgagactagcgtaaacagggggcctgagaaaattagacccgagtgtttcgaactgctgcgggtgctcggcaaaggtggatacggcaaggtgtttcaggtaaggaaggttaccggggccaatactggcaagatctttgccatgaaagtgctcaagaaggctatgatagtgcggaacgcaaaggatacggcgcacacaaaggcagagcggaacattctcgaggaggttaagcatcctttcattgtagatttgatctacgcatttcaaaccggggggaaactttatctgatcctagagtacctcagtggtggggagctttttatgcagctggaacgcgagggaatcttcatggaagatactgcatgtttctacttagctgaaatttctatggctctcggccatctgcaccaaaaaggcatcatttacagagaccttaaaccagagaacatcatgttgaatcatcaggggcatgtaaagctgacagactttggcctttgcaaagaaagcattcacgacggaacagttacccataccttctgcgggaccatcgagtatatggcaccagagatcctgatgcggagtggccataacagagctgtggactggtggagcttaggtgctctcatgtacgacatgctcacaggggctccgccattcaccggcgaaaaccgtaagaagactatcgacaagattctgaaatgcaaattgaatttaccaccctatcttacccaagaggccagggatctactgaaaaaattgctgaagcggaacgccgcaagcagactgggcgccgggcccggcgatgcaggggaggtgcaggctcatccattctttagacatatcaactgggaagagctgctggcgcgcaaggttgaaccaccttttaaacccctgctccaaagcgaagaggatgtgtctcagttcgactcgaagttcaccagacaaacccccgtagattccccggacgattccacgctctctgagtctgccaatcaggtttttcttggatttacctacgtagcccccagcgttttagaatcggttaaagaaaagttcagtttcgaaccaaagatccgcagcccaaggagatttatcggcagtccaagaacacctgtctcaccagtcaagttttcccccggcgacttttgggggcgtggtgcgagcgctagtaccgccaacccccagacccctgttgagtatcccatggagacctctgggattgagcagatggacgtgacaatgagcggggaagcgagcgctccgttacctattaggcagcccaattcaggcccgtataaaaagcaggccttcccaatgatttctaagcgcccagaacacctcagaatgaacctttag

SEQ ID NO: 13767 - DNA, 987 bp, synthetic construct
  source 1..987: mol_type = other DNA; note = Synthetic coding sequence
atggcccgtacagtggttctaataacaggttgctccagcggcatagggctgcatctggccgtaaggctggcctctgacccctctcagtcttttaaagtctacgctacactgagagacctgaagacacaaggtcgcctgtgggaagctgcccgagccttagcttgtccgccaggatccctggagactttgcagctcgatgtcagagactcaaaatccgtggctgcagccagggagcgggttaccgagggaagagtcgacgtcctggtatgtaatgctggccttggcctgctgggaccactggaagcactcggagaggatgctgtggctagcgtactggatgtcaacgtggttggaaccgttcggatgctgcaggccttcctgccagacatgaagcgccggggctcaggcagggtcttagtgaccgggagtgtcggcggcctgatgggtctgccctttaacgacgtctactgcgccagcaaatttgctcttgaagggctctgtgaatctctggccgttttactcctcccatttggcgtgcacctatcattgatcgaatgtgggcctgtccataccgcattcatggagaaggttctggggtctccagaggaggtgttagataggaccgacattcacacattccacagattctatcagtacctggcccactcaaagcaggtttttcgagaagcagctcagaaccccgaagaagtcgcagaggtctttctgacagcactgcgagctcccaaacccaccctccggtatttcaccacagagagattcctgcccctcctgcgcatgaggctagatgacccgtctggaagtaattatgtgacagctatgcatagggaggtgttcggtgacgttcctgccaaggccgaggctggcgctgaggcaggtggaggcgccggtccgggcgccgaggatgaggcagggcggggagcagtgggcgatccagagcttggagacccgcccgctgccccccagtag

SEQ ID NO: 13768 - DNA, 1626 bp, synthetic construct
  source 1..1626: mol_type = other DNA; note = Synthetic coding sequence
atgcccggcctgagacgggaccgcctgctgaccctgctgcttctgggggcactgctctccgccgacttatattttcacctgtggcctcaggtgcagcgtcaactaaggcctcgtgagaggccacggggatgtccctgcaccgggcgtgcgtcctccctggcgagagatagtgcagcagctgcatcagatcctgggacaatcgtgcacaattttagcagaaccgagccccgcaccgaacccgccggcggaagtcatagtggatcttcttctaagcttcaggccctctttgctcacccgttatacaatgttcccgaagagccacccctcctgggggctgaggactcccttcttgcaagccaggaagctctgaggtactaccgtcgaaaggtcgcccggtggaacagacgacacaaaatgtatcgggagcagatgaacctgaccagcctcgatcctccactgcagcttaggctcgaagcgtcatgggtgcagtttcacttaggcattaataggcacggactgtactctaggagctcaccggtggtgagtaagctgctgcaggacatgcggcatttcccaaccatcagtgctgattacagccaagacgagaaagctctgttgggtgcatgtgactgcacccagattgtgaaaccatcaggcgttcatctaaagcttgtactcagattcagtgatttcggcaaggctatgtttaagcctatgcgccagcagcgtgacgaggagacaccagtggactttttctatttcattgactttcagagacacaatgcagagattgcagcctttcacttggacagaatccttgacttccgtcgtgtaccaccaacagttgggcgcatcgttaacgttaccaaagagatcctcgaagtcacaaagaatgagatactgcaatccgttttttttgtgagcccagctagcaacgtgtgttttttcgcaaaatgcccttatatgtgcaaaactgagtacgccgtgtgcggcaatcctcacctgttggaagggagtctttccgctttcctcccaagcttgaatctggctccccgcctgagcgtacctaacccctggataagatcctataccctcgcagggaaggaagaatgggaggttaacccactgtactgcgacacagtgaaacagatctatccttacaacaacagccagaggctgctgaatgtaattgacatggccattttcgactttttgatagggaatatggacaggcatcattacgagatgttcacaaagttcggagacgatggatttctcattcatctggataatgcccgaggcttcggacgtcatagtcacgatgagataagtatattgtcacccctgagccagtgctgcatgattaaaaaaaagacactacttcatttacagctgttggcgcaggcagactaccggctgtcggatgtgatgagagagtcactgttggaggaccaattatcacctgtgctgacagaacctcaccttttggccctcgatagacgcttgcagactattttgcggacagtggaaggctgcatcgtcgctcacgggcagcaatccgttatcgttgacggaccggtggaacaactggcgcctgattccggccaggcaaaccttaccagttag

SEQ ID NO: 13769 - DNA, 954 bp, synthetic construct
  source 1..954: mol_type = other DNA; note = Synthetic coding sequence
atgaaaacggccttaatactgctcagcattcttggtatggcctgtgcgttcagtatgaagaatttgcatcgccgcgtcaaaattgaagatagcgaggagaatggtgtgtttaagtaccgcccccgttattacttatacaaacacgcatacttttatccccacttgaagagattccccgttcaagggagttcggactccagtgaagagaacggtgatgacagttctgaagaagaggaggaagaggaggaaacctctaatgaaggcgagaacaacgaggagagcaatgaggacgaggacagcgaggcagaaaacacaacactctccgccactactttaggctacggggaggatgccaccccagggactgggtacacaggacttgccgctattcaacttcctaaaaaggcaggggacattacaaacaaagcaaccaaggaaaaagaaagcgacgaggaggaggaggaagaggaggagggcaacgagaacgaggaaagcgaggcagaggttgacgaaaacgagcaaggaattaacggaacttccaccaatagtacagaggccgagaacggaaacgggtcatctggcggcgataatggtgaggagggagaagaagagtcagtaaccggggccaacgccgaagatacaactgaaactgggaggcagggcaaaggaacgtccaaaacaacgacctcgcctaacggtggcttcgagccaacaaccccacctcaagtgtaccggactacctctccccctttcggcaagactacaactgtggagtacgagggggaatatgagtacactggtgctaatgagtatgacaatggttacgaaatttacgagagtgagaatggagaaccgagaggtgataactaccgggcttacgaggatgagtactcttacttcaaaggccagggttatgatggctatgacgggcagaattactaccaccaccagtag

SEQ ID NO: 13770 - DNA, 345 bp, synthetic construct
  source 1..345: mol_type = other DNA; note = Synthetic coding sequence
atgtctctccctagctctcgggccgccagagtgcctggacccagcggcagcctgtgcgcgctcctcgccctccttttgttgctgaccccccctggcccgctggcgagcgccggtcctgtctcagctgttctgaccgagctgagatgcacttgtttacgagtcacattgagagtcaaccccaaaactattggtaagctccaagtgtttcccgcgggcccccagtgttccaaggtggaggttgtcgccagccttaaaaacggcaagcaggtgtgcctggacccagaagccccttttctcaaaaaagtcatacagaagatactggacagcgggaataaaaaaaattag

SEQ ID NO: 13771 - DNA, 2100 bp, synthetic construct
  source 1..2100: mol_type = other DNA; note = Synthetic coding sequence
atgccaagtctgtggcgcgagattttactggagagcttactgggctgtgttagttggtcactttaccacgacttggggcctatgatttattattttcccctccagacccttgaactaactgggctcgaaggtttttccattgcctttctctccccgatttttttgacaatcacaccgttctggaaactggtcaataaaaagtggatgctgacgttgctgagaattattaccatcggttcaatagcgtccttccaagccccaaacgctaaactgcgactgatggtgctcgccttaggcgtgtcaagctccctcatagtacaggccgtgacctggtggtcaggatcacatttgcaacggtatctgaggatttggggcttcatcttgggtcagatcgtcctcgtagtgctgagaatctggtacactagcttaaatccaatttggtcataccagatgtccaacaaagtgatcctgaccctcagtgcaatcgcgactctggaccggatcggaacagacggcgactgtagcaagcctgaagaaaaaaagactggagaggtggcaacgggaatggcttctcgtccgaattggctgctcgctggcgccgctttcggctctctggtgttcctcacccactgggtcttcggagaggtgtccctggtgtcgcggtgggcggtgagcggacatcctcaccccggccctgaccctaatccatttggcggagctgtgctgctgtgtctggccagtggcctcatgctgccttcctgtctgtggtttcggggcaccgggctcatttggtgggtgaccggcacggctagcgccgccgggctgctgtatctccacacatgggcggctgccgtgtccggatgcgttttcgcaatcttcacagccagtatgtggcctcagaccttggggcacctgataaactctggaacgaatccaggaaaaaccatgactatagcgatgatcttctacctcttagagatcttcttctgtgcgtggtgcacagcattcaagtttgtgcccggcggtgtgtacgcacgcgagagatctgacgtactgttaggcacaatgatgctgattatcggcctcaatatgctgttcggacctaaaaagaatctcgatctactgctgcagaccaagaactccagtaaggtcctgttccgcaaatctgagaagtatatgaagctgtttctgtggctgctggtgggagtaggtctgttgggtctcggcctgcgacacaaagcctatgagagaaaactcggaaaagtcgccccaacaaaggaggtctctgctgctatctggccattcagattcggatatgataacgagggttggtcatccttagagagaagcgcccatcttctgaatgaaacgggcgcggactttattaccatcctggaaagcgatgccagcaaaccatacatgggcaacaatgatctcactatgtggctcggagaaaaattaggattctataccgactttggtccctctacaagataccacacctggggaatcatggctctgagtcgttatcctattgtaaagtctgagcatcacctcttaccttcaccagagggagagatcgctcctgctattacactgacagttaatatttcaggtaagctagttgatttcgtggtgactcactttggcaatcatgaagatgatctggacaggaaattgcaggccatcgcagtaagtaaactgcttaaatcatcttccaatcaggtgatttttctcggttacataacttctgcccccggtagccgggattacctccagttaaccgagcacgggaacgtcaaggacatcgacagtaccgaccacgaccggtggtgcgaatacatcatgtatcggggcctgattcgcctcgggtatgctaggatttcacatgcagagctctcagattctgaaattcagatggccaaatttcggatacccgacgatcccacgaactaccgcgacaatcagaaggttgtaatcgatcaccgcgaggtctctgagaagatccattttaatcctagattcggaagctacaaggagggacacaactacgagaataaccatcacttccacatgaatacccccaagtatttcttgtag

SEQ ID NO: 13772 - DNA, 1449 bp, synthetic construct
  source 1..1449: mol_type = other DNA; note = Synthetic coding sequence
atgctgttcgagggaaaggtcaacccacaaacgcagagcctcctcgccgagtgtggagagtggacaaggaggagcttgcacctgcgcgtgctgggccgccagctcatccttcccacagacaaaggcgttcagcatttccagggcagcacccccgcgagcgcagttcataggccaccactgtcggcctgtggccactcaagcaatatccgagagctatgcatttctggcagccagattgtgcctgcagctcttagtgctagcgcactgcctgggcccgatgacacgggggttgccgatttgaccgctaggagttccctcgaagaggaggtgtaccatgtggatggaaagatagaggagtatttcgccttcgatcgaaaagaagacgatgatgaatgtctcgaacagaaacccgcgcagccaggccgtaagtggaggaagctaggcttgccacctgttagccccagagattgtgtgaaggatgccgtggctgctgaagtgtttgaccatgtatggaccaatatggttgagcttcttgaagagttgatccgtaaacattgggagacaaccctgacagagggcaagaaacagagagagacactgaaagtcgcaggtaacagatttccgcacgtgctcgtcccccacgcccacgcagatggggcaagtggccctccttcagggcatgcagaagcacacggaatctctctcgcctctagactcaaccctccccaaattcaccacttctccagctctttttatagtgatatgaacggagtgatgacaatccaggccaaaccgttgcagcggcgtccagcctacttcgccgatcgcacacagaacgaaaaagaagataaggctagcggtgggggagctggcgctctctcctctgcgcctcatcgactgggtagagcctctgacacacacggcctcagtccatccgccaaaaaaactccggttccatggcggctccccagcttggcgagcgactcccagcggcttaaaacacccaacatttacagcgacgaagtcctccggggcacaaaattacctactggggtggaccatatggccagtcccctcgtgcaaacctcaaggtcccgttttccacccctcgttacagaaacacgcggccagaatacagccgtacccggatgtcgtctggttagttaccggggccggcacctccagaaccgtgttctttcagctatgccggatggaacagaaaggtcccgtctcagggagaggaccgcaacactcgagcgactgtcacgtcccagtacaactcatacatttagacagagcgacactccccggaagtcatcactaacccagatggagttcgccgctcacacctggacagggcaaagtatcctcactgggtctcagtatgtgccaaaatccttccagaggacgaccctcacgtttaaaaggcgctttcaagtaaccagctag

SEQ ID NO: 13773 - DNA, 1392 bp, synthetic construct
  source 1..1392: mol_type = other DNA; note = Synthetic coding sequence
atgggtgctggtccctctctgctgctcgctgcgctgctgttgttgcttagcggtgatggcgccgtgcgctgcgacacgccagccaactgcacatatctcgacctcctggggacttgggtgttccaggtcggatcatcaggcagtcagcgcgacgtcaactgttctgttatgggaccccaggaaaagaaggttgtggtgtatctgcaaaaacttgataccgcctatgatgatctcggcaacagtggacattttacaatcatttacaaccagggtttcgaaattgtgctgaatgattataagtggtttgccttttttaagtataaagaggaggggtcaaaagtcaccacctactgcaatgaaactatgactggatgggttcacgacgtcctgggtagaaactgggcatgttttacaggcaaaaaggtcgggaccgccagtgagaacgtgtacgtcaacatagcccacctaaaaaatagtcaggagaaatactctaataggctgtacaagtacgatcataacttcgtcaaggcaattaatgctattcagaagtcatggaccgccaccacatacatggagtacgagactctgaccttgggcgatatgatccggagaagtggaggacatagtcggaaaatccctcgtcctaaaccagcccccctaactgcagaaatccagcagaagatattgcacctgccaacgtcctgggactggcgaaatgtccatggcatcaacttcgttagcccagtgaggaaccaggcgtcatgtggatcttgctactcctttgcctccatgggcatgctagaggcgcgaatccgtatcttgacaaacaactcacaaacaccaatactgagtccacaggaagtagtttcctgtagccagtatgcccagggttgcgaaggcgggtttccctacctgattgctggcaagtacgcccaggatttcggtctcgtggaagaagcctgctttccttataccggcaccgactccccctgtaaaatgaaagaagactgttttcggtactacagttcagagtatcactatgttggcggcttctatggagggtgcaatgaagctctgatgaaattggaactggtgcaccacggcccaatggctgtcgcttttgaggtgtacgatgattttctgcactacaaaaagggaatttaccatcacactgggcttcgcgacccttttaatccttttgaactcacaaaccacgccgttttgctggtcgggtacgggaccgacagcgcctccgggatggactattggatcgttaagaacagctggggtactggttggggagagaatggatactttcgcattagaaggggaaccgacgagtgcgccattgaaagcattgcagtcgctgcaaccccaatcccaaagctttag

SEQ ID NO: 13774 - DNA, 1941 bp, synthetic construct
  source 1..1941: mol_type = other DNA; note = Synthetic coding sequence
atgagcaagggacccgcagtgggcattgatctcggaactacatactcctgtgtgggggtgttccagcacggaaaagttgaaatcattgctaatgaccagggcaaccgcacgactccatcctacgtggcatttacagatactgagcgacttattggggatgctgctaagaaccaggtggccatgaatccgaccaacacagtgttcgacgcaaagcggctcatcggtcggcgattcgacgacgccgtagtgcagtctgacatgaagcattggccattcatggtggtgaatgatgctggaagacctaaagttcaggtagagtataagggagagacgaaaagcttctatcctgaggaagtttcctcgatggtgttgactaagatgaaggagatcgcagaggcctacctcggaaaaactgtcaccaacgctgtggtgactgtgccagcatacttcaacgatagccagcggcaggccacgaaagacgcagggacaattgcaggtctgaacgtgcttagaatcatcaacgagcccaccgcagcagctatagcttacggacttgataaaaaggttggagcagagcggaatgtcctgattttcgacctgggagggggcacctttgacgtgtcaattcttacaatagaggacgggatatttgaagttaaatctacagcgggcgacacgcacctgggcggagaggattttgataaccggatggtgaatcactttattgctgaatttaagagaaagcataaaaaagatatctctgagaacaagcgagcggtcagaaggttgagaacagcttgtgaacgggctaaaagaacgctgagctctagcacccaagctagcatcgaaatcgattctctttacgagggtatagatttttacacaagcatcacaagggctcgattcgaggagctcaacgctgaccttttccgcggtacccttgatccagtggagaaagctcttagggatgcaaagctggacaagtcgcagatccacgacatcgttctggtcggggggtccaccagaatcccaaagatccagaaacttctgcaggattttttcaacgggaaggaactgaacaagagcatcaatccagacgaggcagtcgcttatggtgccgcggtacaggccgctatcctgtctggagataaatcagagaatgtacaggatctcctcctgttggacgtcaccccactgtctctggggatagagacagccggcggggtgatgaccgttcttattaaacgaaataccacaataccaacaaagcagactcagacgttcacaacttatagcgacaaccagcccggagtcctgatccaggtctatgaaggagagcgcgccatgactaaagacaataatctcctgggcaagttcgaactgactgggatccctcccgccccacggggtgttccacagatcgaagtcacctttgacatcgatgctaacggaattttaaatgtgtcagcagttgacaaaagtacaggcaaggagaataaaattacaatcactaacgacaagggccgactttccaaggaggatatcgagaggatggtgcaggaagccgagaagtataaagccgaagacgaaaagcagagagacaaggtttctagtaaaaattcgttagaatcatatgccttcaacatgaaagcgaccgtggaggatgaaaagctgcaggggaaaattaatgatgaagataaacaaaaaattctagacaagtgtaatgaaataataaattggctggacaaaaaccagaccgccgaaaaggaggaatttgagcaccagcagaaggaattggagaaagtgtgtaaccctatcattacaaagttataccagtcagctggcggcatgcccggcggcatgccaggaggcttccctggcggaggcgcgcccccttcgggtggagcttcttcagggccaactatcgaggaggtcgactag

SEQ ID NO: 13775 - DNA, 1017 bp, synthetic construct
  source 1..1017: mol_type = other DNA; note = Synthetic coding sequence
atgtgggaagctaatccagagatgtttcacaaggcagaagagttgttctctaaaactaccaataatgaggtcgatgatatggataccagtgacactcagtgggggtggttctatttggccgagtgcggaaagtggcatatgtttcagccggacaccaattcgcagtgtagcgtgtcaagcgaggatatcgagaaatcttttaaaactaatccgtgcgggtctatctcgtttactacctccaagttctcttacaagatcgacttcgccgaaatgaaacagatgaatttaaccaccggcaaacagcgcttgatcaagcgcgcaccattctctattagtgccttttcctatatttgcgaaaacgaagcgatacccatgcccccgcactgggaaaacgtgaatactcaggtcccatatcagcttattcccctacataatcagacacacgaatacaatgaagtggccaatctgttcggaaagactatggatcggaacagaattaaaagaattcaaaggatccaaaacttagatctctgggagttcttctgcaggaaaaaagcacagctgaagaagaagcggggagtgccccagattaatgaacaaatgctgttccacggaacttcttctgagttcgtcgaggctatctgcattcataattttgactggagaattaacggcatccacggcgcagtgttcggaaaaggtacttattttgcccgcgatgctgcatactctagccgtttctgcaaggatgacattaagcacggcaataccttccagattcatggcgtttctttacaacagcggcacttatttcggacttataagagcatgtttttagcccgcgtgttaatcggcgactacatcaatggagacagcaagtacatgcgccctccctcaaaggatggtagttatgtgaacctgtacgactcttgtgtcgacgacacttggaaccccaagatattcgtagtctttgacgctaaccagatttaccccgaatacctgatcgattttcactag

SEQ ID NO: 13776 - DNA, 1059 bp, synthetic construct
  source 1..1059: mol_type = other DNA; note = Synthetic coding sequence
atggtccgccccgtgcggcataaaaaacccgtgaactacagtcagttcgaccactccgatagtgatgatgactttgtgtcagctaccgttcctctgaacaagaagtcacggactgcccccaaggaactgaagcaggacaaacccaagcctaatctcaacaacttacgcaaagaagagattccagtccaagaaaagacccctaagaaaaggcttccagagggaacattctcgattcctgcctctgcagtgccctgcacaaagatggccctggacgataaactctaccagagggacctggaagttgctctggcgctgtctgttaaggagctccctactgtgacaaccaacgtacagaattcacaggacaagtctatcgagaagcatgggtcctctaaaattgaaacaatgaataaaagcccacacatttcgaattgcagtgtcgcaagcgactatcttgacttggacaagataaccgttgaagacgacgtggggggagtgcagggtaagcgaaaagcggcctccaaggccgccgcccagcagaggaaaatcctgctggagggaagcgacggagactccgccaatgacacggaacctgacttcgccccgggcgaggacagcgaggacgatagcgacttttgcgagtccgaggacaatgacgaagacttctctatgcgcaagagcaaggtaaaggaaattaaaaaaaaggaggtgaaagtgaagtcgcccgtggagaagaaggagaaaaaatccaaatccaaatgcaatgccctcgttacaagcgtggattccgcacccgccgcagttaaatccgaatcccagtcccttccaaagaaagtatcactgtcatccgatacaacccgaaagccgctagaaatcaggtctccaagcgccgaaagcaaaaaacccaaatgggtacccccggctgcttcaggtggaagtagatcaagcagctctcccttagtggtcgtgtccgtgaagtcccccaatcagtctctaaggcttggattgtctaggcttgcccgcgtgaaacctctccatcctaatgccacaagcacatag

SEQ ID NO: 13777 - DNA, 1488 bp, synthetic construct
  source 1..1488: mol_type = other DNA; note = Synthetic coding sequence
atgaccgtgatgagcggggagaatgtcgacgaagctagcgcagctcccgggcatccccaggatgggtcatacccccgccaggctgaccatgacgatcatgaatgctgcgagagagtggttataaatatatctggactgaggttcgaaacccagctgaagactcttgcgcagtttcccaataccctgttgggcaatccgaagaaaagaatgcgctactttgacccactcaggaacgagtacttcttcgaccgcaaccgaccaagtttcgatgctatcctatactactaccaaagtgggggccggctgcggcgtcctgtaaacgtcccactcgacatgtttagtgaagaaatcaagttttacgagcttggcgaggaggctatggaaaaattcagggaagacgagggcttcatcaaagaagaggagcggcctctccccgaaaaagaatatcagcgacaagtatggctccttttcgagtaccccgaaagctccggcccagcccgtgtcatcgcaattgtctcagtgatggtaatcctcatcagcattgtgattttttgtttggagactctgccagagctgaaagatgacaaggactttacaggaaccgtccatcggatcgacaatacaactgtaatctataattccaatatcttcacggatccatttttcatcgtggagacgctgtgcataatttggttctctttcgaattagtcgttcggtttttcgcctgtccatctaagacagacttttttaagaatattatgaactttatagatatcgtggccataatcccctattttatcacgcttgggaccgagattgctgagcaggagggcaaccaaaaaggcgaacaagcaaccagcctcgccattctcagggtaatacgactcgtgcgggtgttcaggatcttcaaactgtcccgccacagtaaagggctgcaaattcttggacaaactttgaaggcgagtatgcgcgaattgggactgttaattttttttctgttcattggcgtgatccttttctccagcgcagtgtatttcgccgaggccgaggaggccgaaagtcacttctcaagtatccccgatgcgttttggtgggctgtggtgtccatgactacagtgggctacggcgacatgtacccggtgactatcggaggtaagattgtggggagtctgtgtgccatcgctggagtgttgactatagccttgccagtccccgtgatcgtgagcaactttaattatttttaccacagagagaccgagggcgaggaacaggcgcagctgctccatgtgtcctccccgaacttggcttccgattctgacctgtctcggagatcctcgagtaccatgagcaaatctgagtatatggagatagaggaagacatgaacaactcaattgctcattatcgacaggtgaatattcgcacagccaattgtactaccgcaaatcaaaattgcgtgaataaaagtaagctgctgacagacgtgtag

SEQ ID NO: 13778 - DNA, 1632 bp, synthetic construct
  source 1..1632: mol_type = other DNA; note = Synthetic coding sequence
atgagaaaacccgcggccggatttctgccctctctccttaaagttctccttctacccctggcccctgcagccgctcaggacagcacgcaggctagtactcccggatcacctttatctcctaccgaatacgagaggttttttgccctgttgacccctacctggaaggctgaaactacttgtagactgcgagcaacccatggatgcagaaaccccacactggtccagctggaccaatacgagaatcatgggcttgtgccggatggtgccgtctgtagtaacttgccctacgcaagctggttcgagtccttttgccagttcacccattatcggtgctccaatcatgtgtattatgccaagagagtcctctgtagtcagccagtttccatactttcaccaaacactctgaaagaaatcgaagcctccgccgaggtgagtcccaccaccatgacctcacccatctcacctcactttacagtgaccgagagacagacctttcagccatggcccgaaaggttgtcgaacaatgttgaagagttgctccaaagtagcctgagcctcggcggccaagaacaggcacctgaacacaaacaggaacagggtgtcgaacatcgtcaggagcccacccaggaacacaagcaggaggagggtcagaagcaggaagaacaggaagaagaacaggaggaagaaggaaagcaagaagaagggcaggggacaaaggagggacgggaggctgtgagccagcttcagaccgactctgagccaaagtttcacagcgagagcttgagcagcaatccgtctagtttcgctccgcgggtcagggaggttgagagtacccccatgattatggagaatatccaggaattgattagaagtgcgcaggagatcgacgagatgaacgagatctacgatgagaatagctactggagaaatcagaatcctggaagcctcttgcaactacctcacacagaagctctgctcgtcctctgctattccatagtggagaatacatgcatcatcaccccaactgctaaagcctggaagtatatggaagaggagattctcggttttggaaaaagcgtctgcgactccctcggccggcgtcacatgtctacgtgtgctctgtgcgacttctgtagcctgaagttggagcagtgtcactcagaagcttccctgcagcggcagcaatgtgacaccagtcataagaccccctttgttagccctttgctagcatcccagagcctcagcatcggaaatcaagttgggtcacccgagtctggacggttctacggactggacctttacggtgggctccacatggatttctggtgtgcgaggttggccactaagggctgcgaggatgtccgcgttagcggctggctccagacagagttcctctcattccaggatggggacttcccaaccaagatctgtgataccgactatatccagtacccaaactattgcagctttaagtcccagcagtgcctaatgagaaaccgcaaccgcaaagtctcccgcatgagatgtctacagaacgaaacgtactcagctctgagtcccggaaaaagtgaagatgtggtgttacgatggtctcaggaatttagcaccctgaccctggggcaatttggttag

SEQ ID NO: 13779 - DNA, 666 bp, synthetic construct
  source 1..666: mol_type = other DNA; note = Synthetic coding sequence
atgagcggatgggctgatgagcgggggggagagggcgacggacgcatatacgtcggaaatctccctacggatgtgcgcgaaaaagatctcgaagacctcttttacaagtacggccgcatccgggagatagagctgaagaacagacacgggctggtgccatttgccttcgtgcggtttgaggaccccagggacgccgaagatgccatctatggaaggaacggctatgactatggccagtgcagactgagagttgaattcccccggacatacggaggcagaggtgggtggccaagaggaggacgcaacggtcccccaacccgacgcagtgatttcagagtcctggtatccgggcttccgccaagcggttcatggcaggacttaaaggaccatatgagggaagccggggacgtttgctatgccgacgttcagaaagacggcgtggggatggtggagtacctgcgtaaggaggacatggaatacgccctgagaaaactggacgataccaagtttcgctcccacgagggtgagacgtcttacatcagagtgtaccccgagcgctcgacttcctacgggtactccagaagccgatccggaagccggggcagagactccccatatcaatcgcgcgggtctcctcattacttttcacccttccgtccttattag

SEQ ID NO: 13780 - DNA, 2523 bp, synthetic construct
  source 1..2523: mol_type = other DNA; note = Synthetic coding sequence
atgtcggcctttcgactctggccgggactgctaataatgctcggcagcttgtgtcaccgagggagcccgtgtggtctgagcacgcatgtcgagatcggacaccgggccctggagtttctacaactgcacaacggcagggttaattatcgggagttgctgctggaacaccaggatgcttaccaagctggtatcgtcttcccagattgtttttatccatctatttgcaagggaggtaagtttcatgatgtgagcgagtcaactcactggacacccttcctcaatgcttctgtgcactacattcgcgagaactatcctctaccctgggaaaaagacaccgagaagctggtcgcctttctctttgggatcacaagccatatggccgctgacgtgtcctggcactctctcggcctagaacagggatttctgaggactatgggggccatcgacttccacgggtcttattcagaagctcattccgctggcgactttggcggagacgtcttatcacagtttgaattcaattttaattatctggctagaaggtggtacgtgcctgtgaaagatctgctcggcatatacgagaagctttacggtaggaaagtgattacggagaatgtgattgtggactgctcccacattcaattcctcgagatgtatggagaaatgctggcggtcagtaagctgtatcctacatatagtactaaatccccatttctggtggagcagttccaagaatatttcttgggcggcttggatgatatggctttttggtccaccaatatctaccacctgacttcctttatgcttgagaatggaaccagtgactgtaaccttccagaaaaccccctgttcatcgcctgcggtggacagcagaaccatacacagggatccaagatgcagaaaaatgacttccatcgcaatctgaccacctcactgactgagtctgtcgaccggaatatcaactatactgagcgaggcgttttcttttctgtgaacagctggacaccagattcgatgagcttcatttacaaggccctggagagaaacatacggaccatgtttattggtggcagccaattgtcacagaaacatgtctcttctccattagcttcctactttctgtcatttccctatgcacgactgggctgggccatgacttccgccgatctgaaccaggacggccacggagatcttgttgtcggggcccccggctatagtaggcctggccatatccatatcggccgggtataccttatatatggaaacgatctcggccttccacccgtggaccttgatcttgataaggaagcgcatcggatcctggaaggttttcagccctccgggcgatttgggagcgccttggccgtgctcgacttcaacgtggatggcgtccccgacctggcagtcggagccccctcagtcggctccgagcagctgacatataagggagcggtatacgtctatttcgggagcaagcagggaggtatgtcatcctcacccaacatcacaatatcatgccaagatatttattgcaatcttggatggacactccttgccgctgatgtcaatggggatagcgagccggacctcgtgatagggtcacccttcgctccaggggggggcaagcagaaagggatcgttgccgcgttctattcgggcccctctctgtctgacaaggagaaattaaacgtggaagccgccaattggactgtgagaggagaagaggatttcagctggttcggctactccctgcacggggtgacagtagataatcgtacattactgctggtcgggagcccaacttggaaaaatgccagtcgcctgggccacctactgcatatccgggacgaaaagaaatccctgggcagagtgtatgggtattttcctccgaacggacaatcctggttcaccatcagtggtgataaagctatgggcaaactaggcacctctcttagctccgggcacgttctgatgaacggcacactcaagcaggtacttctggttggggcccccacatatgatgatgtgagcaaagtcgccttcctgacagttacacttcaccaggggggcgccacccgtatgtacgctctcacgtccgatgctcagccgttactgctgtccacattcagcggagataggagattttctcgatttggcggggttctgcacctgtcagacctagatgacgatggtctagacgagatcatcatggccgcccccctccgcatcgctgatgtgacatctggcttaattgggggagaggacggtagggtgtatgtctataacggtaaagagaccactcttggcgatatgaccggcaaatgcaagagctggattactccctgccctgaggagaaagctcagtacgtgctgattagcccggaagcatcaagcagattcgggagtagtttaattactgtgcgtagcaaggctaagaatcaagtggtgatcgccgccgggagatcttcactcggagcaaggctgagcggtgccctccacgtttattcccttggctctgactag

SEQ ID NO: 13781 - DNA, 972 bp, synthetic construct
  source 1..972: mol_type = other DNA; note = Synthetic coding sequence
atgaagtctgctttgtttactcgattttttatactgctgccttggatcctgatcgtgataatcatgctggatgtggacacccgaagaccagtcccccctctaacccctagaccctacttttccccttacgccgtgggtagaggcggcgcccggctgccgttgagacgaggcggaccagcacacggcactcaaaagcggaaccagagcaggcctcagccccaacctgaaccgcagctgccgacaatctacgctatcacaccaacttattctaggcccgtgcagaaggctgagcttactcgcctggctaatacttttaggcaagtcgcacagctgcactggatactcgtggaagacgccgctgcgagatccgaactggtgtcccgatttctggcgcgggccggtctcccatcaactcacctgcacgtgcctactcccaggagatacaaacgtcccggtttacccagggctaccgaacaacggaatgccggactggcgtggcttcgccagcggcatcagcaccaacgcgctcaaccaggtgtactgttttttgccgacgatgataatacttactcgctcgagttgtttcaggaaatgaggaccactcggaaagtgtctgtctggcccgtagggctggttgggggccggagatatgaacgccccctcgtcgaaaacggcaaggtcgtaggctggtacacaggttggcgggctgatcggccgtttgctatcgatatggccggttttgccgtttccttgcaggtgatactctcaaaccctaaagctgtgttcaagaggcgcggaagtcaaccaggaatgcaggagagtgacttcctgaaacaaattaccactgtcgaggagctggaacctaaggcgaataattgtacaaaagtgttggtttggcatacaaggacggagaaagtcaatctcgccaacgagccaaaataccacctcgacactgtgaaaatcgaagtgtag

SEQ ID NO: 13782 - DNA, 3213 bp, synthetic construct
  source 1..3213: mol_type = other DNA; note = Synthetic coding sequence
atgggggcagcaaggggtagccctgccaggccaagaaggttgccactactctctgtccttctgctgccccttcttggcgggactcagacagcgattgtcttcataaaacagccaagttctcaggacgccttacaaggacgccgggccctgctccgctgcgaggtggaggcccccggtccggtccatgtctactggttactcgacggtgctcctgttcaggacaccgaaagacgatttgcccagggttcaagcctgtctttcgctgccgttgatcgtttgcaagattctggaacctttcaatgtgtcgccagagatgatgtcactggcgaggaggccaggtctgccaatgcaagcttcaacatcaaatggatcgaggctgggcccgtggtcctcaagcaccctgcaagcgaggcagagattcagccccagactcaggtgacgctgcgttgtcatatcgacggtcacccccgaccaacataccaatggttcagagacggcactccgttgagtgatggccagagtaaccacaccgttagttctaaagaaaggaatctgacactgaggccagccgggccggagcactctggattatatagttgctgcgcccattccgcgttcggtcaggcgtgctcctcacaaaatttcactctcagcatcgcggatgagagcttcgcccgcgtggtcctcgctccccaagatgtagtggtggcccggtacgaggaggctatgtttcattgccagttctctgctcagccccccccttcattacagtggttgttcgaggatgagaccccgatcacaaataggtcccgcccccctcaccttcgaagggccaccgtcttcgcaaatgggtcattactcctgactcaggtgcgaccaaggaatgccggaatttatagatgtattgggcagggccagaggggtcctccaatcatactggaagccacgctgcatttggccgagattgaggatatgcccctgttcgaaccacgggtttttaccgccgggagcgaggagcgagttacatgcctaccccccaaagggctgcctgaaccctcggtttggtgggaacatgctggtgtcagactccccacacatgggcgcgtttaccaaaagggccacgagctggtgttggctaatatcgcagagtcggatgcaggcgtgtacacctgtcatgcagccaacctggccgggcagagacgccaggatgtgaacatcacagtcgccaccgtacccagctggctcaagaagccccaagatagccagttagaggaaggcaaaccaggctacctcgactgcttgacccaggcgactcctaagcccacggtagtttggtaccggaaccagatgttaatttctgaagacagccggtttgaggtctttaagaatggaacgctgcgaatcaattctgtcgaagtgtacgatggcacctggtaccgttgcatgtccagcacccctgccggttccatcgaagcccaagcgcgggtgcaagtgttagagaagctgaagttcacacctccacctcagccacagcaatgcatggagtttgacaaagaggcaacagtgccatgcagcgccacggggcgggaaaagccaaccatcaagtgggagagagcagatggcagtagtctccctgaatgggttactgacaacgctgggacccttcactttgcaagggtgacccgtgatgacgcagggaactacacctgtatagccagtaacggccctcagggacagatccgtgcacacgtccagcttactgtagccgttttcatcacatttaaggttgaaccagaaaggaccacagtgtaccagggacatactgcgcttcttcagtgcgaggcccagggtgaccccaaacccctcattcagtggaaagggaaagatcgcatcctcgatcccaccaagctgggaccgagaatgcacattttccaaaacggttccctggttattcatgacgtggcccctgaagattccgggcgatatacatgcatagccgggaattcctgcaatattaagcacacagaggcccccctatacgtggtggataagcctgtgcctgaggaaagtgagggacctgggtcaccccctccctacaagatgatccaaaccattgggttaagtgtgggcgccgccgtggcctacatcattgccgtcttagggttgatgttttactgcaaaaaacggtgcaaagccaagagactccaaaagcaacccgaaggagaagagcccgagatggaatgcctgaatgggggccccttgcagaatgggcaacccagtgcggaaatccaagaagaagtggccctgaccagtctcggttccggccctgctgctactaacaaacgacacagtacctccgataagatgcatttcccccggtcaagcttgcagccaattacgacactggggaagtcagaatttggtgaggtctttttggccaaggcacagggtttagaagagggagtggctgaaacccttgtgctggtgaagtccctgcaatccaaggatgagcaacaacagctagattttcgaagggaactggagatgttcgggaagttgaaccacgcaaacgtggtgcgccttcttggcctatgccgggaggccgagccgcactatatggtcctagagtatgtagaccttggggatctcaagcaatttctacgcatctctaaatctaaagacgaaaaactgaaatctcagcccctgagtactaagcagaaagtagccctgtgtacacaggtcgccttgggaatggaacatctttctaataataggtttgtgcacaaagatctggccgctaggaactgcctcgttagcgctcaacgacaggtgaaagtgtctgcactgggcctatcaaaagatgtctataattctgaatactatcattttagacaagcctgggtgcctttaagatggatgtcccctgaggctattctcgagggagacttttcgacaaaaagtgacgtctgggcgttcggggtactcatgtgggaagtgtttacacacggcgagatgccgcacggtggccaggccgacgatgaggtgctggccgacctccaggccggtaaagccaggctgccacaaccagaagggtgtcccagtaagctgtatcggctcatgcagagatgctgggcgctaagtccaaaggaccgtcccagtttctcagagatagccagcgctctgggcgatagtaccgtggatagcaaaccgtag

SEQ ID NO: 13783 - DNA, 1521 bp, synthetic construct
  source 1..1521: mol_type = other DNA; note = Synthetic coding sequence
atgcccctcttaggccttctcccacgacgggcttgggcatccctcctgtctcagttgctgcggccaccatgtgccagttgcacaggcgccgtgaggtgccaatctcaggtggcagaggccgtacttactagccagctgaaggcacatcaggagaaaccaaattttattattaagacccccaaaggaaccagggacctatccccccagcacatggtggttcgagaaaaaatcctcgacctcgtcatctcctgttttaaacggcatggcgccaaggggatggacactcctgcctttgaactgaaagagaccctaacagagaagtatggagaagattccgggttgatgtacgatcttaaggaccaaggaggagaattgctttctctgcgctatgatctgactgtgccgtttgccagatatcttgcgatgaacaaagttaaaaaaatgaagaggtaccatgtgggcaaagtctggagacgagaatcgcccactatcgtccagggtaggtatcgcgagttctgccagtgcgatttcgatattgctggacagtttgatcctatgattcccgacgctgagtgcttgaaaatcatgtgcgaaatattgtcagggctgcagctgggcgactttctgataaaagttaacgaccgccgaattgtcgacgggatgtttgccgtgtgtggcgtgcccgagtctaaattcagggctatctgttcttctatcgacaagctcgacaaaatggcttggaaggacgtgcgacatgagatggtggtgaaaaaaggcttagcccccgaggtggccgacagaatcggcgactacgtgcagtgccatggcggtgtttcactggttgaacagatgttccaggaccctcgcctatctcagaacaaacaggcattggagggcctcggggatttaaaactgttgttcgagtatttgacactattcggaattgcagataagatctctttcgacctgagcctagcccgggggctggattactacaccggggtgatttatgaggccgttctcctgcagacaccaacacaagctggagaagaaccgctcaacgtgggtagtgtggcagccggaggacgctatgacggattggtgggcatgttcgatccaaaaggtcacaaggttccctgtgtcggtctgtctataggagtcgagcgaatcttctatatcgtggagcagaggatgaaaacaaaaggcgagaaggtgcggaccaccgaaacccaagtctttgtcgccaccccccaaaaaaactttctccaggagcgactcaagctcatcgcggagctttgggactctgggataaaagcggaaatgctgtataagaataacccgaagctgttgactcagcttcactattgtgagagcaccggaatacccctcgtggtcattattggcgagcaggagttgaaagagggagtgataaaaatacgaagcgtggcctcaagggaggaagtggccatcaaaagagaaaatttcgtggctgaaatccagaaaagactctcagagagctag

SEQ ID NO: 13784 - DNA, 912 bp, synthetic construct
  source 1..912: mol_type = other DNA; note = Synthetic coding sequence
atgagagcctggattttttttctactctgcctagcggggcgtgctttggcagccccccagcaggaagcactccccgacgagactgaggtcgtcgaagagacggtcgcagaggttactgaggtgagcgttggggcaaatccagtgcaagtcgaagtgggggagtttgacgatggcgcggaggaaaccgaggaggaggtcgtggcagagaatccttgccagaatcatcattgtaaacacggcaaggtgtgcgaactcgatgagaataataccccaatgtgcgtgtgtcaggaccccacaagttgtccggcccccatcggcgaattcgaaaaggtgtgctcaaacgacaacaaaacatttgactcatcatgtcatttctttgccaccaaatgcacactggagggaactaagaaggggcacaagctgcacctcgactacataggtccctgcaagtacatacctccttgccttgattcagaactgaccgaatttcccctgcggatgagggattggctgaagaatgtcctggtaactctgtacgagcgcgacgaagataataacctcctcactgaaaagcagaagcttcgcgtgaaaaagatccacgaaaacgaaaaaagactggaagcaggcgaccatcccgtggaattgctggcccgcgatttcgagaagaactataacatgtacatctttccagtgcactggcaattcggccagcttgatcaacatccaatcgatggttatctctcacacaccgagctggccccactgagggcccctctcattccaatggagcactgcaccacaagatttttcgagacgtgtgacctagacaacgataagtacattgccctggatgagtgggcaggatgcttcggcattaaacagaaggatattgacaaggacctggtgatctag

SEQ ID NO: 13785 - DNA, 2634 bp, synthetic construct
  source 1..2634: mol_type = other DNA; note = Synthetic coding sequence
atggctcgtcctagacgagctcgagaacccctgcttgtggctctcctgccactggcctggctagcacaggccggactcgcccgggcagccggaagcgtccgccttgctggtggcctgaccttgggcggcctgtttcccgtgcacgccaggggggcggcaggacgggcttgtggacaactgaaaaaagagcagggtgtccaccgcctggaggcaatgctgtatgcactggaccgcgttaacgccgatccagagcttctccccggagtcaggcttggggcccgtctgctggatacctgcagcagagacacctacgccctcgaacaggcgctctcattcgttcaagccctgattcgcggtcgcggagacggcgacgaagtgggggtgcgttgccccggaggcgtgcctcccctgcgccctgcccctcccgaacgagtggtagccgtcgttggcgcaagcgcgagctctgtttcaatcatggttgccaacgtgcttagactgttcgccatccctcagatcagctatgcttctacagctccggaactttccgactctacacgctatgactttttttccagggttgtaccacccgatagctaccaggcccaagctatggttgatattgttagagccctgggctggaattacgtgtcaaccctggcaagcgaggggaattatggagaaagcggcgtggaagctttcgttcagattagccgcgaagcggggggagtttgtatagcccagagcattaagattccacgggagccaaagcccggagaattttccaaagtgattcgaaggctgatggaaactcccaacgctcgagggatcatcattttcgccaacgaggacgacatcaggcgggtgctggaagcagcaagacaggcgaatctgacgggacattttctttgggtaggctcagactcttggggcgccaagactagtcccatactgtcattagaggatgtggccgtcggggccatcactattctccccaaaagggcatctatagacggatttgatcagtattttatgactcgatccctcgagaacaacaggcgaaatatctggtttgcagaattttgggaggagaatttcaattgtaaactcacttctagtgggactcagtccgacgatagcaccaggaaatgcacaggagaagaacgaatcgggcgagattccacttacgagcaggagggaaaggtccaattcgtgatcgatgctgtctatgcgattgcccatgctctacatagtatgcatcaggctttatgccccggccacacaggcctgtgcccggccatggagccaacagacggaaggatgcttctccagtatatcagagctgtgcgattcaatggctccgctggaactcctgtgatgttcaatgagaatggggatgcgcccggccgctatgatatcttccaatatcaggccaccaatggcagcgcatcttcaggcggctaccaagcagtgggccaatgggccgagaccctccggctcgacgtagaggcactgcagtggtcaggggatccacacgaggtaccctcctctctttgcagcctcccgtgcggtcctggagagcggaaaaaaatggtgaaaggcgtcccctgctgctggcactgcgaagcctgtgacggctatcgctttcaggtcgacgagttcacctgcgaagcctgtcccggcgacatgcgacccacgcccaaccatactggctgtaggccaacgccagtcgtccggctgagctggtcatcaccctgggcagcaccacctctcctcttggccgtgttagggattgtggcaactacgaccgtggtcgccactttcgtcagatacaataacacccccatcgtaagagctagtgggcgggagttgtcatatgtgttgctaactgggatttttctgatttacgctatcaccttcctgatggtggcggagcctggcgcagcagtttgtgcggcccggagactctttcttggactgggcacaacactatcgtattctgcgctgttgactaaaaccaaccgcatctataggatcttcgaacaagggaagcgatctgtgactcctcctcctttcattagcccgacatctcagctggtaattaccttctcacttacatctctgcaagttgtcggcatgatcgcgtggctcggggcacgtcccccacacagcgtgatcgactacgaagaacagagaacagttgatccagagcaggcgagaggtgttctgaaatgcgacatgagtgacctctcattaatcgggtgcctcgggtacagcctcctgctcatggtaacttgtacagtctatgctatcaaggcccgaggggtgcccgagaccttcaacgaagcaaagcctataggattcacgatgtataccacttgcataatttggctggctttcgtcccaatctttttcggcactgctcagtcagccgagaaaatttatattcagaccaccaccttaaccgtatccctgtccctctcagccagcgtttctctcggcatgctctatgtgccaaagacctatgtgatcctgtttcatcccgaacaaaatgttcaaaagaggaaaagaagtctcaaggccacaagcacagtcgccgcccctccaaagggggaggacgctgaggcccacaagtag

SEQ ID NO: 13786 - DNA, 798 bp, synthetic construct
  source 1..798: mol_type = other DNA; note = Synthetic coding sequence
atggcagcagcggttccaaagcggatgagaggacctgcgcaggcaaagctgcttcctggcagcgcaatccaagccctggtcggcttggcgaggcccctggtcttggctctgctgctagtcagtgctgccctgtcttctgtcgtatcacggactgactcccctagccccactgtgctgaattcacacatcagtacgcccaacgttaatgccttgacccacgaaaatcaaactaaaccctctatctcccagattagtaccaccctgccacccaccacatccaccaagaagtccggaggcgctagcgtcgtgcctcatccaagccccacaccactgtcacaggaggaagctgataacaacgaagacccatctattgaggaggaggacctcctgatgcttaattcaagcccctcaactgccaaggacacattggataacggtgactatggcgaacccgactacgattggacgacaggacctcgcgatgatgatgaaagcgatgatactctggaagagaatagaggatatatggagattgaacagtctgtcaagagcttcaaaatgccttcctcaaatattgaagaagaagattctcatttctttttccaccttatcatttttgcgttctgtatagccgttgtatatattacataccataacaagcgcaagatttttctcctagttcagtctcggaagtggagggacgggctgtgcagcaaaaccgtcgagtaccaccggctggaccagaatgttaacgaagccatgccttctttaaagattaccaacgactatattttctag

SEQ ID NO: 13787 - DNA, 2349 bp, synthetic construct
  source 1..2349: mol_type = other DNA; note = Synthetic coding sequence
atggctcccagtgcatgggcgatatgttggctgttgggcgggctacttttacacggaggctcatcaggccccagtcctgggccctctgtccccaggttacgactaagttacagggatctactatctgcgaatagaagcgccatttttctaggccctcaggggtccctgaatttgcaggctatgtatttggacgagtaccgggacagattattcttgggaggacttgatgctctgtattccttaagactcgaccaggcctggcccgatccacgagaagtattgtggccccctcagcccgggcaacgggaggagtgtgtccggaaagggcgcgatcctcttactgaatgtgccaattttgtccgggtgctccaaccacacaataggacccatctgctggcctgcggcacaggcgcctttcagcccacatgtgcattaatcacagttggacatcgaggggagcacgttctccatctggaacccggttctgttgaaagcgggaggggaagatgccctcatgagcctagccgaccgtttgcaagcacattcatagatggcgagttatacactggactaactgccgacttcctcggaagagaagccatgattttcagaagcgggggcccacgcccagctctgcgatcggactcagatcagagcttgctgcacgatcctagattcgtgatggctgcccggattccggagaattccgatcaggacaatgataaggtgtatttttttttctccgaaaccgtgccttctcctgacggggggtcaaaccacgtaaccgtatcaagagtcgggcgggtatgcgtcaacgatgcagggggtcagcgcgtactggtgaataagtggtctacgtttctgaaagcacgacttgtctgttccgtgcctggtcctggcggagctgaaactcacttcgatcagctggaggatgtttttctcttatggcccaaggccggcaaatctctcgaggtctatgctctattctccacagttagcgcggtgtttcagggcttcgctgtgtgcgtataccacatggccgacatttgggaagtgttcaacgggccttttgcccaccgggatgggccacagcatcagtggggtccatacggaggaaaagttccatttccgagaccaggagtatgcccatccaaaatgactgcccaaccaggcagacccttcggtagtactaaggattatcccgacgaggtacttcagtttgcgagggcccatcctctgatgttttggccagtgaggcctagacacgggagaccagttctggtaaagacccaccttgctcagcagcttcaccagatcgtcgttgatcgagtagaggccgaggacggcacctatgatgtcattttcttaggaactgactctggctcagtgctcaaggtaattgcactgcaggccggcgggagcgcggagccagaagaggtggttctggaagagctacaggtgtttaaggttcccacacccattacggagatggaaatctccgtcaagcggcagatgctttatgtgggctcacgtctgggcgtggcccaactgcggctccaccagtgcgaaacatatggaacggcttgtgccgaatgttgtctcgctcgggatccctactgtgcctgggatggcgctagctgcacccactacagacccagcctcggtaaacggcgattcagacggcaggacattcgccacggtaatccggcccttcagtgtttggggcagagccaggaggaagaggcggtaggactcgttgccgcaaccatggtctacggcacagaacacaattccacgtttctggaatgcttgcccaaatcaccccaggctgctgtccggtggcttctccagagaccgggagatgagggaccggaccaggttaagaccgatgagcgcgtgcttcacaccgagaggggattgctgtttaggcgcctcagccgattcgatgccggtacatatacatgcaccacactggagcacggtttcagtcagacggtcgtacgacttgctcttgtggtgatcgtggccagccaactggacaacctgttcccgcccgaaccaaagccagaggagccaccagccaggggaggcttggcctccacccctcctaaagcctggtacaaggatattctgcagcttatcgggtttgctaaccttccacgcgtggacgaatactgcgagcgggtttggtgccggggcaccacagagtgttcagggtgttttaggtcccgatctcgcggaaagcaggccagaggtaagtcctgggccgggctggagctgggtaaaaaaatgaaatcacgggtccatgccgagcacaatagaaccccacgcgaagttgaggcgacctag

SEQ ID NO: 13788 - DNA, 1725 bp, synthetic construct
  source 1..1725: mol_type = other DNA; note = Synthetic coding sequence
atggttgaggacggagccgaggaactggaggatctggtgcatttttctgtctctgaactaccgtcccgggggtatggtgtgatggaggaaataagacgccaaggaaagctctgtgatgtgaccctcaagattggggatcacaagttcagtgcacaccggatcgttctggccgccagcataccttattttcacgctatgtttaccaacgatatgatggagtgcaagcaagacgaaatcgtgatgcaaggtatggacccctcagccctcgaggctctcatcaactttgcctataacggaaatctcgcaatcgaccagcagaatgttcagtcactgctgatgggcgccagtttcttacagctccagagtattaaggacgcctgctgcacattcctacgcgagcggcttcaccctaaaaattgccttggggtgaggcagtttgctgaaacaatgatgtgtgctgtgctatacgatgcagctaactcttttatacaccagcatttcgtggaggtgtcaatgagcgaggagtttctcgcactcccattggaagatgttctcgagcttgtatctagagatgagcttaacgtgaagtccgaagagcaagtgtttgaggccgcactggcgtgggtgcgctatgacagggaacagagagggccatacttacccgaattgttatcaaatatccgactccctctttgcaggcctcagtttctcagcgatcgggtccaacaggatgacttggtgcggtgctgtcacaagtgtcgcgatcttgtcgatgaggccaaggactatcacctaatgccagagagaaggccccatttgcctgctttcaggaccaggcctcgttgttgcacctccattgccggcttgatctacgcagtggggggactcaacagtgccggtgatagtctgaacgtggtcgaggtattcgatcccattgccaactgctgggagcgttgcaggcctatgaccacggcccggtctcgcgttggagtggccgtagttaatggcctgttgtacgccatcgggggctacgacggacaactgagattatccacagtcgaggcctataaccccgagactgatacttggacaagagtggggagcatgaattctaagagatccgcaatggggaccgtagttttggacggccaaatttacgtgtgtggtggttacgacgggaattccagtctcagcagcgtggaaacgtactcaccggaaactgataagtggacagtggtgacctccatgagcagcaaccggtccgcagccggcgttactgttttcgaagggaggatctacgtcagtggagggcatgatggactacaaatcttcagctcggtagagcattacaatcatcacactgccacctggcacccagcagcagggatgctcaacaagcggtgtagacatggggccgcgtctcttggctccaagatgtttgtatgcgggggctatgatgggtccgggttcttgtccatcgctgaaatgtacagcagtgtcgctgatcagtggtgcctgattgttcctatgcacaccaggcgctccagagtgtcactcgtggcctcctgcgggcgactgtacgccgtgggagggtacgatggtcaaagtaatttatccagcgtagaaatgtatgaccctgagacagactgttggacttttatggcgcctatggcatgtcatgagggaggcgtcggcgtgggctgcatacctttgctcacgatatag

SEQ ID NO: 13789 - DNA, 486 bp, synthetic construct
  source 1..486: mol_type = other DNA; note = Synthetic coding sequence
atggctaaggaagagccacagagtatttcacgcgacctgcaggagctccaaaaaaaattgagcctattgattgactcatttcagaacaatagcaaggtggtcgccttcatgaagtccccggtcggccagtacctggatagccatcctttcctggcattcacactgctggtgttcatcgtcatgagcgctgtgccagtgggcttcttcctgctgatcgtcgtgcttaccacattggccgcactactcggcgtgatcattttagagggcctggtgatatcagtaggtggcttttccctcctttgtatcctttgtgggctgggatttgtaagtttggcaatgagcgggatgatgatagcgagctatgtggtggtgagcagcctcatcagttgttggttttctcctaggccactgacgcagcagaacacaagttgtgattttcttcctgccatgaagagcgccgaatttgagggactataccaggagtag

SEQ ID NO: 13790 - DNA, 4503 bp, synthetic construct
  source 1..4503: mol_type = other DNA; note = Synthetic coding sequence
atgacccggatattgactgcgtttaaagtcgtgagaaccctgaaaaccggctttggatttaccaacgtgaccgctcaccagaaatggaagttttcacggccggggattcggctgctgtctgtcaaagctcagacggcccacatcgtgcttgaagacggcacaaaaatgaaaggatactctttcggacatccgtcttcagtagccggggaggtggtattcaacacagggctgggcgggtaccctgaagcaataactgaccctgcttataagggccagattctcactatggctaaccccattatcggcaacgggggcgccccagacacaaccgctctcgacgagttagggctgtcaaaatatttagagtccaatggaatcaaggtgtccggcctcttagtgctggactacagcaaagattataaccactggttagcaaccaaatccttgggtcaatggctgcaggaggaaaaagtcccagccatctatggggtcgataccagaatgctaactaaaatcatacgcgataaagggactatgctaggcaagattgagtttgagggccaaccggtcgatttcgtcgatcctaataagcaaaatttaatagctgaagtgtctacaaaagacgtgaaggtctatggaaagggcaaccccacaaaggtggtggccgtagactgcggtattaagaacaacgtcataagactgctcgtaaagcggggcgcagaggtgcacttggtcccctggaatcacgatttcactaagatggagtacgatggaatcctgatcgccggggggcctggaaaccctgcacttgcggaacctctcatacagaacgtacggaaaattctggagtccgacagaaaggagcccttgtttggcatctccacaggtaacttgatcacaggacttgcagccggagccaagacttataaaatgtccatggctaacaggggacagaaccagcccgtgctcaatattaccaataaacaggcttttatcacagctcaaaaccatggctatgcactggataataccttacccgctgggtggaagccactctttgtcaacgtcaacgaccagaccaatgagggcataatgcatgagagcaagccgttttttgcagtgcagtttcatccagaggtcacacccggaccaattgataccgaatacctgtttgactcgttttttagtctaattaaaaaagggaaagctactacaattacatccgtgctgcccaaacccgcactggttgcctctagagtcgaggtgagtaaggtgctcatcctcgggagcggcggactcagcatcggtcaggcaggcgaattcgactattctggttcccaagccgtgaaggctatgaaggaagagaacgtgaagaccgtactgatgaaccccaatatagcctcagtacaaacaaacgaggtcggcctcaagcaggccgataccgtgtacttcctccccatcactccacagtttgttactgaagtcattaaagctgagcaacccgacggccttattcttggcatgggtgggcagactgccttgaattgcggcgtggagcttttcaagcgaggcgtcctgaaagagtatggagtcaaagtcctgggcacatcagttgaaagtatcatggctaccgaggaccggcagctcttctctgacaagcttaatgagatcaacgagaagatagccccttcattcgcagtggaatctattgaggatgcccttaaagctgccgacactatcggctacccagttatgataaggagcgcgtacgcactcggcgggttagggagcggtatctgcccaaacagagaaaccctgatggatttaagtaccaaggcttttgcgatgacgaaccagatcctggtcgaaaaatccgtcaccggctggaaagaaattgagtacgaggtggtcagagatgcagacgacaattgtgtgactgtgtgcaatatggaaaatgtggatgctatgggcgttcatacaggcgactccgtcgtggtggcccctgcccaaacacttagcaatgctgagttccagatgctgcggcggactagtataaatgtcgtgaggcacttaggaattgtcggcgagtgtaatatccaattcgccctgcatcccacatccatggaatactgcattatcgaagttaatgcccggctgtctcggtcaagcgccctcgcaagcaaggccacaggttatccattggcgttcattgcagctaagattgcacttgggatccccctgcctgagatcaagaatgtagtttcgggtaaaaccagcgcgtgcttcgagccttccctggattacatggtgaccaagataccaaggtgggacctggatcgtttccatgggacgtctagccgaatcggctcgagcatgaagtcggtaggagaggtgatggccattggtcggactttcgaagagagctttcagaaagcccttagaatgtgccatccttctattgaaggctttactccacggctgcccatgaacaaagagtggccttcaaatctggacctgcggaaggagctgtccgaaccaagttccacccgaatctacgcaattgcaaaagccatagacgacaatatgagtttagacgaaatcgagaaactcacatatattgacaagtggtttctgtacaaaatgcgggacatcctaaatatggaaaaaaccctgaaaggactgaattcagagagtatgacagaggagacactgaagagggctaaggagattgggttctccgataaacagatttccaaatgcctcgggttaacggaagcgcagacgcgggaactgagattgaagaagaacatccacccctgggtaaagcaaattgatacattggctgctgagtaccctagcgttactaattacctgtatgtcacatataatggccaagaacatgatgtgaactttgatgatcacgggatgatggtattagggtgcggtccatatcatattggctcctctgtcgagttcgactggtgcgcagtaagctccattagaaccctcaggcaacttggcaagaaaacagtggtcgtgaattgtaaccctgagactgtttctaccgacttcgatgagtgcgacaagctgtatttcgaagagctgtctctcgaaagaattctcgatatctatcaccaggaggcctgcgggggatgcatcatttcagtgggcgggcagatcccaaataacctggcagtcccactgtataaaaacggggttaaaatcatgggaactagtcctctgcagattgaccgtgcagaagatcgttctatcttcagcgcagtcctggatgagctgaaggtagcgcaggccccatggaaggccgtgaacaccttaaatgaagctctggagtttgccaaatctgttgactatccatgtctgttgcggccatcctatgtgctgagcggatcagccatgaatgtggttttttctgaagatgagatgaaaaaattcctcgaggaggccacacgagtgagtcaggaacatcccgtggttcttacaaaatttgttgagggtgccagagaggtcgagatggacgcagtgggcaaggacggccgggtgatctctcacgcgatcagcgagcacgtcgaggacgccggggtccattccggagatgctacactcatgctgccgacccagaccatctcgcagggagcaatagaaaaggtgaaggacgcaacccgtaaaatagctaaagcgttcgcaatcagcgggccgtttaacgtccagttcctggtgaaggggaatgatgtgcttgttatcgaatgtaacctccgcgcctcaaggtcttttccttttgtatccaagaccctcggtgttgatttcattgatgtggcgacaaaagtgatgattggagaaaatgtagatgagaaacacctcccgactctggaccatcccataatcccagctgactatgtggcgatcaaagcccccatgttctcgtggccgagactgagggatgcagacccaattcttagatgcgagatggcatccacaggcgaggttgcatgtttcggcgaaggtatccatacagcctttctgaaggcaatgctgtccactggattcaagatacctcagaagggaatcctgattggcatccagcagagttttcggcctaggtttctgggcgttgccgaacagttgcataacgaagggtttaagttatttgcaaccgaggcgactagcgattggctaaatgcgaacaacgtgcccgcaactcccgtcgcctggccgagtcaagagggacagaatccttccctctcatccataaggaaactgatccgggacggcagcattgaccttgtgatcaatttgccaaataacaacaccaaatttgtgcacgacaactacgtgatccgcaggactgccgtggactcaggaatcccactccttaccaactttcaggtaaccaaactgttcgccgaggcggttcaaaaatcgagaaaggtggactctaagtctctgttccattacagacagtactccgccgggaaagcggcttag

SEQ ID NO: 13791 - DNA, 846 bp, synthetic construct
  source 1..846: mol_type = other DNA; note = Synthetic coding sequence
atggcagtaaatgtttactccacatcagtgacttccgagaacctgtcgaggcatgatatgttagcttgggtgaatgatagtctccacctaaactacactaaaatcgagcaactctgcagtggagccgcctattgccaattcatggacatgctttttcccggatgtgttcatctgcgtaaggtcaagttccaagcgaaactcgagcacgagtatattcataacttcaaggtcctgcaagccgccttcaagaaaatgggggtggataaaattattccggtagagaagctggttaaaggcaagtttcaggataattttgagttcatccagtggttcaaaaaattctttgacgctaattacgatggtaaagattacaatcccctcctcgcgcgtcagggtcaagacgtggccccaccccccaatccaggcgatcagatcttcaataagagcaagaagctgatcggaaccgctgtgccacagcgaacatccccaaccggacccaagaatatgcagacgtctggcagattgagcaacgttgcacccccttgcatcctaagaaaaaacccgcctagtgcccggaacggcgggcacgagaccgacgctcagatactggagctcaatcaacaactagtggatctgaaattaactgtggacgggctggagaaggaacgggacttttactttagcaagctcagggacatcgaacttatttgtcaagagcatgagtctgaaaattcaccggtgatctccggaataattgggattctatacgcaaccgaggaaggatttgctcccccagaagacgacgagatcgaggaacaccagcaggaggatcaggatgaatactag

SEQ ID NO: 13792 - DNA, 531 bp, synthetic construct
  source 1..531: mol_type = other DNA; note = Synthetic coding sequence
atggcattgtggcgtgcgtaccagcgagcccttgcagcgcatccttggaaggtgcaggtgctcaccgccggctcactgatgggtctcggggacatcatttctcagcagctggttgaaaggagagggttacaggaacaccagaggggacgtactctcactatggtttcactgggttgtggtttcgtggggcccgtggtggggggctggtacaaagtgcttgatcggttcatccctgggacaacaaaggtggacgcacttaagaaaatgctcctggatcaggggggctttgccccttgtttcctgggatgctttctgcccctcgtgggcgctctgaacgggctgtctgctcaggataactgggctaagctccaacgcgattaccctgatgccctaatcaccaattactacctgtggccagccgtacagctagctaatttttatctggtgcctttacactaccggctcgccgtggtccagtgtgttgccgtcatatggaatagttacctgtcctggaaagctcaccggctttag

SEQ ID NO: 13793 - DNA, 1143 bp, synthetic construct
  source 1..1143: mol_type = other DNA; note = Synthetic coding sequence
atggcatccctcccggtgctgcaaaaagagagcgtgttccagagtggggcacacgcttatcgcattcccgccctcctgtacttgccgggccagcaatcactgttagcatttgctgaacagagggcgtccaagaaagatgaacacgccgagcttatagtattaagaaggggcgactatgatgctcccacccatcaggtgcagtggcaggcccaagaagtggtggcgcaggccaggctggatggacatcgttctatgaatccatgtcccctgtatgacgcccagaccggcacactgttccttttctttatcgcaatccctggacaggtgacagaacagcagcaactccagacccgggctaacgtgacacgcctatgtcaggttactagtaccgatcacggccgaacatggtcgtcgccgcgggatctaacggacgccgccattgggcccgcctatcgagagtggtccacatttgctgttggccccgggcattgccttcagctgcacgatcgggccaggagcctggtggtgccggcctacgcctatcggaagcttcatcccatccagcggccaattccctccgccttttgttttctgagccatgaccatggccggacatgggcaagaggccacttcgtcgcccaagacacgctagagtgccaggtcgccgaagtagagacaggcgagcagcgggttgtgaccctgaatgcccggtcgcatctgcgcgctagggttcaagcacaatccaccaatgacggtctggacttccaggagtcacaattagtgaagaagttagttgagccacccccccaagggtgtcaggggagcgtgatcagctttccctctcctcgctccggaccagggtcccctgcccagtggttactgtacacacaccctacacattcatggcagagggcagatttaggtgcttacctgaatccgcggccacccgctccagaggcctggtccgaaccagtacttctggccaaagggtcctgtgcctattccgacctgcagtccatgggaacaggtcctgatggctccccgctgttcggatgtctgtatgaggccaacgattatgaggagatcgttttcctgatgtttacacttaaacaggccttccccgccgagtatctcccccagtag

SEQ ID NO: 13794 - DNA, 3165 bp, synthetic construct
  source 1..3165: mol_type = other DNA; note = Synthetic coding sequence
atggcagccgtgaaggaacctcttgaattccatgcaaagcgcccttggcgccctgaagaggccgtcgaggaccctgatgaggaggacgaggacaatacatccgaggccgagaacggcttcagtcttgaagaggtgctcaggcttggtggaacgaaacaagactacctgatgcttgctaccttggatgaaaacgaggaggtgattgatggaggaaagaagggtgccattgatgaccttcaacagggcgagcttgaggcatttatccagaacctgaacctggctaaatatactaaggcgtcgttagtcgaagaagacgagcctgccgagaaggagaactcgtccaagaaggaggtgaaaatccctaagattaacaacaagaacactgcagaaagccagcggaccagtgtcaacaaggtgaaaaacaagaacaggcctgaaccacactccgatgaaaacggaagcacaaccccaaaagttaagaaggataagcagaacatcttcgagttcttcgagcgtcaaacacttcttctccgcccgggaggaaagtggtatgatctggagtattccaatgagtactcactcaaaccacagcctcaggacgtcgtgtctaagtacaagaccttagctcagaagctctatcagcatgaaattaatctgtttaagtccaagaccaactcccaaaaaggcgcctcttccacatggatgaaggccatagtgagttctggtacactgggtgatcgaatggcagcaatgattctgctgattcaggatgatgccgtgcatacgctccagtttgtagagactttggtgaatctggtgaagaagaaaggaagtaaacaacagtgtcttatggccctggatacctttaaagaactcctgattactgatctacttcccgataaccggaagctgcggattttctctcagcggccctttgataagctagaacagctttccagtggcaacaaagattcccgagataggaggctgattctgtggtattttgaacaccagctgaagcatctagtggccgagttcgtgcaggtactggaaacgctttcccatgataccctggtgacaacaaagaccagagccctgacggtggcccatgagctgctgtgcaacaagccggaggaagaaaaagcactcttagtgcaagtcgtcaataaactaggcgatccgcagaataggatcgccacaaaggcatcccatctgctcgagaccttgctgtgcaagcatccaaacatgaagggggtcgtctccggagaagtggaacgactgctgtttcgtagcaatatcagttcaaaagcccaatattacgcgatctgcttcctgaaccagatggccctcagccacgaggaaagtgaacttgccaataaactcatcactgtgtatttttgcttcttccggacctgcgtgaagaaaaaagacgttgagagcaagatgctgagcgctctgctaactggagtgaatcgcgcatacccatacagtcagaccggggacgataaagtgcgcgagcaaatcgacaccctctttaaggtgctgcacatcgttaacttcaacacttctgtccaagcactcatgctgctgttccaggtaatgaatagccagcaaaccataagtgacaggtactacacagccctgtaccgaaagatgcttgaccccggcctcatgacctgcagcaaacaggccatgtttctaaatctcgtgtataaatccttgaaagcagatattgtcctccggcgcgtgaaggccttcgttaagagactgttacaggtgacctgccagcagatgcccccttttatttgcggcgcattgtatctggtgtccgaaatcctgaaagccaaaccgggactcagatcccagctggatgaccatccagaaagcgatgatgaggaaaactttatagacgccaacgatgatgaggacatggaaaagttcactgacgccgacaaagagaccgagatcgttaagaagttggaaaccgaggagacagtgcccgaaaccgacgtggagacaaagaaacccgaggttgccagctgggtgcatttcgataacctgaaggggggaaagcagctcaataagtacgaccccttctcacgcaaccctctgttctgcggagcagagaatactagtttatgggagctgaagaagcttagcgtacatttccacccatctgtggctctgtttgccaagacgattttgcaaggaaattatatccaatactctggcgatccactgcaggactttaccctgatgaggtttctggatcgctttgtgtatcggaaccctaagccgcataagggaaaggagaataccgattcagtcgttatgcagcccaagcggaagcatttcattaaggatattcggcacctccctgtgaactctaaagagttcctcgcaaaggaagaaagccagattcccgtggatgaagtcttctttcaccgttattacaagaaggttgcggtgaaagagaagcaaaaaagggacgcagatgaagagagcatagaggatgtggacgatgaggagttcgaagaactcattgataccttcgaagatgacaattgtttcagcagcggcaaggatgacatggacttcgctggcaacgtgaagaaacgcacgaagggagctaaggacaacaccctggatgaagactccgaggggagtgatgatgaactggggaatctggatgacgatgaagtgtcactgggatccatggatgacgaagagtttgccgaggtcgacgaggatgggggcacctttatggacgtcctggacgacgaatcggaaagtgtacctgaacttgaggtacacagtaaagtgtccaccaagaagtccaagcgaaaaggcaccgatgacttcgacttcgcaggctccttccagggtccgcggaaaaaaaagaggaacctcaatgatagctccctgttcgtgtccgcagaagagtttggacatcttctcgacgaaaatatgggtagcaagttcgacaacatcggtatgaacgcaatggctaacaaggataatgcttcactcaagcaactccgttgggaagcggagagggatgactggctacacaacagagacgcaaaatcgattattaaaaagaagaagcacttcaaaaagaagcggatcaagaccacccagaaaaccaaaaaacagcggaagtag

SEQ ID NO: 13795 - DNA, 1107 bp, synthetic construct
  source 1..1107: mol_type = other DNA; note = Synthetic coding sequence
atggaacccggacagcctcgagagcctcaggagccccgggaacctggtcccggggctgagactgctgcagcccccgtatgggaagaggcaaagatcttttatgacaatctggcgccgaagaaaaagcccaagtcgccaaaacctcaaaatgctgtgacaatcgccgtctcctctcgggcactgttccggatggatgaagagcaacaaatttacacggaacagggggtggaggaatatgtgagatatcagctggaacatgagaatgagccattcagccccggcccagccttcccatttgttaaagcattagaggcagtgaatcggcggcttcgcgaactttatccggacagcgaggacgtgtttgacatcgtcctgatgacaaataatcatgcacaggtgggcgtgagactcattaattctattaatcactatgatttgttcattgagcggttttgcatgaccggcggaaattcgccgatttgctatctcaaggcctatcataccaatctctatctgagtgccgacgccgagaaagttcgtgaggctattgatgaggggatcgccgcagctacaatttttagcccttcacgagatgtcgtcgtgtcccagagtcagttgagggtggcattcgatggggatgccgtactgttttcagacgaatctgaaaggatcgttaaagcccatggcctggaccggtttttcgagcacgagaaagcccacgagaacaaacctctggcccagggccctctgaagggctttctggaagccctgggcagactccagaaaaaattttacagtaagggattgcgattggagtgcccaatcagaacgtatcttgtgactgcacggtcagctgcaagttctggggcacgggctctcaagactctcagatcctggggactggagacggatgaagctctgtttctggcgggcgctcctaaagggcccctgctggaaaagattcggccacatattttctttgacgaccagatgttccacgtagccggtgcgcaggagatgggcaccgtagccgcgcatgttccttacggtgtggctcaaacaccgagacgtactgcgcctgctaagcaggcaccctctgcacagtag

SEQ ID NO: 13796 - DNA, 1080 bp, synthetic construct
  source 1..1080: mol_type = other DNA; note = Synthetic coding sequence
atgctgtctgccgctagtcgagttgtgtctcgagcagctgttcattgcgcactcagaagccccccaccggaagcccgggccctcgcgatgtctcggccgcccccccctagggtcgcctcagtgctgggaacaatggagatgggacgacgtatggatgcgccggcatctgccgctgctgtgcgcgcatttctggagcgcggccacaccgagcttgacacagcattcatgtacagtgacgggcagtctgagactatcctcgggggccttgggttgggcttgggaggcggcgattgccgtgtgaagatagctacaaaggctaacccctgggatggtaaatctctgaagcctgacagcgtgcgatctcaactcgaaacatcacttaagcgtttgcagtgtcctcaggtagacctcttctaccttcacgcccccgaccatggcacccctgtcgaagagacactacatgcctgccagaggctgcaccaggaaggtaaattcgtggaactaggcttatccaactacgcttcctgggaagttgcagaaatctgtactctgtgcaagtcgaacggatggattctgcctaccgtgtatcaaggcatgtacaacgccaccactagacaggtcgaaaccgagctttttccatgtttacggcacttcggcctgcgcttctacgcgtataaccctctggccggtggattgctgactggcaagtacaagtacgaagacaaggacgggaaacagccagtggggcggttcttcgggaacagttgggctgagacatataggaacagattctggaaggagcaccactttgaggccattgccctggtggaaaaagccctgcaggctgcatatggagcatccgcccctagtgtgaccagcgcggccctgagatggatgtatcaccactcccaacttcagggtgctcacggggatgcggtgattctgggcatgagttcattggaacagcttgaacagaacctggctgcaaccgaagagggcccactggagcctgctgtggtggatgcttttaatcaagcctggcatctagtggctcacgaatgtccaaattactttcgctag

SEQ ID NO: 13797 - DNA, 561 bp, synthetic construct
  source 1..561: mol_type = other DNA; note = Synthetic coding sequence
atggacgctgactcagatgtggccttagacattctcattacaaatgtcgtgtgtgtgttccggactcgttgtcaccttaatttaaggaaaatcgcccttgagggtgccaacgtgatttataaacgcgacgttggcaaagttctaatgaagctgcgtaagcccaggatcacggccaccatttggtcttcaggaaagatcatatgcactggtgccactagcgaagaagaggcaaaatttggcgctaggaggctagctcgcagcttacaaaagctgggttttcaagtgatctttacagattttaaggtggtgaacgtgctcgccgtgtgcaacatgccgtttgagattcggttaccggagtttaccaagaacaatcggccccacgcatcttatgaaccagaactgcatccagccgtgtgctacaggatcaagtctctccgagccaccctccagatcttctcaactggctctataacagttactgggccaaatgtgaaggcagtcgctaccgctgttgaacagatatatccgttcgtctttgagagccggaaagagattctctag

SEQ ID NO: 13798 - DNA, 537 bp, synthetic construct
  source 1..537: mol_type = other DNA; note = Synthetic coding sequence
atggctgcaccactcggtggcatgttttcgggccaacccccagggcccccgcaggcccccccgggccttcctggccaggcttcattactgcaggccgcacctggggcaccaaggccttcatcgagcactcttgtggacgaactggagtccagtttcgaagcttgctttgcaagcctagtgagccaggattacgtgaatggcacggaccaggaggaaattcgcaccggagtggaccaatgcattcagaaattcctggacatcgccaggcagactgaatgtttctttctgcaaaagcggcttcagctttcggtccaaaagcccgaacaggttatcaaagaagacgtcagcgaactccgcaatgaattgcagagaaaagatgctcttgtgcaaaaacaccttacaaagctcaggcactggcagcaggtactggaggacatcaacgtgcaacataagaagcctgctgatatcccccaggggtccctggcctatctcgagcaggcttccgccaacatccccgcacccctgaaacccacttag

SEQ ID NO: 13799 - DNA, 738 bp, synthetic construct
  source 1..738: mol_type = other DNA; note = Synthetic coding sequence
atggagaagacagaactcatccagaaggcgaaactcgctgagcaagcggagcggtacgatgacatggccacgtgtatgaaagccgttaccgaacagggagctgaactgtctaacgaagagagaaatctgctctctgttgcctacaagaatgtggttggaggccgccgcagcgcatggcgggttatttcttcgatagagcagaagacggacacttcagataagaagctccaactgattaaagattaccgggaaaaggtggaatctgagcttcggagcatatgcaccactgtgttggaactcttggataagtacctgatcgcaaacgccacgaatcccgaatctaaggtgttctacttgaagatgaaaggagactatttccgctaccttgcggaagtggcatgcggcgacgatcgcaagcagaccatcgataactcgcagggcgcttaccaggaggcgttcgatattagcaaaaaggagatgcaacctacgcacccgattaggttagggctggcacttaatttctccgtcttttactacgagatacttaataacccagagctggcttgtacgcttgccaaaaccgccttcgatgaggctatagccgaacttgacactctgaacgaagattcctacaaagattctacactgattatgcagctccttagggacaacctgaccctttggacaagcgacagcgccggcgaggaatgtgacgccgcagaaggcgccgaaaactag

SEQ ID NO: 13800 - DNA, 534 bp, synthetic construct
  source 1..534: mol_type = other DNA; note = Synthetic coding sequence
atgcccggtttaacagcctacttcggattgctggaaatctgcggggtaaagggaggagagaccgtaatggtaaatgctgctgccggagccgtgggatctgtcgtgggccagattgccaagctcaaaggatgtaaggtggtaggtgccgtaggatccgacgaaaaagtcgcctacctgcagaagctggggtttgacgtggttttcaactataagactgtggaatccctggaggaaacattgaaaaaggcgtctcccgatggctacgattgttatttcgacaacgttggcggggagtttagtaataccgtgattggccaaatgaaaaagtttggacgcattgccatctgcggtgcaatcagcacttacaaccggactggtccacttcccccgggtccaccgcctgaaattgtgatctatcaggagctgcgcatggaagcctttgtagtataccgttggcaaggggatgcacggcagaaggcgctcaaagacctgctgaaatgggtactcgaattaccctactttgtcatcgattag

SEQ ID NO: 13801 - DNA, 3660 bp, synthetic construct
  source 1..3660: mol_type = other DNA; note = Synthetic coding sequence
atgtttggagcgggagacgaggacgacactgactttctttcacctagtggcggagcacgcctcgcttcactcttcgggctggaccaagctgccgctgggcatggaaatgaatttttccagtataccgctcccaaacagcctaaaaagggccagggcactgctgccaccggcaaccaggcaacacccaaaaccgctccagctaccatgagcacccctaccattctggtggctacagctgtgcacgcttatcgatacacaaatggccagtacgtaaagcaaggaaagttcggagctgcggtcctgggaaaccacacagcacgtgaataccggatcttattgtatatttcccagcagcagccagtcactgtggctcgtattcatgttaatttcgaattgatggttaggccaaataactactctactttttacgatgaccagagacagaattggtcaataatgttcgagagtgagaaagctgcagtcgagttcaataagcaggtctgcatcgccaaatgtaactccacgagttccctggacgccgtcctcagccaggacctgattgtggccgatggacctgccgtggaagttggagactcactcgaggtcgcctacacgggatggctttttcagaatcacgtcctggggcaagtgttcgattcgacagccaacaaagacaagctgctgagattaaaactgggttccggtaaggtaatcaagggctgggaagatgggatgctggggatgaagaaaggcggcaagcgtctgctgattgtccccccggcctgcgccgtgggttctgaaggtgttatcgggtggacacaggccacggatagtattttagtgttcgaggtggaggtccggcgggtcaagttcgctagggacagcggtagcgatggccattccgtgtccagcagagacagtgccgctccaagccctatccccggcgccgacaatctcagcgctgaccctgttgtttccccgccgacctccattccctttaagtctggggaacctgccttgcgcaccaagagcaactccctctctgagcagctggccattaacactagccctgacgccgtgaaggctaagcttatctcccggatggccaaaatggggcagcctatgcttccaattttacccccacaattagacagcaatgactctgagatcgaagatgtaaacacactgcagggtggcggccaaccagtggtgaccccgtcagtgcaaccctccctgcatccagctcacccagccctcccccagatgacctcgcaagcgccacaaccaagcgtgacagggctgcaggcaccttcagccgccttgatgcaggtgagttcacttgattcccacagtgccgtttctggaaatgctcagtctttccagccttatgccggaatgcaagcatatgcatatccgcaagcatcagcagtcacgtcccagttacaacctgttaggcctctataccctgcccccttgtcccagcccccccactttcaggggtccggggacatggcgtcctttctgatgacggaggcaaggcagcataataccgaaatccggatggccgtgagcaaggtggctgacaagatggatcacctaatgacgaaggtggaagagctgcaaaaacactcggcaggtaactctatgttgatccccagcatgtcagttactatggagacctccatgatcatgtcgaacatccagcgtattattcaggagaacgaacgactgaagcaggagatcttagaaaagtccaatcgtatcgaggagcagaacgataagatttctgagctaattgaacgcaaccagcggtatgtagagcaaagcaaccttatgatggaaaagcgcaacaacagtttgcagacagccacagaaaacacccaggctcgggttctgcacgctgaacaggagaaagctaaggtcacagaggagctggcagctgctactgcgcaggtttctcacctgcagctcaaaatgaccgctcaccagaagaaagagacggaacttcagatgcagctcacagagtccttgaaggaaacagacctcctgagagggcaactgacgaaggtgcaagccaagctcagtgaactgcaggagacatctgagcaggcccagagcaagttcaagtcggagaaacagaatcgtaagcagttagaactgaaggtgactagcctggaagaagagctcaccgatctcagagtggagaaagaatcactggagaaaaacttgtctgagagaaagaaaaagtcagcccaagaacggtcacaggctgaggaggagatcgacgagatcaggaagtcttaccaagaggaactagacaagttgagacaactgctaaaaaaaacgagggtgtcaaccgaccaggcagccgctgagcagctctccttagtccaagctgagctgcagacccagtgggaagccaaatgcgagcacctcctggccagtgcaaaagatgaacatttgcagcagtaccaagaagtctgtgctcagcgcgacgcttaccaacaaaagttggtccagctgcaggaaaaatgcctcgctctacaagctcagatcacagcactcaccaaacagaacgagcagcacatcaaggaactcgaaaaaaacaagagtcagatgagtggcgtcgaggcagccgcatccgaccccagcgagaaagtcaaaaaaatcatgaaccaggtatttcagtccttacgacgcgagtttgaactcgaagagtcttacaacggtcgcaccatacttggcacgatcatgaacaccattaaaatggtgacactgcagctacttaaccagcaggagcaagaaaaggaggagtctagttctgaggaggaggaagaaaaggctgaggagcgccctagacgcccttcccaggagcaaagcgcctccgcctcctcaggacagcctcaagcacctttgaatcgggaacggccagagagtcccatggtgcctagcgaacaggtggttgaagaagctgtgcccttacctccccaagcgctcaccacgagtcaggatggacaccgcaggaagggagatagcgaagcggaggcgcttagtgaaataaaagatggttcactgcctcccgaactgtcttgtatcccaagtcatcgggtcctagggccaccaacttcaataccccctgaacccctgggcccggtgtcaatggattccgaatgtgaagaaagcttggccgcctccccgatggcagccaaaccagataacccatctggaaaggtttgcgtcagagaggtggcgccggacggcccactgcaggaatcctccacccggctctccctcacgagcgatcccgaggagggagacccactggccctggggcctgagagtccgggtgaaccccagcctccccagctgaaaaaagacgatgtgacttcaagcacaggaccccataaagagctgagctcaactgaagcagggagcaccgtggccggagccgccctacgccctagccaccacagccagcggagcagtcttagcggggacgaggaggatgagctgtttaaaggcgctacactgaaggcattgcgacccaaggcacagcctgaggaggaggatgaggacgaagtcagtatgaagggtagaccgccccctactcccctctttggtgatgacgatgacgacgacgacatcgattggttgggctag

SEQ ID NO: 13802 - DNA, 6978 bp, synthetic construct
  source 1..6978: mol_type = other DNA; note = Synthetic coding sequence
atgaaaaagggatctcagcagaagattttctccaaggccaagattccttcctctagtcatagtcctattcctagctctatgtccaacatgaggagtagatctctgtcacccctgattggtagcgaaacactgcccttccatagtggagggcagtggtgtgaacaggtcgaaatagcagacgagaacaatatgttgcttgactaccaggatcacaaaggtgctgatagccatgctggtgtgcgttacatcacagaggccctgattaagaagctgacaaaacaagataacctggcactgattaagtccctgaacctgagcttaagtaaggatggcggtaagaagttcaagtatatagaaaaccttgaaaaatgcgttaaattagaggtcttgaacctctcatacaatctgatcggcaagattgaaaaactggacaagttgctgaagctccgggagctgaatctgagctacaataaaatttctaagatagaaggtatagagaacatgtgtaatctccagaaactcaacctggcaggtaatgaaatagaacatataccagtctggctgggcaagaagttaaaatccctgcgggttttgaatttgaagggcaacaaaatcagttctttacaagatatcagcaaacttaaaccattgcaggacctaatttcactgatcctggtcgaaaacccagtcgtgaccctgccacactatctgcaattcactatctttcacctccggtccctagaatctctggagggacagccagttaccacccaggatcgtcaggaggcttttgagcgtttttcactggaggaagtggaacggttggaacgcgatctggaaaaaaagatgatcgaaactgaagaacttaaatccaaacagacccgttttcttgaagaaatcaaaaatcaagataaactgaataagtcacttaaggaagaggccatgctgcaaaaacaatcatgcgaagagcttaaatcagacctgaataccaagaatgagctactgaaacagaagacaatcgaactgacccgcgcctgccagaagcagtacgagttggagcaagaactggctttctacaaaatcgatgccaaatttgagcccctgaactactatccctctgaatatgcagaaattgacaaggcccctgatgaatctccttatattggcaaatcacgctataagaggaatatgttcgccaccgaatcctacatcatcgattctgcacaggcggtgcaaattaaaaagatggaacccgatgaacaactccggaatgaccatatgaatctacggggacacactcctctggatacgcaattagaagataaagagaagaaaatcagcgcagctcagacacgactgagcgagctccacgatgaaatcgagaaagctgagcagcagatcctccgggctacggaggaatttaagcagctggaagaggctatccagttgaagaaaatctccgaagcaggaaaggacttgctctataagcagctgagcggccgactgcagctggtaaacaagctccgccaagaagctctggatctggagctgcagatggagaaacaaaagcaggagattgcagggaaacaaaaagaaatcaaagacctgcagatcgccatcgactcactagattcgaaagatcccaagcattcccatatgaaggcccagaagtctgggaaagaacagcaactagatatcatgaacaaacaatatcagcagctggagagtcggctcgacgaaatactgagtaggattgccaaggaaaccgaagagatcaaagacctggaagagcagctgacagaagggcagattgcagccaacgaagcgttaaagaaagacctcgagggagttatctcgggactgcaggagtacctggggacaattaaagggcaggctacacaggcccagaacgaatgcagaaagctcagagacgagaaggaaaccctgctacagcgcctcacggaagtcgagcaagagcgcgaccagttagagatcgtggcaatggatgctgagaacatgcgcaaagagcttgccgagctcgagtcggccctgcaggaacagcatgaggttaatgcgtcccttcagcagacacaaggcgatctaagcgcctacgaagctgaactggaggccagacttaatcttcgcgacgccgaggccaaccagctaaaagaagaactcgagaaggtgaccagactgactcagttggaacagagcgctttgcaagcggagcttgagaaagagcggcaagccctcaagaatgccctggggaaagctcagtttagtgaggaaaaggaacaagagaactccgagctgcatgcaaagcttaagcacctgcaagacgataataacctgttgaagcagcagctgaaagattttcaaaatcatctgaaccacgttgtcgatggactggtgaggccagaggaggtggctgcaagagtagacgaactgagacggaagctcaagctgggtacgggcgaaatgaatattcattcaccttccgacgtgctgggtaagagtttggctgacctgcagaaacaattctcggagattcttgcacgttccaagtgggaaagagacgaagcccaagtccgtgagcggaaactccaggaagaaatggccctgcaacaggaaaagctggcaaccggtcaagaggagttcagacaagcctgcgaacgtgctctggaggcacgaatgaacttcgacaaacgccagcatgaagctagaatccagcagatggagaatgagattcactatctgcaggaaaatcttaaaagtatggaggagatccaggggctaactgatctgcagctccaggaagccgatgaggaaaaggagcgtatcctggcccagttgcgcgagctcgaaaaaaaaaaaaaattagaagatgccaaaagccaggaacaggtgttcggactggacaaggagctgaagaagttgaagaaggccgttgcaacgtccgacaagctggctacagctgagcttactatcgccaaggaccagctgaaatcactccacggaaccgtaatgaagattaaccaggagcgcgccgaggaactgcaagaggccgagaggttcagcaggaaggctgctcaagcagcgagggatctgacgagagctgaggccgaaattgaactcctgcagaacctgctaagacagaaaggagagcaattcagactagaaatggagaaaacaggggtggggacaggggctaattcacaagttcttgagatcgaaaagttgaatgagaccatggagcgccagcggactgaaatcgcacgtctacagaacgtgctggatctgaccgggagcgataacaagggcggctttgaaaatgttctggaggaaatagcagaattgcgcagggaagtatcctaccagaatgactacatctcaagtatggctgatcccttcaaaagacgggggtattggtatttcatgcctcctcctccttccagcaaagtgtctagccacagttcccaggccactaaagattcgggcgtcgggctgaaatactccgcctctacacctgtgaggaagccccgtccggggcaacaggatggaaaggaggggagccagccccccccagctagcggatactgggtgtacagcccaattcggtccgggctccacaagttgtttccctcccgggatgccgacagtgggggagacagccaggaggagagcgaactagatgatcaggaggaaccgccctttgttcccccccccggctatatgatgtataccgtgctccctgacgggtcaccagttcctcagggcatggcgctttatgcaccgccaccacccttgccgaacaactctcgcccactgacacctggcacggtcgtatatggcccgccaccggccggagcccccatggtctacggccccccaccacccaatttctcaatcccgttcatccccatgggggttctccactgcaacgtcccggaacaccacaatttggagaatgaagttagccgtctggaggacatcatgcagcaccttaaatccaagaagcgcgaggagcggtggatgcgcgccagtaagcgacaatctgagaaggaaatggaagagctgcatcataatatagatgatctgctccaagagaagaagtcactagaatgcgaggtcgaagagctccataggactgtgcagaagagacagcaacagaaggactttattgatgggaacgtagaatcattaatgactgagttagaaatcgaaaagtcactcaaacaccacgaggacatcgtagacgagatagagtgtattgaaaaaaccctcctgaagcgcaggtcagaactcagggaagccgataggctactcgcagaggctgagtccgagttatcgtgcacaaaagagaagacaaagaatgcggtagaaaagtttaccgatgctaagcgaagtctccttcagacagagagtgatgccgaagaattagaacgcagggcacaggagactgccgttaatctggtgaaggccgatcagcagctcagaagcctgcaagcagacgcaaaggacctggaacaacataaaatcaaacaggaggaaattttgaaggaaataaacaagatagttgcagcaaaggacagcgacttccaatgcctgagcaagaaaaaagaaaagctcacagaagagctgcagaagttgcaaaaagacatagagatggctgagcgcaatgaggaccatcacctccaggtgttgaaggaatccgaagtgctgttgcaggccaaacgggccgagcttgaaaagctgaaaagtcaggtgacctcccagcagcaagagatggccgttctggaccggcagctgggacacaaaaaggaagaactgcatcttttgcaaggatcaatggtccaggccaaggcagatttacaggaagctctccggctcggggaaacggaggtgaccgaaaagtgcaatcacatacgggaagtgaaatctcttctggaggagttaagtttccagaaaggggagctaaacgtgcagatcagcgaacggaaaacacaacttactctgatcaaacaggagattgaaaaggaggaggagaacctccaagtagtgctgcggcagatgtccaagcataaaactgaacttaaaaacattttagatatgctgcaactagagaatcatgagctccagggcctgaaactgcagcatgaccagagagtaagcgagttagagaagactcaggttgccgtactcgaagagaagctggagttggaaaatctccaacaaatctcacagcagcaaaagggcgagatcgaatggcagaagcagctgcttgaaagagacaagcgagaaatcgagcggatgaccgctgagagtagagctcttcagagctgtgtggagtgcctcagtaaggaaaaagaggacctgcaagaaaaatgcgacatctgggaaaaaaagctggcacagaccaaaagggtactggctgcagccgaggagaacagcaaaatggaacaaagcaatctggaaaaactcgaacttaatgtccgcaagctgcagcaagagttggaccagctgaatagagacaagttgagcctccataacgacatttcagcaatgcaacagcagctgcaggaaaagcgggaggccgtgaattctttgcaagaagagctggcgaatgtacaagaccatctcaatctcgctaagcaggacttactgcacacgacaaaacaccaggacgtcttgcttagtgaacagaccagactgcagaaagacatctctgaatgggctaacagatttgaggattgccagaaggaggaggagacaaaacaacaacagctccaggttcttcaaaacgagattgaagagaacaaactcaagctggtccagcaagagatgatgttccagcgcctccagaaagagcgggaatcggaggaaagtaaattagagacgagcaaagtgaccctgaaggaacagcagcaccagcttgagaaggagcttacggaccagaaaagtaagttggaccaggtcttgtcaaaggttctggctgccgaggagagggtgcggaccttacaggaagaggaaagatggtgtgaaagccttgagaagacactctcccagacaaaaagacaactgtctgagagagaacagcaattagttgaaaaatctggggaacttctggccctgcagaaggaggccgactcaatgcgcgccgattttagtctgctgaggaatcagtttcttacagaacgtaaaaaagctgagaagcaggtggcctcccttaaggaggcattgaaaattcaaagaagccagttagagaagaacctgctggagcagaagcaggagaacagttgcattcaaaaggaaatggctaccatagagctcgtcgcacaggataaccacgagcgcgctcgaagacttatgaaagaactgaatcagatgcagtacgaatatactgagttaaagaagcagatggctaatcagaaggatctagaacggcgtcaaatggaaatttctgacgctatgaggacattgaagtctgaggtcaaggacgagatccgaacatccctcaagaatctgaatcaattcttgccagaactgcccgctgacctggaggccatcttggagcggaatgagaatctggagggtgagctggagagtctcaaagaaaatctgccatttactatgaatgaaggccctttcgaagaaaaattaaatttctcgcaggtgcacattatggatgagcattggcggggcgaggcccttcgagaaaagttgaggcaccgggaagatcgccttaaggcgcagttgagacattgcatgagtaagcaggctgaagtgcttatcaaaggaaagcgacagacagagggcaccctgcactcgctgcgacggcaggtcgatgctctcggcgaattggtaacctctacatctgcagacagtgctagctccccctcactgtcgcagctggagagttccctgacagaggactctcagctgggtcagaaccaggaaaaaaatgcatcagcgaggtag

SEQ ID NO: 13803 - DNA, 2811 bp, synthetic construct
  source 1..2811: mol_type = other DNA; note = Synthetic coding sequence
atggagcccgatatcattaggatgtattcatcatctccgccccctttagacaatggcgctgaggacgacgatgacgacgaattcggcgaattcggcggattttctgaagtatctccaagcggagtcggctttgtggactttgacactcccgactacaccaggcctaaggaagaatttgtgcccagcaaccactttatgcccattcatgaattctcagagaacgtagactccctgacctcattcaagtcgataaagaacggcaatgataaggacatcactgccgagctgagtgcccccgtaaaaggccagagcgacgtgttactgtcaaccacatccaaagagattatttcttcagaaatgctagcaacatcaattgatggaatggagcgcccggggaatctcaacaaggtggtagagcaaagacagaatgtcggcacactagaaagcttttctcctggcgacttccgcaccaacatgaatgttgttcaccagaataaacagttagagtcttgcaatggcgaaaaacccccgtgcttggagatcctgactaacggattcgccgtgctggaaaccgtgaatccccaggggacagatgaccttgacaacgtggccgattctaaaggtagaaaaccactttccacccactccacagagtacaatctcgattctgtgcctagtccggccgaggagtttgccgacttcgccacctttagcaaaaaggaaaggatccagctggaagagatcgaatgcgcagtgctcaatgatagggaagctttgacaattagagagaataacaagattaatagggttaacgaactcaacagcgttaaagaggttgctctgggccgatccctggataacaaaggagacactgatggcgaggaccaagtctgcgtttcggaaatctccatcgtgacaaaccgtgggttttcagtggagaaacagggcttgccaacactacaacaggacgaattcctgcagtcaggcgtgcagagtaaagcctggtctcttgtggattccgctgacaattctgaggccatccggagggaacaatgtaaaaccgaggagaaactcgatcttcttactagtaaatgtgctcacttgtgcatggacagtgtgaaaacctctgatgacgaggttggatcaccaaaagaagagtcacggaagttcacaaacttccaatcccctaacatcgatcccacggaggagaacgatctggacgacagccttagtgttaagaatggagatagcagtaacgactttgtgacttgcaacgacataaacgaagacgatttcggtgattttggggactttgggtccgctagcggcagcacacctccgtttgtgacgggcacccaggactccatgtccgatgccacatttgaagaatctagtgaacacttcccacactttagcgagccaggtgatgatttcggggaatttggcgacatcaatgcagtttcatgccaagaagagaccatcctcacaaagtctgatctgaagcagacaagcgacaacctctcagaagagtgtcagctggcacgcaagagctctggcaccgggactgagcctgttgccaaactgaaaaatggtcaagaaggcgaaattggacacttcgattcagtacccaatatccaggacgactgcaatggattccaggacagcgacgattttgccgacttctcctctgccggccccagccaggtggtcgattggaatgctttcgaagacgagcaaaaagattcttgtagttgggccgcatttggggaccagcaggcaacagaatcgcaccaccgcaaggaagcttggcagtcccaccgcaccgatgaaaacatcgacacgccggggactcccaagacccactctgtgcccagcgctacgagtaaaggggccgtcgcgtctggtcacctccaagagagcgccacttctgtgcagacggccttgctgaatcgtctggagcggatttttgaagcatgcttcccatcaatcttggtgccagacgccgaggaagaggtgacaagccttaagcatcttctggagacgtccaccctccccatcaaaaccagagaagctctgccagaaagtggtgagctgctcgacgtttggactgagttacaagacatccatgatgcacacgggctcaggtaccagtggggaggcagccatagcaacaaaaagttactcagctctctgggaatagacacgcgtaatatcctttttacaggtaataaaaagcagcctgtgatcgtgccgatgtacgccgcaggtctcggaatgctggaacccaccaaagagcccctaaagccacttagcgccgctgagaaaatcgcatctataggccaaactgcaacaatgagtccagacatgaacacatgcactagtgaccagtttcaggaatctttaccacccgtccagttcgattggtctagcagcggtctgaccaatcccttggacgcttcgggaggctccacattgttgaatctcgatttctttggcccggtggatgactcctcatctagttcatcaactactataccaggcgttgatcctgagctctatgaactgaccaccagcaaactcgaaatctctacttcctccctgaaggtgacagatgcatttgcccgtctcatgagtactgtcgaaaagacgtctaccagtacccgcaaacctaaacgagaggagcatttgagcgaggaagccattaaagtgatcgcaggacttccagacttaacatttatgcacgctaaggtgttaatgttccccgccacgctgaccccctccaccagttctcaggagaaagcggacgggtag

SEQ ID NO: 13804 - DNA, 2730 bp, synthetic construct
  source 1..2730: mol_type = other DNA; note = Synthetic coding sequence
atggagcccgatattattaggatgtatagtagttctccaccacctttagacaacggggccgaggacgacgacgatgacgagtttggtgaatttggtggattctcagaggtgagccctagtggagttggcttcgttgattttgacacaccagactacactcggcccaaggaagagttcgtcccttctaatcattttatgcccattcacgaattctcagagaacgtggactcccttaccagcttcaagtctattaagaacggcaacgacaaggacatcactgccgagctcagtgccccagtgaaaggacagtccgacgtgcttctttctaccactagcaaggagatcatttcatctgaaatgttagcaacttccatcgacgggatggagaggccaggaaacctcaataaggtcgtggagcagcgccagaatgtgggcactctggagtctttcagccccggcgacttcaggactaacatgaatgtggtgcaccaaaacaaacaactggagagttgcaacggcgaaaagccaccctgccttgaaattctcacgaacgggttcgccgtcttggagacagtgaatccccagggcactgatgatctggataatgtggctgacagtaagggacgtaaaccattgagcacccactccacagaatacaatttggactctgttccctccccagccgaagaattcgccgattttgctaccttctccaaaaaagaacggatccagctggaggagatagagtgcgccgttcttaacgatagagaggctttgaccattagagaaaacaacaagatcaacagggtgaacgaactgaattccgtaaaagaagttgcactaggacgctccctggataataaaggcgataccgatggcgaagatcaggtgtgtgttagcgaaatatcaatagttaccaacagagggttcagcgtggagaagcagggcctgcccactctccaacaggacgagtttcttcaaagcggtgtccaaagcaaggcatggtctttggtggactcagctgataactccgaggccattcgaagggagcaatgcaagaccgaagaaaagctggatttgctcacgagcaaatgcgcgcatctgtgtatggacagcgtgaaaacctctgatgacgaggtgggatccccaaaggaggaatccaggaagtttaccaatttccagagccctaatatcgatcccactgaagagaatgatctggatgacagcttgtctgtcaagaacggggactccagcaatgacttcgtgacttgcaacgatatcaacgaggacgactttggagattttggcgattttggctccgcgagtggttctactcccccatttgttacaggcacacaagattcaatgtccgatgccactttcgaagagtcaagtgaacacttcccacatttctccgagcccggcgacgatttcggagagttcggcgacattaacgctgtgtcatgccaagaggagaccatactgacaaaaagcgacctgaagcaaacatccgataacctgtctgaagagtgccagcttgccaggaagtccagtggcacaggcaccgagccggtggccaaattgaagaacggacaggagggggaaatcggacactttgattcagttccaaacatccaggacgactgcaatggtttccaggatagcgatgactttgctgatttcagtagcgctgggcctagccaggtggtggattggaatgctttcgaggacgagcagaaggactcttgttcatgggccgcatttggcgaccagcaggcaacagagtcacaccataggaaagaagcctggcagagccatcgaacggatgaaaatattgataccccaggaacacctaaaactcatagcgtgccctcagccacttcaaagggggccgtcgcgtccgggcatttacaagaaagcgccacttcagttcagaccgccctcttgaatcggctcgaaagaattttcgaggcctgctttccttccatcctcgtcccagatgccgaagaggaagtcaccagcctgaagcaccttctcgagacatccaccctgccaattaaaactcgagaggccctacctgagagcggagaactcctcgacgtgtggaccgagctccaggacattcacgacgctcacggtctgcgttatcagtggggcggtagtcactccaataagaagcttttgagttcccttggcattgatacccgcaacattctcttcacaggtaataagaagcaacccgtaatcgtccctatgtatgcagccggactcggtatgctggaaccaacaaaagaacctctgaagcctttatccgcagccgaaaagattgcgtctatagggcaaaccgccacgatgtccccagatatgaatacgtgcacatcagaccagtttcaggagagtctccctccagtgcaattcgactggtcttcctccggtctaaccaacccattggacggtgtcgatccagaactgtacgaactcactactagtaaactggaaatatcaacgtccagcttaaaagtcaccgatgcgttcgctaggctgatgtcgaccgtagaaaagacttcaacaagcacctcacgtaagcctaaacgcgaggaacatctttccgaggaggccatcaaagtaatcgcaggcctcccagatctgaccttcatgcacgccaaagttttgatgttccctgccacactgaccccgtctacctcaagtcaggagaaagccgacggctag

SEQ ID NO: 13805 - DNA, 306 bp, synthetic construct
  source 1..306: mol_type = other DNA; note = Synthetic coding sequence
atggtgtgtgagaaatgcgagaaaaaactcggcaccgtgattaccccagacacctggaaggacggggcccgcaacacgacagaatccggtggaagaaagctgaatgaaaataaagccttgacctccaagaaagcacgcttcgacccctacggcaagaataagttttccacatgtaggatctgtaaatcatcagtccaccagcctggaagccactactgtcaaggatgcgcctataaaaagggcatctgcgccatgtgcgggaagaaagtgttggacacaaagaactacaaacagacctccgtgtag

SEQ ID NO: 13806 - DNA, 1467 bp, synthetic construct
  source 1..1467: mol_type = other DNA; note = Synthetic coding sequence
atgaactttactcccacccacacacccgtgtgtaggaagaggactgtggtgtccaagcgcggagtagctgtgtctggacctacaaaacggcgtgggatggctgacagccttgaatccactcccctaccctcaccagaggatagactagctaagctgcacccttctaaagagctattagagtattatcagaagaagatggctgagtgtgaggcggaaaacgaggacctcctaaagaaactcgagctgtacaaagaagcttgcgagggacagcataaacttgagtgcgaccttcagcagcgtgaggaggaaatcgctgagcttcaaaaggccctatctgacatgcaggtatgcctctttcaggagagagaacacgttctgcggctgtactccgaaaacgaccgactcagaatcagagaactggaggacaagaagaaaatccagaacttgctcgcactggtggggaccgatgccggggaagtcacttacttttgtaaagaaccccctcacaaagttacgatactccagaaaaccattcaggccgtcggcgagtgcgagcagagtgagtcctccgccttcaaagcagatccaaagatcagtaaaaggcgccctagcagggaaagaaaagagtcaagtgagcattatcagcgagacatacagacgctcatcctccaggtcgaggccctgcaagcccagctcggggagcaaactaaattatctcgggagcagatcgagggactcattgaagaccgtcggattcaccttgaagagatccaagtgcagcaccaacgaaaccagaacaagattaaggaacttacaaagaatctgcatcacacacaggaactgttgtatgaatccactaaggatttcttacagttaagaagtgagaaccagaataaagagaagtcctggatgctcgaaaaagacaacctgatgtcaaaaatcaagcagtatagagtccagtgcaaaaagaaagaggataaaatcggaaaggtcctacctgtgatgcacgagtcccatcatgcacagtccgagtacattaagagtctgaaagataagctcgtccaggaaaaaaaactaagcaacatgtaccaggaacagtgcatcagcctggaggaagagcttgctcgaattcgggaagaggagggtatgcgcagagagatttttaaggatcgcactaacaagatgggaaaacgcttgcagattatgaccaaaaggtatgaggccctggagcggcgtcgaatactggaggttgaaggcttcaagacggatattaaggtcctgagacagaagcttaaggacctggaacagatgttatataaggcaaccgtgaatgctagggccaatcaggacctcgcattgctctgcgaggttcgggacagtaaccgacgcgcgcacaaaatccagggagaattaaagaatctaaagagcaaggtgtttgggcttgagaacgagctacgtttatgttag

SEQ ID NO: 13807 - DNA, 258 bp, synthetic construct
  source 1..258: mol_type = other DNA; note = Synthetic coding sequence
atgtccaaggttagttttaaaatcacacttacgtccgaccctaggcttccatataaagtgctcagtgtgcctgagagcacccccttcactgccgttcttaaattcgccgccgaggaatttaaagtgcctgctgctacgtctgccattatcaccaacgatggaatcggaattaaccccgctcagactgctggcaatgtctttctgaagcacggatcagaactccgaattattcctagggaccgcgtggggtcttgttag

SEQ ID NO: 13808 - DNA, 585 bp, synthetic construct
  source 1..585: mol_type = other DNA; note = Synthetic coding sequence
atggatgaggatggtctccccctgatgggatcaggcatcgatctaaccaaggtccctgctatccagcagaaacggaccgtggcttttctaaaccagtttgtagttcatacagtgcagtttctgaatcggttctccaccgtgtgcgaagaaaaactggccgatctgagtttgcggatccagcagattgagaccacgttaaacatcctcgatgctaagttgagctcgattccaggtctggacgacgtcacggtcgaagtgtcccctcttaacgttaccagtgtgactaacggcgcgcacccggaagctactagcgagcagccacagcagaacagcacccaggattctggcctgcaagaatccgaggtttctgccgaaaatattcttacagttgccaaagatcccaggtatgcccgatacctgaaaatggtacaggtgggcgtaccagtgatggctattaggaacaagatgatctccgaggggctggacccagacctgctggagcgtccagatgcccccgtgccggatggcgagtccgaaaagaccgtcgaggaaagcagtgattcagagtccagtttctctgattag

SEQ ID NO: 13809 - DNA, 2226 bp, synthetic construct
  source 1..2226: mol_type = other DNA; note = Synthetic coding sequence
atgggccccccgggcccagccctgccagccaccatgaacaattctagcagcgaaacacggggccacccacacagtgcctcctcccctagcgaacgggtttttccaatgccactcccccgtaaggcccctttaaatattcccgggaccccagttcttgaagacttcccgcagaatgatgatgaaaaggagagacttcagaggaggaggtcccgcgtctttgatctgcagttcagtaccgactctcctaggttgcttgccagccccagttcacgttctattgatatttcggccaccatacccaaatttaccaatacacagattactgagcactattccacttgtattaaacttagcacagaaaacaagatcacgacaaaaaatgcatttggtctgcacctgatcgacttcatgagtgaaattctgaaacagaaagacaccgagcctacaaatttcaaggtcgcagcaggcaccctggacgcatctaccaagatatatgccgttcgtgtagatgccgtgcacgccgacgtgtacagggtgttaggtggcctcggaaaagatgcaccctctctggaggaagttgagggtcacgtggcggacgggagtgccactgaaatgggcactactaaaaaagccgtgaaaccaaaaaagaaacacctccacaggactatagagcaaaacatcaacaatctgaacgtgtcagaagctgaccggaagtgtgagatagatcccatgtttcaaaaaacagccgcctctttcgacgagtgcagtacagccggcgtgtttctctcgactttacactgccaggactaccgatctgagctcctgttcccaagtgatgtgcagacccttagcacaggcgagcccttggaattacctgagctggggtgtgtagagatgaccgacctgaaggctccactgcagcagtgtgctgaggatcgccagatctgtccgtcactcgccggattccagtttacacaatgggattctgagacacataacgaatccgtctctgctcttgtggataagttcaaaaaaaacgatcaggtttttgacataaacgctgaagtcgacgagtctgattgcggggactttcccgacgggtctctcggagatgactttgacgcaaatgatgaacctgatcataccgccgtaggtgatcatgaagaatttagaagctggaaggagccctgccaggtgcagagctgtcaagaagagatgatctctttaggcgacggggacatccgcactatgtgtccgcttcttagcatgaaaccaggtgagtatagctatttctcgcctaggactatgtctatgtgggccggcccagaccattggcggttccggcccagacgcaaacaggacgctccctctcagtccgagaataagaaaaaatccacaaagaaggatttcgagatcgactttgaagatgatatcgactttgacgtgtatttccggaagacgaaggccgcaaccattttaacaaaatctactttagaaaaccagaactggcgtgcaactacactcccaacggactttaactataacgtggacacattggtgcagcttcacctgaaacctggaacccgactgttaaaaatggcgcagggtcatagagtggagacagagcactatgaagagatcgaagattatgattacaataatccgaacgatacatccaacttctgcccgggtctgcaagccgctgactctgacgacgaggacttggatgatctatttgtgggacctgtcggcaacagcgacttatctccttacccctgtcaccctcccaaaaccgcccaacagaacggggatacaccagaggcccagggcctggacatcactacttacggggagtccaatctggttgccgaaccacaaaaagttaacaagattgagatccattatgccaagaccgccaaaaaaatggacatgaaaaaactgaaacagagtatgtggagcctgctcacagctctatcgggcaaagaagcagacgccgaggctaaccatagagaagctgggaaagaggccgccctggccgaggtggccgacgagaaaatgctgtcaggactcaccaaagacctgcagcgctcccttcctccggtcatggcccagaatttatctatacccctagcgttcgcctgcttattgcacttggccaatgagaagaacttaaagctggaggggacggaggatctatcggacgtgctggttagacaaggtgactag

SEQ ID NO: 13810 - DNA, 510 bp, synthetic construct
  source 1..510: mol_type = other DNA; note = Synthetic coding sequence
atgaaagggagtagaatcgagctgggcgatgtaacccctcacaacatcaaacagttgaagcggcttaaccaagtgatcttccctgttagctataacgataaattctataaagacgtcctagaagtgggtgaactcgcgaagcttgcatacttcaacgatatcgccgtcggtgccgtgtgttgtcgagtggaccacagccagaaccagaagaggctgtatattatgactctcggttgcctggccccttaccggcgattaggcattggcacaaagatgctgaatcacgtgctcaacatttgcgagaaggacgggaccttcgacaacatttacctccacgtgcagatctcaaatgaaagcgccattgacttctaccgcaagtttggattcgagatcattgagaccaagaagaattactataagcgcattgagccagccgatgcacatgtgttgcagaagaatctcaaggtgccatccggacagaatgcggatgtgcagaaaaccgataattag

SEQ ID NO: 13811 - DNA, 1245 bp, synthetic construct
  source 1..1245: mol_type = other DNA; note = Synthetic coding sequence
atggcagcggcccccccttcctattgctttgtcgcttttccacccagagctaaggacggtctggtggtatttggcaaaaatagtgctagaccaagagatgaagtgcaggaggtggtgtattttagtgccgctgatcatgaacctgagtccaaggtggaatgtacttacattagtattgatcaagtccctaggacatacgccatcatgatatctcggcccgcctggctgtggggtgctgagatgggggctaatgagcacggggtgtgtattgcaaatgaagctatcaatacccgcgaaccggctgcagaaatcgaggctttgttgggtatggatctggtacggctgggcctcgagcgtggcgaaacagcaaaggaagccttggacgtcattgtcagcctgctggaagaacatgggcagggcgggaattacttcgaggatgctaattcatgtcacagtttccagtcagcttacctgatagtggaccgggacgaggcctgggtgttagagacgatcggcaaatactgggctgccgagaaggttaccgagggggtccgttgcatctgtagccaactaagtttaacaacgaaaatggacgcagaacaccccgaactccgctcttacgcccaatcccagggctggtggactggagaaggcgaattcaatttttccgaggtgttttcccctgtcgaagatcacttagattgtggggccgggaaggactcattggagaagcaggaagagagcattactgtgcagactatgatgaacactctgagagacaaagcttcgggtgtgtgtatagactccgaatttttcctgacaacagcctcaggcgtttctgtgttacctcagaaccgaagttctccttgcatccactacttcaccggaacccccgatccctctcgctccatctttaaacctttcatttttgtggatgacgtaaaactcgtacctaagactcaatctccgtgtttcggggatgatgaccccgcaaagaaagaaccacggtttcaggagaaaccagaccgtcggcatgagctgtataaagctcacgaatgggcccgagcaattatcgagtcagatcaagagcagggacgcaaattacggagcacgatgctggagctggagaagcagggcttggaggcgatggaggagattctgacttcaagcgagccgttggatcccgccgaagtgggtgacctgttttacgactgtgtggatactgagattaaattctttaagtag

SEQ ID NO: 13812 - DNA, 2031 bp, synthetic construct
  source 1..2031: mol_type = other DNA; note = Synthetic coding sequence
atgtctgatcagataaagttcattatggattctctgaacaaggagccctttaggaaaaattataatctaattacttttgatagtctcgaacctatgcaactcctccaggtcctctccgatgtgctggctgaaattgaccccaagcaactggtggacattagagaggagatgcccgaacagacagcaaagaggatgctcagtttgctcggtatcctaaaatataagccgagtggcaacgccaccgacatgagtacatttcgtcaaggcctggtgatcggtagcaaaccagtgatctatccggtgctacattggctgctacagcgaaccaatgaactcaagaaacgcgcctatctggcaagatttcttattaagctggaagtgccaagtgaattcctccaggatgaaacagtggccgatactaataagcagtatgaagagctgatggaagccttcaagacactccataaggagtacgaacagctgaaaatatctggattcagcactgctgagattcgcaaggacatatctgccatggaagaagagaaggaccagcttattaaaagggtggagcacttaaagaagcgagtggagacagctcagaaccatcagtggatgctaaagatcgcccggcagttacgggtggagaaagaaagggaagaatatctcgctcaacagaaacaggagcagaagaatcagttgttccacgccgtgcagcgccttcagcgggttcagaatcagttgaaatcaatgagacaggccgctgccgatgccaagcccgaaagcctaatgaaaagacttgaagaagaaatcaagtttaacttatatatggtgactgagaagtttcccaaggaactggaaaacaagaaaaaggaacttcattttctgcagaaagtggtctccgaaccagccatggggcactcagaccttctggagctcgagagtaaaatcaacgagatcaatactgagataaatcaactcatcgagaaaaagatgatgcggaacgagccaattgaaggcaaactgtctctctacagacagcaagcttccatcatctcgcgtaagaaagaggccaaagctgaagaactccaggaggccaaggagaagttagccagtctagagcgcgaggcgtctgtgaagcgtaaccagactcgcgagttcgacggcacggaagtcttgaaaggggacgagttcaagagatacgtgaacaagcttaggagcaaaagtacagtgtttaagaaaaaacatcagatcatcgctgaactgaaagccgagttcgggctcctccagcgcacggaagagctgttgaaacagaggcacgagaacattcaacagcagttgcaaacaatggaggagaaaaaaggcattagtggatattcctatacgcaggaagagttagaacgcgtaagcgctctcaagtcagaagtagatgaaatgaaggggagaacgctggatgacatgtcagaaatggtgaagaaactttattcccttgtgtcagaaaaaaagtccgcgctagccagtgtaattaaggaactacggcagctgaggcagaagtaccaggagctgacacaggagtgtgatgagaagaaaagccagtacgattcatgtgcagcggggctggaaagcaaccggagcaaactggagcaggaggtgagacgcttacgggaagaatgtcttcaggaagaaagtcgctaccactatacaaactgcatgattaaaaacttagaggtgcagctgagaagggctactgacgagatgaaagcttatatctccagcgaccaacaagagaagagaaaggccattagagaacagtatactaaaaacactgctgagcaagagaatcttggaaagaagctgagagaaaagcagaaggtaataagggaaagtcacgggcctaatatgaagcaggccaaaatgtggagggatctcgaacaattgatggagtgtaagaagcagtgttttcttaaacaacaatctcagacttccatcggccaggtaattcaggaaggcggggaggatcggctaattctttag

SEQ ID NO: 13813 - DNA, 948 bp, synthetic construct
  source 1..948: mol_type = other DNA; note = Synthetic coding sequence
atggcgttccctgagccaaagcctcggcctcctgaactgccccaaaagagactgaagaccctggactgtgggcaaggagcagtcagggcagttcggtttaatgtcgacggaaattactgcctgacatgcgggtctgacaagactctgaagctgtggaatcctttaagaggaacccttctgcggacctacagtggccatgggtatgaggtgctagatgctgcagggtcgttcgataacagctctctgtgcagtggtgggggcgacaaggcggtagtcctttgggacgtagcatctggacaggttgtgcggaagtttcgggggcacgcgggaaaggtgaataccgttcaattcaatgaggaagccaccgtaatcctctcgggtagcatagactccagtattcggtgctgggactgcagaagccggcgccctgaacccgtgcagaccctcgatgaggcgcgcgacggcgtctcctccgtgaaagtcagcgatcatgaaatacttgctggatcggtggatgggagagtgcgccgctacgacctgaggatgggacagctgttttctgattacgtcgggtctcccataacttgcacgtgcttcagtcgtgacggtcagtgcactctggtatcatccctagattctacgctgaggctcctggataaggatacaggagaactgcttggggagtataaggggcataagaatcaggaatacaaactggactgttgtctgtcagaaagagacacccacgtagtatcatgcagtgaggatgggaaggtcttcttctgggacctggttgaaggagccctggccctcgccttgcctgtgggctctggtgtagttcagtctcttgcctatcatcccaccgaaccgtgcctccttactgctatgggcggctccgtgcagtgctggcgcgaggaagcgtacgaggccgaggatggggctggctag

SEQ ID NO: 13814 - DNA, 1803 bp, synthetic construct
  source 1..1803: mol_type = other DNA; note = Synthetic coding sequence
atggttctgatcctgggccgaaggcttaaccgtgaggacttaggagtgagggatagccctgccaccaagagaaaggtattcgagatggaccctaagagtctgaccggtcacgagttttttgactttagctccgggagttctcatgcagaaaacatcctccagatttttaatgaatttcgtgactcacgcctgttcactgacgtgatcatttgcgttgagggcaaggaattcccctgccatcgcgccgtacttagcgcctgctcatcatatttccgtgcgatgttctgcaacgatcaccgcgagtctcgagagatgttggtagagattaatggtattcttgcagaggccatggagtgctttctgcagtatgtctataccggaaaagtgaaaatcacaaccgagaacgtccagtatcttttcgaaacctcatcccttttccagattagcgtgcttagagatgcctgcgccaagtttctcgaggaacaattagacccctgcaactgcctagggatacagcgtttcgccgacacacacagtttaaaaacgctgttcactaaatgcaaaaattttgctctgcagacattcgaggacgtcagccagcatgaggagtttctggagctcgataaggacgaattgatcgattacatttgttctgatgaactcgtaatcggaaaggaagagatggtcttcgaggccgtcatgcgctgggtgtacagggctgtcgatctcaggaggccgctgctccatgagttgctaacccacgttaggctgcctctcctccatcctaactactttgttcagaccgttgaagtggatcagctgattcagaacagtcctgaatgctatcaactgctgcacgaagcacgaagatatcatatcctgggtaacgagatgatgtcacctcgtaccaggccgaggaggagtactggatattctgaggtgatcgtggtggtgggcggctgtgaacgggtgggagggttcaatctcccttacaccgagtgctacgatcctgtgacgggcgaatggaaaagtctggccaagttaccagagttcaccaagagcgaatacgccgtatgtgccctccggaacgatatcctggtgagcgggggcagaatcaattcccgggatgtgtggatttacaactcgcaactgaacatttggattagagttgcgtctctgaacaaaggcaggtggcgccacaaaatggccgttctactagggaaggtgtacgtggttggaggatacgacggccagaacaggctgtccagcgtggagtgttatgactctttctccaatcggtggactgaagtagcccccctcaaagaggctgtatcttccccggccgtgacatcctgtgtgggaaaactgttcgtgatcggcggcggccccgacgacaatacctgtagcgataaagttcagagttatgatccagaaacaaacagctggctgctccgagctgccatcccgatcgccaagcggtgtattacagcagtgtccctgaataacttaatctatgtagccggcgggcttaccaaagccatctactgctacgatcctgtagaagactactggatgcatgtgcagaatacattctcccgccaagagaactgtggaatgtcagtatgcaacggcaaaatttacatcttaggagggagaagagaaaacggggaggctaccgatactatactgtgctacgaccccgctacctccattatcaccggagttgccgccatgcctcgccccgtttcctatcacggttgtgtaaccatacacaggtacaatgagaaatgttttaagctgtag

SEQ ID NO: 13815 - DNA, 810 bp, synthetic construct
  source 1..810: mol_type = other DNA; note = Synthetic coding sequence
atgaaccaggaagacctcgacccagacagtactacggacgtcggtgatgtgacaaacactgaggaggagttgatacgggaatgcgaagaaatgtggaaagatatggaggagtgccaaaacaaactgtctctgatcggtaccgagaccctcacagattccaatgcccagctgtcgcttctcatcatgcaggttaaatgcctgactgccgaattatcccagtggcagaaaaaaacacccgagactatccctctcaccgaagatgtcctgattacattagggaaggaggagtttcagaaactgcggcaggatctggaaatggtcctcagcacgaaggaatccaagaatgaaaagttgaaagaggacctggagagagaacaaaggtggttggacgaacagcagcaaatcatggagagcttgaatgtcctgcattctgagctgaaaaacaaggtcgaaacgtttagtgaatcacgaatcttcaatgagctgaagacaaagatgctgaacatcaaagagtataaagaaaaactgctctccacactgggagagttcctggaggatcacttccctctgccagacaggtctgtaaagaaaaagaagaaaaatatccaggaatcatcagtgaatcttatcacccttcatgagatgttggaaattctgattaaccggctctttgatgtgcctcacgacccatatgtgaaaatcagcgattccttctggcctccctacgtcgaactccttcttcgcaacgggattgcattgcggcaccccgaggacccaacaaggatccggctagaagcatttcaccaatag

SEQ ID NO: 13816 - DNA, 1041 bp, synthetic construct
  source 1..1041: mol_type = other DNA; note = Synthetic coding sequence
atgtgcgagggccctagccggatttctggcccgattcctccagacccaactctatgtccggacaactatagacgccccacatctgcgcaagggagacttgaaggaaacgctttaaaactggatcttctgacttccgatcgtgctcttgatactacagccccaagaggcccttgtataggaccaggcgctggcgagatcttggagaggggtcaaagaggcgtcggcgacgtgctgttacagctggagggaatctcgctaggaccaggcgcctccctgaagcgcaaagatccaaaagatcacgagaaggagaacctgcggaggattcgtgagattcagaagcggtttcgcgagcaggagcgctcccgggaacagggtcagccgcgacctttgaaagccttgtggcggtcgccaaagtacgataaagtggaatccagagttaaagcccaactacaagagcccggcccagcttcgggaacagagtccgcccacttcttgagagcacacagtcgctgcggcccgggcctgccgccgccccacgtcagttcaccacagccgaccccacccggccccgaagccaaagagcccggccttggggtcgattttatacgtcataacgccagggctgccaagagggctccgcgcagacactcctgctcactgcaggtgctggcccaggtgttagaacagcagaggcaggctcaggagcactacaacgccacccagaaaggccacgtgcctcactaccttcttgaacgtcgcgacctgtggaggagagaagcagaagcccgaaaacagagccaaccagatccagccatgccaccgggccacacccgaatgcctgagaatcagcgcctagaaacactaactaagctgctgcaaagccaatcccagttgctaagagaactggtgctcctgcctgcgggggcagatagtttgcgggctcagtctcatagagctgaactggaccgcaagctggtgcaggtggaggaggcgattaagatattcagtaggccaaaagtgtttgttaaaatggacgattag

SEQ ID NO: 13817 - DNA, 1824 bp, synthetic construct
  source 1..1824: mol_type = other DNA; note = Synthetic coding sequence
atggccgccaacgtgttcccctttcgcgacgctcgggccgcccccgacccagtcctggaggctggccccgtggcccacggtcccctgccagtgcccttggtgctggacaatggaagctttcaggttagggcgggctgggcttgcccaggacaggatcccggcccagagcccagacttcagttcagagccgtgtgcgcccgaggcagggggggtgcccggggtgccagcggaccacaggtcgggaacgccctgggatccctagagccgcttaggtggatgctgagatctcccttcgaccgaaatgttcctgtcaatttagaattgcaggagttgctgctagattactcattccagcatctgggggtctcaagccagggatgtgtggaccatccaatagtgctcacagaagccgtgtgtaaccctttgtactcacgccaaatgatgtcagaacttttgttcgaatgctatgggattccaaaggtcgcttatgggattgactcattgttctcgttctatcataataaacctaagaatagtatgtgttccggtttgataatttccagtggctaccagtgtactcacgttcttcccattctcgagggccgattagatgctaagaactgtaaacgaatcaatctgggcgggtcccaagcggccggatacctccagagattgctgcaactgaaatatccgggccacctcgccgcgatcaccctgtcccggatggaggagatactccacgagcactcatacattgccgaggattatgttgaagaactccataagtggaggtgtccagactactatgaaaataacgtgcataagatgcagctgccattctcatctaaactgctcggcagcaccctcacctccgaggaaaagcaggaacggagacagcagcagcttaggcggctgcaggagctgaatgcgagaagacgagaggagaagcttcaattggaccaggaacgcctcgatcggcttctttacgtgcaagaactgctggaggacggtcagatggatcagttccacaaagccttgattgaattgaatatggattctccagaggagctgcagagttacatccagaagctctcaattgcagtggagcaggcgaagcagaaaatcctccaggctgaagtgaacctggaagtcgatgtggtggactctaagccagagacccccgatctggaacaactcgaacccagtctggaggacgtggagtctatgaacgatttcgatcccctgttcagcgaggaaacccccggcgtagagaaacccgttaccacagtgcaaccagtgttcaaccttgctgcctaccatcaactgtttgtaggcaccgaaagaatccgcgcgccagagatcatctttcagccaagtctcattggcgaagaacaggctggcattgctgagaccctccagtacatcttagataggtatcccaaggacattcaggagatgcttgtccagaacgtgtttctgactggaggaaatacaatgtacccaggaatgaaggcccggatggagaaggagctgctggagatgcgaccatttaggagctccttccaagtgcagctggctagtaaccctgtgctggacgcttggtacggtgctcgagactgggcgctcaatcacctggatgataacgaagtgtggattactcgaaaggagtacgaggagaaagggggcgagtacttgaaggaacactgcgcctcaaacatatatgtacctataaggctgcctaagcaggcctcccgatcatctgatgcacaggcctcatctaagggaagtgctgctggaggggggggagcaggcgagcaagcatag

SEQ ID NO: 13818 - DNA, 1383 bp, synthetic construct
  source 1..1383: mol_type = other DNA; note = Synthetic coding sequence
atggcttcaagagaagaagtgcttgctctgcaggccgaagtggcccagagggaggaggagctgaattcccttaagcaaaagctggcctctgcattgctggctgagcaagagccacaacccgaacgcttagtacccgtgagtcccttgccgccgaaagccgccctctctagggatgagattctgagatactctagacagctggtgctgcccgaactgggagtgcacggccaactgcgcctgggtacggcgtgtgttttaatagtgggctgtgggggcctgggctgtccactcgctcagtacctcgccgctgccggtgtcggacgactcggcctggtcgattacgacgtggttgagatgtctaacttggcacgccaggtcctgcatggggaggctctggctggacaggccaaggcctttagcgccgccgcatccctcagaagacttaacagcgccgtggagtgtgttccatacacacaggccctcactcccgcaacagcgttggacctggtccgaaggtacgatgttgtcgccgactgtagtgataatgtgccaacacggtacctggtaaacgatgcctgtgttctggctggcagaccattagtctcagcctctgcacttcgctttgagggacagatcaccgtgtaccattatgatgggggaccgtgttaccgctgcatcttccctcaaccaccgcccgcggaaacggtgaccaattgtgctgatggcggagtgctcggcgtggtaacaggtgttttgggctgtctgcaggctcttgaagtgctaaaaatcgctgcgggtctaggtccctcatatagcgggagtctattgctattcgatgctctgcgaggacattttagatcaattcgactgcggagtaggcggctggattgtgccgcatgcggtgagcgccctacggtgacagaccttctcgactatgaggcgttttgcggatcaagtgctactgacaagtgtaggtccctgcagcttctgtcacccgaggagcgggtgagtgtgactgattacaagcggttgctagattcgggagcctttcacctgttgcttgatgtgaggccccaggtggaggtggatatctgcagactgccccatgctctccatattccgttgaagcatttggaacgccgagatgctgaatcactgaagctattgaaagaagccatttgggaagaaaaacaagggactcaggagggtgctgcagttccaatctacgtgatctgtaaactgggcaatgactcgcaaaaagccgtgaagatcctccagtcactaagtgctgcgcaggaactggatcctctgaccgtaagagatgttgttggggggttaatggcatgggcggccaaaatcgatggcacatttccccagtactag

SEQ ID NO: 13819 - DNA, 1041 bp, synthetic construct
  source 1..1041: mol_type = other DNA; note = Synthetic coding sequence
atggaaagcgtctcttgctccgctgcagcggtccgcacaggtgatatggaaagtcagcgcgacctgtctcttgtcccagagagattacaaaggagagagcaagaacgtcaattggaggtcgagcgcagaaaacagaagagacagaatcaggaagtggaaaaagagaattcccattttttcgtagctactttcgtcagagaacgcgcggctgtcgaggagctccttgagagggccgaatcggtggaaaggctggaagaggccgcaagccggttacaaggcttgcagaagctcatcaacgattcagtgttcttcctggccgcctacgatctacggcaaggacaggaggctctggcgcgcctccaggccgccctggctgagcggcggcggggactgcagccaaagaagaggtttgcatttaaaactcgaggaaaagatgcggcctctagcacaaaggtggacgctgctcctggtattccacctgcggtggaatcaatccaagacagccctctccctaagaaggccgagggcgatcttggacccagctgggtgtgcggcttttccaacctagaaagtcaggtcttggagaaacgggcctcagagttgcatcagcgcgatgtgcttctaaccgagctaagcaactgcaccgttagattgtacggtaacccaaatacactccggttgactaaggcccattcctgtaaactgctgtgcggaccggtctcgacatccgtttttcttgaggactgctctgattgcgttttggctgtggcgtgccagcagctccgaatccactcaacaaaggacacaaggatttttctgcaggtcacttctcgggctatcgtggaggactgcagcggaattcagtttgctccctatacctggtcctacccagagatcgacaaggacttcgaatctagtggattggatcgcagcaaaaacaactggaatgacgtcgatgacttcaattggctggcccgagatatggcctcccccaattggagtattcttcccgaagaagagcggaatattcagtgggattag

SEQ ID NO: 13820 - DNA, 747 bp, synthetic construct
  source 1..747: mol_type = other DNA; note = Synthetic coding sequence
atgaccccgaagggccccgcaatgtgctcgatgccactaacgtctgccgattgcttctctaacgacatccacaagctggacacgtccactatgacctggactcttatttgcacaaagggaagtcccgcacgctggagggactttcactccgccactatgctgggcagccatatgtacgtttttgggggacgtgctgacaggttcggcccatttcattccaataatgagatctactgcaataggatccgggtgtttgatacaaggacagaggcatggctcgactgtcctcccacacccgtcctgcctgaagggcgccgatcacactccgccttcggatataacggcgagctgtatatcttcggcggttacaatgcacggctcaatagacatttccacgacttgtggaaattcaatccagtcagcttcacttggaaaaaaatcgaaccaaagggaaaagggccctgcccgcggcgcaggcagtgctgctgtatagtcggggacaagatcgtcctgttcggcggcacctcaccaagccccgaggaaggcctgggagatgagtttgacctcatagatcactcagacttgcacatcttggacttctctccatctttgaaaactctgtgtaaactggctgtcattcagtacaacctggaccagtcctgcctgcctcacgatataagatgggagctcaatgccatgaccaccaacagcaacattagcagaccgatcgtgtcttctcatggctag

SEQ ID NO: 13821 - DNA, 1401 bp, synthetic construct
  source 1..1401: mol_type = other DNA; note = Synthetic coding sequence
atggagtacgagtcttattattttgtgaaattccagaagtatccgaaaattgtgaagaaaagttctgacacagccgagaacaacctgccacaaagaagtcggggaaagacacggaggatgatgaacgatagttgccagaatctgcctaagattaaccaacaacggcctcggtctaagactactgccggtaagactggagatacaaaaagcctgaacaaggagcatccaaaccaggaggtggtagacaacactcgattggagtccgctaactttgggctccatatttctcgcatccggaaggactcaggcgaggagaatgcccacccacggcgtgggcagattatcgactttcagggcctgttgacagacgccataaaaggagccacgtccgaactagcgttgaacacctttgatcataatccagacccgtcagaaaggcttcttaagcctctgtccgcctttatagggatgaattctgagatgagggaactcgctgcagttgtgtctcgtgatatttatttgcacaatccaaacatcaaatggaatgacatcattgggttggacgccgccaaacagctcgtcaaggaagccgtggtataccctataagatacccccagctgttcacaggcatcctctcaccctggaaagggttgctgttgtatggaccacccggcacaggaaagacgctgctggctaaggcagtcgctactgagtgcaagaccaccttttttaacatttcagcctcaaccatcgtatctaaatggcgcggcgatagcgaaaagcttgtccgcgttctttttgagctggcacgttaccatgcaccatccactatcttcctggacgaactggagagcgtgatgagccagagaggtaccgcttctggcggagaacacgaaggaagtttgcggatgaaaactgagttattagtgcagatggatggattggcccgttcagaagatctcgtattcgttctggccgcaagcaatctgccttgggagcttgattgcgccatgctacgacgtctggagaagcggatactagtcgacttacctagtcgcgaggcaaggcaggccatgatataccactggctgcctccagtcagtaaaagtagagccctggaactgcacactgaacttgagtactcagtgctttcacaagaaaccgagggatactccggaagcgatattaagttggtctgccgtgaggcagccatgaggccagtgaggaagatctttgatgccctcgagaaccaccagtccgagtcttccgaccttccaagaatacagctggatatcgtaaccacagccgactttcttgacgtcttgacacacaccaaacctagtgctaagaatctagctcagagatactctgattggcagagggaattcgaaagcgtgtag

SEQ ID NO: 13822 - DNA, 6402 bp, synthetic construct
  source 1..6402: mol_type = other DNA; note = Synthetic coding sequence
atggacgaggtcgaacaggatcaacatgaagcccgtctcaaagagttatttgattccttcgatactaccggcacaggctctctcggccaggaagagttaaccgatttatgccacatgctcagccttgaggaagtcgcacctgttctgcagcagaccctgctacaagataacctccttggcagggtgcattttgatcaatttaaggaggcattgattctcatcctgtcacgcaccttgtctaatgaggagcatttccaagagcccgattgttccctcgaagcccagccaaaatacgtgcgaggcggcaagcggtacggcaggcggtccctgcctgagttccaggagtccgtcgaggaatttccagaagtgactgtgatcgagccacttgacgaagaggctaggccaagtcacatcccggccggagattgctcagagcactggaagacacagcggtctgaagagtatgaagcggagggacagttacgcttttggaacccggatgacctgaatgcaagccagagtgggagctcgcccccacaggactggatcgaggagaaactgcaggaggtgtgcgaggatttgggaattactagagacggtcacctcaaccgcaaaaagttagtctccatttgcgagcagtacggactccagaacgttgatggcgagatgctagaagaggtgtttcacaacctggacccagacggcactatgtctgttgaggatttcttctacggtttgttcaagaatggaaagtccctgacaccgagcgcatctaccccctataggcagctcaaacggcacctctccatgcaaagttttgacgagagtggaagacggaccactacgtcatccgcaatgaccagtaccataggcttcagagtgttctcatgtctcgatgacggaatgggtcacgcctcagtggagagaatccttgatacgtggcaagaagaaggcattgagaattcccaggagatcctcaaggccctagacttcagtctcgacggtaacataaacctgacagagttaaccttggccctggaaaatgagctgctggtgacgaaaaactccatacatcaggccgcgctggcctcatttaaggccgagatcagacatctcctggagagagtggaccaggtcgtcagagaaaaagagaagttgagatctgacctggataaagccgaaaaacttaagtctctaatggccagcgaagtagatgaccaccatgctgcaatcgagcggagaaacgagtataatttgagaaagctcgatgaggagtacaaggaacggattgcggccttgaagaacgagctacgcaaggagagagaacagatcctgcaacaagcaggcaagcagaggctagagctggagcaggaaatcgagaaggcaaagacagaagagaattacattagagacagactcgctttatcactgaaagagaacagtaggttggaaaacgagctgctcgagaacgcagagaagcttgcagaatacgagaatttgaccaacaagctccagaggaatctagaaaatgttctagcagagaagttcggagatctggatcccagctcggccgaattttttctgcaggaagaacgtctgactcagatgaggaacgaatacgaaagacagtgccgcgtccttcaggatcaagtcgatgagctgcagagcgagcttgaagagtatagggctcaggggcgcgtattgcggctgccactcaagaactccccgagcgaagaagtagaggctaacagtggcgggatcgagcccgaacatggcctgggatccgaggaatgcaaccctctgaacatgtctatcgaagcggagctcgtgattgagcagatgaaggaacagcatcatcgcgacatttgttgtctacgactggagcttgaggacaaggttaggcactacgaaaagcagttggatgagaccgttgtgagctgcaaaaaggcacaagagaacatgaaacagagacacgaaaatgaaacccatactttagagaagcagatctccgacctgaaaaacgaaattgccgaactgcaggggcaggctgctgttctcaaggaagcacatcacgaagccacttgccgacatgaggaggagaagaaacagctgcaggtgaagctcgaagaagaaaagacacacttgcaggagaaactgaggcttcagcacgagatggagctcaaagccaggcttactcaggcacaggcctcatttgaaagagaaagggagggattgcagtcgagtgcctggacggaagagaaagtgcggggtcttacccaagaactggaacagtttcatcaagaacaattaacttcactggttgagaaacataccttagagaaggaagaactgcggaaagagctgctggaaaagcaccagcgggaactgcaagagggcagagagaagatggaaacagaatgcaaccgacgcacaagtcagatcgaggctcaattccagtccgactgtcagaaggtcaccgaaaggtgtgagagcgccctccagagcttggaaggccgatatcgtcaggaactgaaagacttgcaggagcagcagcgcgaagagaaaagccagtgggaattcgagaaggatgagctaactcaggaatgtgctgaagcacaggagctgctcaaggagacactgaaacgagagaaaacaacctccttagtcctgacacaggagagagagatgttagaaaagacatataaggaacacttgaatagcatggtggtggaacggcagcagttactgcaggacctggaggatttgcgaaatgtcagcgagacccaacaatcgctcctgtccgatcagatcctggaactcaaatcttcacacaaacgcgaattaagagagagagaggaagtcctttgccaggcgggcgcctcagagcagctagctagccaacgcctagagcggttggaaatggagcatgaccaagagcgccaggagatgatgtctaaattgctcgctatggagaacatccataaagccacatgcgagactgccgatagagaacgggctgagatgtcaactgagatctctcgcttgcagtccaagattaaggagatgcagcaggcaacctctcctctttctatgctgcaaagcggctgtcaggtgattggagaagaggaggtcgagggcgacggggccctcagcctgcttcagcaaggggagcaacttcttgaggagaatggagacgtgctgttaagtcttcaaagagcgcatgagcaggcagttaaggagaatgtgaagatggctactgagatttctaggctccagcagagactacagaaattagaacctggactagtgatgtcatcttgcctagatgagccagccacagagttttttgggaacaccgccgagcagacggaacagttcttgcagcagaatcgtaccaagcaggtcgagggcgtcacccgaaggcacgtgttatcggacctggaagatgatgaagtgagggacctgggctccactgggacctcgagcgtgcagaggcaagaggtcaagattgaggagtccgaggcctctgtagaaggattctccgagttggagaacagtgaggaaacacgtaccgaaagctgggagttgaaaaatcagatctcacagctgcaggagcaactcatgatgctgtgcgccgactgcgatagagcttctgagaagaagcaggacttacttttcgacgtgagtgttctcaagaaaaaattgaaaatgctagagcgcatccccgaagcctcccctaaatataaactgctctatgaggatgtatccagggaaaatgactgcctccaggaggagctaagaatgatggaaacccggtatgacgaagcactggaaaacaacaaagagttgaccgctgaagtatttcgactgcaggatgagctgaagaaaatggaagaagtgacagagactttcctgtctctggaaaagtcctacgatgaggttaagatcgagaacgaaggactgaacgtgttagtgcttcgcctgcaaggaaagattgaaaaactgcaggaatctgtggtgcagcggtgcgattgctgtctgtgggaagcttctctggaaaatttggagattgaaccagatggtaatatcctgcagttgaaccagaccctggaagagtgtgtacctcgggtgcggagcgtgcatcatgtaatcgaggagtgcaaacaggaaaaccagtacttggagggtaatactcagctgctggagaaggttaaagcccacgagatcgcgtggcttcacggaacaatccagacgcaccaagagcgtccgcgtgtgcagaatcaggtgatactagaggaaaacaccactctcttggggtttcaagacaaacacttccagcaccaggcaacgatcgcggagctggagcttgagaagaccaagctgcaggagctgacaagaaagctcaaagagagggttaccatacttgttaaacagaaggacgtcctttcacacggagagaaggaggaggagctgaaggccatgatgcacgatctgcaaattacctgctcagagatgcagcagaaggtcgagctgctgcggtacgagagcgagaaactacagcaggagaactcaatcttgaggaacgagataaccaccttgaacgaggaagactctatctcgaatctgaaactgggcactctaaatggatcacaggaagaaatgtggcagaagacggaaacagtgaaacaggagaacgctgccgtccagaagatggtggagaatctaaagaagcagattagcgaattaaagatcaagaaccagcaactcgacctggaaaataccgaattgagtcagaaaaattctcaaaatcaagagaaactgcaggagttgaaccagcgcctgaccgagatgctgtgccaaaaggagaaagagccagggaattccgctctcgaggagagggagcaggaaaagtttaatttgaaggaagaactcgaaagatgtaaggtgcagagttccaccctggtttcttcccttgaggccgagttgagcgaggtcaagatccagacccacatcgtccagcaggagaatcatctcctcaaggatgagctcgagaagatgaagcagctccaccggtgtcctgacctatcggattttcagcaaaaaatctccagtgtcctgagctataacgagaagctactgaaggagaaggaggcgttgtctgaggaactgaattcttgtgtggataaacttgctaaatcctcccttctcgagcataggatcgcgactatgaaacaggagcaaaagagctgggagcatcagagcgctagtctgaaatcccagcttgtggcgagccaggagaaagtacagaacctagaggacacagtgcagaatgtcaacttacagatgtcccgtatgaaaagcgaccttcgggtcacccagcaagaaaaagaggccctcaagcaggaggtgatgtcactgcataaacaattgcaaaacgcaggtgggaaaagctgggcaccagaaattgccacccatcccagcggcctgcacaatcaacagaagcgcctgtcttgggataagctcgaccacctgatgaacgaagaacaacagctgctgtggcaggaaaacgagcgccttcaaactatggtacaaaatactaaagcagaactgacacatagccgcgagaaggtgaggcagctggaaagtaacctgctgcccaagcaccagaaacaccttaatccaagcggaacaatgaatcctacggagcaagagaagttgtctttgaagcgggaatgtgaccagttccagaaagagcaatctccagcaaacaggaaggtgtcacaaatgaattcactcgagcaggagctcgaaactatccatctggaaaacgaggggcttaagaaaaaacaggtcaagcttgatgagcaattgatggagatgcagcatctgcgatccactgccacacccagcccgtctccccatgcctgggatctccaacttttgcaacaacaagcctgccctatggtgcctagggagcagttcctgcagctccagcggcaacttttacaggcggagcggatcaaccagcatttacaggaggaactcgaaaatcgtacatcggagacaaacaccccgcagggaaatcaagaacagttggtgacagtgatggaagagagaatgatcgaggtcgaacaaaagttgaagctggtgaagagactgcttcaagagaaagtgaaccagctgaaggagcaactatgtaaaaataccaaggccgatgctatggtgaaagatctttacgtcgaaaacgcccaactcctgaaagctcttgaggttactgagcagcggcagaagactgccgagaagaaaaactacttactggaggagaaaatcgcttcactgtccaatattgtacgtaatcttacacccgcccccctaacctccactcccccgttgcgctcatag

SEQ ID NO: 13823 - DNA, 1713 bp, synthetic construct
  source 1..1713: mol_type = other DNA; note = Synthetic coding sequence
atggctggcggggctcgggaagtgctgacactgcagcttggacacttcgcgggtttcgttggcgcccattggtggaaccaacaggatgcggcccttggtcgcgcaactgattccaaggagcccccgggggaactttgccctgatgtcttgtatagaactggccggacccttcacgggcaagaaacctatacgccacgtttgattctcatggacttgaaggggtcgctgtccagcctgaaggaggagggcggtctgtatcgggataagcaactggacgcggccattgcttggcaaggaaagctcacaacacacaaggaagaactgtacccaaagaacccgtatctgcaggactttcttagtgccgagggcgtgctcagtagtgacggcgtgtggagggtgaagtcaatcccaaacggcaagggaagttcgccacttcctacggcaacaacacctaaaccgttgattcccacagaggcctccatcagggtctggtccgacttcttgcgcgtgcatctgcatcctaggagtatctgcatgattcaaaagtataatcacgacggcgaggcagggcgtctggaggcttttggtcagggagaatcagttttaaaggaacctaaataccaagaagagctggaggatcgacttcatttttatgtggaagaatgcgattatctccaaggattccagattctgtgcgacctccatgatggctttagcggcgtaggagccaaggcagccgagcttctccaggacgaatatagtggaaggggcatcatcacctggggactcttgccaggaccctatcaccgcggcgaggcgcagaggaatatatatcgcctgctcaatactgctttcgggctcgtgcaccttactgcccactcatccctggtgtgcccacttagcctaggaggaagcctgggcctgaggcctgagccccccgtgagctttccgtacctgcattacgacgcaacactcccatttcattgttcagccattctggctacagccctcgacacagtcaccgtcccctacagattgtgcagtagtccagttagcatggtgcatctggccgacatgctatctttctgcggaaaaaaggtcgttactgctggcgccattattccctttcctttggcaccgggccagtccctgccagattctctgatgcagttcggaggtgcaacgccctggacacccctcagcgcttgcggagagccttctggcacacggtgcttcgctcaatccgtcgtgctgcggggaatcgaccgtgcctgtcatacgtctcaactcaccccgggtaccccccctccaagcgctctccatgcctgtaccactggggaagagatcctggcacaatatctgcagcaacagcaacctggagtgatgtcatcgtcccatcttctgctcacaccgtgtagagtcgcacccccatatcctcatctgttctcgagctgtagccctcccggaatggttctggatgggagccccaagggcgctgccgtagagagcatacccgtgttcggagccctgtgcagctcatctagcctgcaccagactctggaggctttggctagagacctaactaaactggacctgcggagatgggcttcttttatggacgccggagttgagcacgacgacgtggcggagctgctccaggagctgcaaagcctggctcagtgctaccagggaggcgacagcctagtcgattag

SEQ ID NO: 13824 - DNA, 1791 bp, synthetic construct
  source 1..1791: mol_type = other DNA; note = Synthetic coding sequence
atgaataggacatggccccgcaggatctgggggagtagccaagatgaggctgaactgatccgggaggatattcagggagctctacacaactaccgctctggccgaggggaaagacgggctgctgctctgagagcaacccaggaggagctgcagagagaccgcagccccgcggcagaaacgccccctctgcagaggagacccagtgtgcgggccgtgatttccactgttgagcgcggagcggggcgcggccggccgcaggccaagccaatcccagaggccgaggaggcgcagcgaccggagccagtcggtacttcctctaatgcagacagtgccagccccgatctgggtccacgcggacccgacctggccgtgctgcaagccgagcgcgaggtggacatcctgaaccatgtcttcgacgacgtggagagctttgtgtccaggctgcagaaatctgcagaagcagcccgcgtcctagaacatcgcgagcgcgggaggaggagtcggcgcagagccgccggtgaaggcttgctcacactgcgcgcaaagccaccatccgaggcagagtataccgacgtgctgcagaaaatcaagtacgccttcagtctgttagcccgtctgcgcggcaatatagcagatcctagtagtcctgaattgctgcatttcctctttggaccactgcagatgatcgtcaatacttcagggggacccgaattcgctagttcagtgcggcgccctcacttaacctccgatgctgtggccctgctcagggataacgtgactcccagggaaaacgagctatggacctcgttgggcgatagctggacgcggcctgggctggaattgagccccgaagaggggcccccttacaggcctgagttctttagtgggtgggaaccaccagtcactgacccgcaatcgcgggcttgggaagacccagtggaaaaacagctccagcatgaacggcgcagacggcaacagtcggccccccaggtggccgtgaacggacaccgggacttggagccagagtccgagccccagctggaaagtgagaccgcaggcaaatgggtcctgtgtaattatgattttcaggctcgcaacagctctgagctcagcgttaaacagcgtgacgttctagaggttctggatgatagccgcaagtggtggaaggttcgcgatccggcaggccaggagggctatgtgccctacaatattctaacgccctatccaggtccacgactgcaccactcgcagtctcctgcgcgctcacttaactcaacccccccccccccccccgcacccgcccccgcgccccctccggcccttgcacggccccgctgggacaggcctcgatgggattcctgcgactctttaaacgggctggatccttctgaaaaagaaaagttcagccagatgctcatcgttaatgaggaactacaagcgaggctggcacagggaagatcaggtccaagtagggccgtgccaggtcccagggctccagagcctcagctgtccccgggtagcgatgcctctgaggtgcgagcttggctgcaggccaagggcttttcctcgggaacagtggatgcactcggagtcctcacaggcgctcagctgttctctctgcagaaggaagaattaagagctgtctcacccgaggagggtgcgcgcgtatattcccaggtgacagtgcagcggtcactattggaagacaaggaaaaggtgtccgaactggaagccgtaatggagaagcagaagaagaaggtagagggggaagtggagatggaggtcatctag

SEQ ID NO: 13825 - DNA, 1950 bp, synthetic construct
  source 1..1950: mol_type = other DNA; note = Synthetic coding sequence
atgtcttcattcggagccggcaaaaccaaggaagttatcttctctgttgaagatggaagtgtgaaaatgttcctgaggggccgcccagttccaatgatgatccctgacgagctcgcacccacttactcactggacacaagatctgaactgccatcttgtcgccttaaattggagtgggtctatgggtaccgtgggcgagattgccgcgccaacctgtacctgctgcccaccggtgaaattgtgtactttgtcgcttccgttgccgtgttgtactcagtggaggagcagcgccaacggcattatctgggccacaatgacgacattaaatgtttggccatccatccagacatggtgaccatcgccaccggccaggtggccggaacaactaaggaaggtaagcccctccctccgcatgtgcgcatctgggactctgtctctttatccacccttcatgtgctgggcctcggcgtgtttgacagagccgtgtgctgcgttggtttcagtaagagtaatgggggcaacctcctctgcgcagtggatgaatccaacgaccacatgctcagcgtgtgggattgggcaaaggagactaaagtcgtggacgtgaaatgctctaacgaggccgtgttagtcgccacttttcatccaaccgatccgaccgtgctgatcacatgcggaaagagccatatctatttttggacactggaggggggttcgttgagcaagaggcaaggactcttcgaaaagcacgagaaaccaaagtacgtcctgtgtgtcacctttctggaggggggtgacgtcgtgacaggggacagcggcggtaacctatatgtgtgggggaaggggggtaacaggatcactcaggccgtcctgggcgcacatgacggaggtgttttcggtttatgcgctctgagagacggcacacttgttagcggcggcgggcgcgacaggcgtgtggtgctctgggggtccgattactcaaaactgcaagaggttgaagtgcccgaggacttcgggcctgtaaggaccgtggccgaggggcatggagacacactgtatgtggggacaaccagaaactcaattttgcagggatctgtgcacactgggttctcccttctggttcaaggtcacgtagaggagttgtgggggcttgccacacacccaagtagagcgcagtttgtgacatgcgggcaggataagctggtgcacctgtggagtagtgactcccaccaaccactatggtctcgcattatcgaagaccctgcccgttctgcaggctttcaccctagcggttcggtgttggctgtgggcacggtgacgggcagatggttgctgcttgatacggagacccatgacctagtcgcgatccacacagatggaaatgagcagatctcggtcgtgtctttttcgcctgacggggcttacctcgccgtcggaagtcatgacaatctagtctacgtctacacagtcgatcaaggcgggaggaaagtgagcaggctggggaaatgctcaggccattcctccttcattacacacttggattgggcacaggacagctcgtgtttcgtgaccaacagtggggactatgagatcctttattgggaccccgctacttgcaaacagatcactagtgccgacgcagtaaggaatatggaatgggccaccgccacatgcgtactcggatttggggtgttcgggatatggtcagaaggcgccgatggaaccgacattaatgctgtggcccgtagtcacgatgggaagttattagctagcgctgacgactttggcaaggtacacttgttttcttatccatgctgtcaaccacgcgcactgtcgcataagtacggagggcattccagccacgtaacgaacgtcgccttcctgtgggatgattctatggcgttgacaacaggcggtaaagatacctccgtccttcagtggagggtggtctag

SEQ ID NO: 13826 - DNA, 792 bp, synthetic construct
  source 1..792: mol_type = other DNA; note = Synthetic coding sequence
atggcaggactggaggtgctgtttgcctctgccgcccccgcgatcacatgtagacaggacgccctggtttgttttcttcactgggaagtggtgacccatgggtactttggactcggggtgggtgaccaacctgggcccaacgacaaaaagtcagaactgttgcccgctgggtggaataataataaggatctgtatgtgctgaggtatgagtataaggatggctctcgtaagctcctcgtgaaggcaattactgtcgagtctagcatgatcttgaacgtcctggaatacggcagtcaacaggtggctgacctaaccctcaacctagatgactacatcgatgccgagcatctgggggacttccatcgcacctataaaaattctgaggagctgcgatcacggatagtcagtggcattataacaccaatccacgaacagtgggagaaagctaatgtttcttcgccacacagagaatttccccccgcaacagcacgggaagttgatcctctgcggattccccctcaccacccgcacacatcccgtcagcctccgtggtgcgatcctttggggcctttcgtcgtgggaggggaggaccttgaccctttcggcccaagacgcgggggaatgattgtcgatccactccgttccggctttccccgtgctctcattgatccctcgtctgggctgcctaatcgactacctcctggagcagtgccacctggggcccgatttgaccccttcggacccattggaacttcgccacccgggccacggcccgaccgtcgcggtcaatag

SEQ ID NO: 13827 - DNA, 273 bp, synthetic construct
  source 1..273: mol_type = other DNA; note = Synthetic coding sequence
atggacaacatgagcccccgacttcgtgcctttctgtctgagccaatcggcgagaaggatgtgtgttgggtcgacgggatttctcatgaactcgctataaacctggtgaccaagggtattaacaaggcctacatactcctggggcagttcctcctcatgcacaagaatgaggcagaatttcagaggtggctgatctgctgtttcggcgcgactgagtgtgaggctcagcagacctcgcactgcttaaaggagtggtgcgcatgcttcctgtag

SEQ ID NO: 13828 - DNA, 888 bp, synthetic construct
  source 1..888: mol_type = other DNA; note = Synthetic coding sequence
atgccggtgcacacattgtctcccggggccccttctgcacctgcactgccttgccgtctgagaactcgggtgcccgggtacctccttcgcggccccgctgacggcggcgctagaaagcccagtgcagtggaaaggctcgaagctgataaggcgaagtacgtgaaaagcctacacgtggccaatacaagacaagaacctgttcaaccattgttgtccaaacagccacttttttcccccgaaactcgtagaaccgttctgacgccctcaagaagggctttaccaggcccctgtcgaagaccacagctcgatttagacatcctgagctcactaatcgacctatgtgattcccccgtgtcgccggcggaggcaagcaggacccccggaagagcggaaggagccggacgccctccacccgccaccccccctagaccaccgccatccaccagcgcagtgagaagagtggacgtccgcccattgcccgcctctcccgccaggccatgcccttcgcccgggcccgccgcagcctcaagtccagcaagacccccagggctgcaaagatctaagagcgacctgagtgagagattctcaagggctgcagccgatcttgagaggttttttaacttctgtgggttggatcccgaagaggctagggggcttggcgtggcccacctagccagggcaagttcagatatcgtgtctctggctggtccatcagcaggacctggatcctccgagggcggttgctcaagacggagctccgtaacggtcgaagaacgggcccgcgagagggtgccgtacggagtcagtgtggtggagcgcaatgccagggtgatcaagtggttatacggactgagacaggcgcgcgagtcgcctgccgctgaaggatag

SEQ ID NO: 13829 - DNA, 582 bp, synthetic construct
  source 1..582: mol_type = other DNA; note = Synthetic coding sequence
atgccaactacaagcaggcctgccctcgacgttaaaggcgggacttctcctgcaaaggaagatgccaatcaagagatgtctagcgtggcctactccaacctggccgtcaaagaccgcaaggccgttgcgatcttacattaccccggagtggcctcaaacggcacaaaggcttctggtgcccctaccagttcctccggctcaccaatcgggtcccctacgaccactccacctacaaaaccacctagctttaacttacaccctgcaccgcacttattggctagtatgcaccttcagaagctaaatagtcagtaccaggggatggccgccgccacccccgggcagccaggggaagctggacctctgcagaactgggactttggggcacaagcgggaggagcagagtcattgtcccccagcgcaggagcccagtctccagcaattatcgactccgatccagtagatgaagaagtgctcatgtccctggtcgtggagcttgggctcgaccgcgccaatgaattgcccgaattgtggctcggacagaatgagttcgacttcactgccgattttccgtcctcttgttag

SEQ ID NO: 13830 - DNA, 1077 bp, synthetic construct
  source 1..1077: mol_type = other DNA; note = Synthetic coding sequence
atggcagctgtcctgaagcccgtcctgctcggcctgagagacgcccctgtccatggatcacccactggcccaggggcttggactgcctcaaaactgggtggcatcccagatgcacttccaaccgtggcagcccctagacctgtctgtcaaaggtgtggtcagcccttggccctggtcgtgcaggtatactgtcccctcgaaggctcccctttccaccgactgcttcatgtcttcgcttgcgcttgcccaggctgtagcactggtggagcccgctcctggaaggttttccggagccagtgtctccaggtacctgagcgggaggcccaggatgctcaaaaacagggcaattccctggcagctgaggattggtgtgagggggcagatgattggggatcagatactgaagaaggaccatcccctcagttcacactggacttcggtaacgatgcctcctcggcaaaggacgtcgactggacagcaagattgcaagacttacgcttgcaggacgctgtgctgggcgctgcacatccggtgccccctggactcccactgttccttccatattacatctgcgtggctgatgaggatgactatcgtgacttcgttaatctggaccatgcccattccctgctccgtgattaccagcagagagagggaatagctatggaccagctgttatcacagagcctgcctaatgatggtgatgaaaagtacgaaaagacaattatcaagagcggtgaccagaccttttacaaattcatgaagcggatcgccgcctgccaagagcagatcctgaggtacagctggtcaggggaaccgttgtttttgacgtgtcccaccagcgaagtgacagagctgccagcctgttcacaatgtggcggacagaggattttcgaatttcagttaatgcccgctcttgtgtccatgcttaagtcagccaatttagggctgtctgttgagttcgggaccatcctggtatacacatgtgaaaaatcttgttggccccccaatcaccagactccaatggaagagttttgcattatccaggaggaccctgatgaactgctcttcaaatag

SEQ ID NO: 13831 - DNA, 1779 bp, synthetic construct
  source 1..1779: mol_type = other DNA; note = Synthetic coding sequence
atggcgagcgttgtcgtgaagacaatctggcagtccaaagaaatccacgaggcaggggacactccaaccggggtggaatcatgttctcaactggtgcctgaggccccgagaagagtcacatccagagccaaaggcatccccaaaaaaaagaaggcagtctcctttcatggcgttgaaccacaaatgtctcatcaaccaatgcactggtgtttgaacctgaagaggagctctgcttgcactaacgtgagtcttctgaatcttgcagcgatggaaccgacagactcgacgggcacagatagcacggtcgaggacttgtcagggcagctcacactggctggcccacccgcttctcctaccttgccatgggaccccgatgatgccgatatcactgaaatactgtccggcgtgaactctgggttggtgagagccaaggacagtatcacttccctcaaggaaaaaactaatcgagttaaccagcacgtccagagtttacagagcgagtgtagcgtgctctcagaaaatcttgagagacggaggcaggaggccgaggaattagaagggtactgcatccagctcaaggaaaattgttggaaagtgacacgaagcgttgaggacgccgaaatcaagacaaacgttctcaagcagaattccgccctactagaggagaagttgcgctatttgcagcagcagttgcaagacgagacccccaggcgccaagaagctgaattacaggaacccgaagaaaagcaggaaccggaagaaaaacaggagccagaagagaaacaaaagcccgaagcaggactttcctggaactcactagggccagcagccacctcccaaggatgcccaggacctccgggcagcccggataaaccaagtaggccccatgggttagtgcccgctggttgggggatgggaccgcgcgccggcgaggggccatacgttagcgagcaggaactgcagaagttgttcacaggcattgaggagctgcgcagagaggtgagctctctgaccgctagatggcaccaagaggagggcgccgtgcaggaagctctccgactgcttggtggcctgggcggacgcgtcgacggctttcttggccagtgggagagggctcagcgcgaacaggcccagacagctagggacctacaggagcttaggggccgggctgacgagctttgcaccatggtggagaggtcagcagtgtctgtggccagcctgcggtcagagttagagggactgggaccacttaagcccatcctggaggaatttggacgccaatttcagaacagtagacggggacccgatctgtccatgaacctggaccgctctcaccagggaaactgcgcccggtgtgccagtcaggggtcccagctttctaccgagagtctgcagcaacttctggacagggcgttgaccagtcttgtcgatgaagtcaagcaaagaggccttacacctgcttgcccctcatgtcaacggctccacaaaaagatcctggagcttgaacggcaagccttggccaaacacgtgcgcgccgaggccctgagcagcaccctgcgcctcgcccaggacgaggccttaagggccaagaacctgctgctaaccgacaagatgaaaccagaggagaagatggctacactggatcacctgcacctgaaaatgtgttctctgcacgatcatctttccaatctccccctggaagggtccacgggaaccatggggggcggctcctccgccgggaccccccccaagcagggagggtctgcccccgagcagtag

SEQ ID NO: 13832 - DNA, 2541 bp, synthetic construct
  source 1..2541: mol_type = other DNA; note = Synthetic coding sequence
atgtccagctcccactttgcctccagacaccggaaggacatctcaacagagatgattagaactaaaatcgcacataggaaaagtctcagccagaaagaaaacaggcataaagaatacgagagaaaccgtcacttcggccttaaggacgtaaacatccccaccctcgagggccggatactggtcgagctcgacgagaccagccaggggttagttcccgagaaaaccaacgtgaaaccccgggccatgaaaacgatccttggtgatcagaggaaacagatgctgcagaaatacaaagaggaaaagcaattgcagaagctgaaggagcagagggagaaagcaaaacgaggcattttcaaggtcggacgatacagacccgacatgccctgcttcctgctgtccaatcagaacgctgtgaaggccgaacccaaaaaagccatcccctcaagcgtcaggataacgcgcagtaaggccaaagaccagatggaacaaacaaagatcgataatgaatctgatgtgagagctatccgaccggggcctcgccagacgtcagaaaagaaggtctccgacaaagaaaaaaaggtagttcagcccgtgatgcctaccagtctacggatgaccaggtcagccacgcaggccgctaagcaggttcctagaaccgtaagttcaactactgctcgtaagccagtgacacgagctgccaatgaaaatgagcccgagggaaaagtcccatcaaaggggcgtccagccaagaatgtggagaccaagcccgataaggggatttcatgtaaggtggatagcgaagagaatactctcaatagccagaccaatgctacaagcggcatgaatcctgacggagttcttagcaagatggagaacctaccggagatcaatacagccaagatcaaagggaagaacagcttcgccccaaaagatttcatgtttcagcccctggacggtctgaagacctaccaggtaacccccatgacaccgcgaagcgcaaacgcgtttctgacaccttcttatacatggacaccgctgaagacagaggtagatgagagccaggctacgaaggagattcttgcgcagaagtgtaagacctactctaccaagacgattcaacaagactctaacaaactgccgtgtccattaggaccactcacagtatggcacgaggaacatgttcttaacaagaatgaggccacgacaaaaaacttgaacggtttaccgatcaaggaagtgcctagtttggaacgcaatgagggtaggatagcccagccacaccatggcgtcccatactttcggaatatactgcagtccgagacagagaagcttacttcccactgttttgagtgggaccgcaaactggagctggatattcccgacgatgccaaggacctgatacggacagccgttggacagacaagacttctgatgaaggaaaggttcaagcaatttgaaggcctggttgatgattgtgagtacaaacgagggattaaggagaccacgtgcacagatctggatgggttctgggacatggtaagcttccaaatagaggatgtgattcacaaattcaacaaccttataaaactggaggagtccggttggcaggtgaataacaacatgaaccataatatgaataagaatgtctttcggaaaaaagttgtgtctggtatcgcttctaaaccaaagcaggatgatgccggccgtattgctgctcgcaacagactcgcggcgattaagaatgctatgagggaacgtatcaggcaagaagaatgtgccgagaccgccgtctccgttatccccaaagaggtcgacaaaatcgttttcgatgcaggctttttccgagtggagtcccctgtaaaactgttctccgggctgtcggtcagctctgaaggcccctcgcaacggctgggaaccccgaagtcagttaacaaagccgtctcacaatcccggaacgaaatgggcatacctcaacaaacaacaagcccggaaaatgcaggccctcaaaatacgaagagcgagcatgttaagaaaaccttgttcctatccatcccagagtcacgcagtagtattgaagacgctcagtgccccgggctacccgatctgatcgaggagaatcacgtcgtcaacaaaaccgacctaaaagtggactgtctttcctcagagcgcatgtcactcccactgttggcaggaggagtggccgacgacataaataccaataagaaggaaggcatctccgatgttgtggaagggatggagcttaattcctccatcacgagtcaggatgtgctgatgagtagccccgaaaagaatacagcaagtcagaattcgattctggaagagggtgagacaaaaatctcccagagtgagttgtttgacaataagtccttaacaacagaatgtcatctcttagacagtccaggactgaattgttcaaatccttttacccagctggagaggcgtcatcaagaacacgctcggcacattagctttggagggaatctgattacattttcccctctgcagccgggggagttctag

SEQ ID NO: 13833 - DNA, 1128 bp, synthetic construct
  source 1..1128: mol_type = other DNA; note = Synthetic coding sequence
atggccagtgccccatggccagagagggtgccccggctattagctccacggctgcctagctatccacccccccctccaacggttggtttgaggtcaatggaacaggaggagacatacctggagttataccttgaccaatgtgccgcccaggacggcctcgccccaccaaggagccccttattctctcccgtggtgccttacgacatgtatattctcaatgcgtccaaccccgacacagcattcaactctaatccagaagtgaaggagacatccggcgattttagttctgtcgacttgtcgttcctaccagatgaggttacacaagagaacaaagaccaaccagtaatctctaagcatgagacagaggagaattccgagagtcagtctccccagtcgcgactcccttctccatccgaacaggatgtgggccttgggctgaactccagtagcctgtccaattctcactcacagctgcaccccggcgataccgatagcgtgcagccatcaccagaaaaaccaaacagcgatagcctgtccctcgcttcgattacccctatgacccccatgacccctatctctgagtgttgtggaatcgtccctcagctgcagaacattgtttcaacagtcaatctggcgtgtaagcttgatctgaagaaaatcgctctccacgcgaagaatgctgaatacaaccctaaaaggtttgctgctgtcatcatgcgaatccgcgagcctcgcaccaccgccttgatcttctctagcggcaagatggtgtgcactggagccaaatccgaggaacagtctcggctagccgctagaaaatacgcacgcgtcgttcagaagctcggcttccccgccagattcctggatttcaagatccagaatatggtcggctcctgtgacgtgcgttttcccatccgtctggaagggctcgtgttgacgcaccagcaattctccagctatgagcccgagctgttcccaggcctgatttatcgtatggtcaagccgagaattgttttgcttatattcgtatcaggaaaggtggtgctgaccggcgccaaggaacggtccgaaatctacgaggcatttgaaaacatatatcctattttgaaaggctttaagaaggcatag

SEQ ID NO: 13834 - DNA, 633 bp, synthetic construct
  source 1..633: mol_type = other DNA; note = Synthetic coding sequence
atgcaggctgagggtcagggcaccggcggatctactggcgacgcagacggaccagggggaccggggatccctgacggtccagggggaaacgctggaggcccaggcgaagcaggcgctacaggcggtcgtggcccccggggtgccggtgccgctagagctagtggccctaggggtggagcaccaaggggccctcacgggggcgcagccagcgctcaggatgggagatgtccctgcggcgctcgccgtccagacagccggctgctgcaattgcatattactatgcccttctcaagtcccatggaagccgaacttgtgcgccgtatcctctcacgagatgccgcgcctctccctcggcccggggccgtgttgaaggattttaccgttagtgggaacctgcttttcatgtcagtgcgagaccaggatcgcgaaggtgccggtcgaatgagagttgtgggctggggcctggggtcagcttcccccgagggacagaaggctcgtgacctgaggacccccaagcataaagtctcagagcagaggcccggaacccccggccctccgcctcctgaaggtgcccagggagatgggtgcagaggcgtggcttttaatgtgatgttctccgcaccccatatatag

SEQ ID NO: 13835 - DNA, 582 bp, synthetic construct
  source 1..582: mol_type = other DNA; note = Synthetic coding sequence
atggtcgttctgcgagctggcaaaaaaacattcttgccaccgctgtgtcgtgcttttgcctgcagagggtgtcagctggcacccgaaagaggggccgagcgtcgcgataccgcaccatcaggcgtcagcaggttttgtccaccaagaaagagctgccacgattggattgggccacctgataaatacagtaacctgcgtccggtacacttttacataccagaaaatgagagccccctcgagcagaagcttaggaagttacgtcaggagactcaggagtggaaccagcagttttgggcaaaccaaaacttgacattctccaaagaaaaggaagagttcatccactccaggttgaagacgaaaggcttgggtctccgcacagaatctggccagaaggctacattgaatgccgaagagatggctgacttttataaggagttcctgtcaaaaaacttccaaaagcacatgtattataacagggactggtataagcgcaattttgccattacttttttcatgggaaaggtggctcttgagcggatctggaacaagctcaaacaaaagcagaaaaagaggagcaattag

SEQ ID NO: 13836 - DNA, 1383 bp, synthetic construct
  source 1..1383: mol_type = other DNA; note = Synthetic coding sequence
atggccaatgacccactggagggatttcacgaagtcaacttggcctccccaacgagtccggacctgctgggcgtgtacgaatcaggtacacaggagcagacaacgtccccatccgtcatctatcggccacatccgtcagcactgagtagtgtcccgatacaagctaatgcactcgacgtctcagaactgccaactcagccagtgtatagttcacccaggagactgaattgtgcggagatttcaagtataagttttcatgtcactgacccagccccttgctcgacaagtggagtcaccgccggactaaccaaattgactacacggaaagacaattacaatgccgaacgcgaatttcttcaaggagctaccatcacagaggcttgcgacggaagcgacgatattttcggactttccaccgatagcttatcaagactacggtctccatctgtcctggaagtaagagagaagggctatgagcggctcaaggaggagctcgctaaggctcagcgtgagctgaagctgaaagatgaagagtgtgagcggttgtcgaaggtgcgggaccagctaggccaggaactggaggagctgactgcgtctctatttgaggaagctcataagatggttcgtgaggcaaatatcaagcaggctacagcagagaaacaactaaaagaggcgcaggggaaaatcgacgttctgcaggccgaggttgctgctcttaaaacactggtgctctcctcttcacccacatcgccgacacaggaacccctgcccgggggcaaaacgccattcaagaagggtcacacgagaaataagagcactagttctgccatgtcaggctctcaccaggatctgtctgtcattcaaccaatagtaaaggattgtaaggaggccgacctgtccctgtacaatgaattccggctgtggaaggacgaacctaccatggatcgcacctgtcctttcctggacaagatctaccaggaagacatcttcccttgcctgaccttttccaagtccgagctagcctccgcagtattggaggcagtggaaaacaatacattaagcatagagcccgtcggcctacagcctattaggtttgtgaaggcttctgctgtggaatgcggaggtccaaagaaatgtgccctaacaggccagtccaagtcatgcaagcatcggattaaattgggggattctagtaactattactatatctctcccttttgccgctaccgcattaccagcgtgtgtaattttttcacatacattaggtatatccagcagggcttggtcaagcagcaggatgtggaccagatgttttgggaagtgatgcagctgaggaaagagatgtcactggcaaaactgggatattttaaggaggaactttag

SEQ ID NO: 13837 - DNA, 981 bp, synthetic construct
  source 1..981: mol_type = other DNA; note = Synthetic coding sequence
atggcaaccctggttgaactgccagactcagtgctccttgagattttcagttatctgcctgtgcgcgaccgcatcagaatttctagggtgtgtcatcgctggaaacggttagtggatgaccgctggctctggcgccatgtcgacctgaccctgtacactatgcgtccaaaggttatgtggcatctcctaaggcgctatatggcttcgagactgcattcactgcgaatggggggctacttgttcagcggttcccaggccccgcagctcagcccggcattgttacgagcactcggccagaagtgccctaacttgaaacgactttgcctgcacgtggccgacctgtcaatggtacctattacctctttgccgtctaccctgcgcacgcttgagctgcactcatgtgaaataagtatggcatggttgcacaaacagcaggatccaacggtactacccttactcgagtgtatcgtccttgaccgcgtgcccgccttccgagatgagcaccttcagggcttgacgaggtttagagctctgaggtcattagtactgggcggaacctatagagttaccgaaaccggtttggatgctggactccaggaactaagctatctccaaaggttggaagttttagggtgcacattgtccgctgattcgaccctgctggccatctctcgccacctgcgggatgtaagaaagattcgactgacagtccggggtctgagcgcacccggactcgcggtgctggaagggatgccggcccttgaatccctttgcttgcaaggccccttggtcacacccgaaatgccaagccctactgagatattgagcagctgcctcactatgccaaagctccgggtgctggaactgcaagggttgggctgggagggccaggaggcagagaagattttatgtaaaggcctgcctcattgcatggtcattgttcgggcctgccctaaggagagtatggactggtggatgtag

SEQ ID NO: 13838 - DNA, 3090 bp, synthetic construct
  source 1..3090: mol_type = other DNA; note = Synthetic coding sequence
atggcttccgaagcagtcaaggtggtagtgagatgccgcccaatgaatcagcgagaacgggagttacgctgccagcctgtcgtcacagtggattgtgcgagggctcaatgttgcattcagaatccgggggctgctgatgagcctccgaagcagtttaccttcgacggtgcttatcacgtggatcacgtgacagaacaaatatataacgagattgcttaccccctggtggagggtgtgactgagggatataatgggactatcttcgcttatggccagactggctccgggaaaagcttcaccatgcagggcctacccgaccctccaagtcaacggggtattatcccaagggcatttgagcacgtgttcgaatccgttcagtgcgcagaaaataccaagtttcttgttcgggcttcctacctcgaaatttataacgaggacgtcagggacttgttgggcgcagatacaaaacagaagctggagctaaaggagcaccctgagaagggggtctatgtaaaaggattgagcatgcatactgtgcattctgtcgcccagtgcgagcacatcatggaaaccggctggaagaaccgatcagtcggatatactttgatgaataaggacagctcaaggagccacagtatcttcaccatttcaatcgagatgtcagctgtggacgagcgtggtaaagatcacttgcgggcaggaaaacttaacttagttgatctggccggttctgagagacagtcaaagacaggagccaccggggagcgattgaaagaggccaccaagattaatttatctctgtccgccctgggcaacgtcatttcagcccttgtcgacgggcgttgcaagcatgtgccctatagggattcgaagctgactcgcttattacaggactctctgggtgggaacaccaagacactgatggtagcatgtctgtcaccggctgacaacaattatgacgagacattgtcaactttacggtacgccaacagagcgaaaaatatccgtaataagccccgaattaatgaggaccccaaagatgcgctcttacgcgagtaccaggaggagatcaagaagcttaaagctatactgactcagcagatgagtccttctagcctctccgctctactgtccagacaagtcccacccgaccccgttcaggtggaggagaagctgctgccacagccagtgattcagcacgatgttgaagcagagaaacagctcattagggaggaatacgaggagcggctggcacggctgaaagctgactataaggctgaacaggaatctagagctcgtcttgaggaagacatcacagctatgcgtaatagttacgatgttcgtttatctacactggaagagaacctgcgcaaagagaccgaagccgtgcttcaggtgggcgtgttgtacaaggccgaggttatgtcacgggctgaattcgcgagctccgccgaatacccccccgccttccaatatgagaccgttgtaaagcccaaggtcttttctacgacggacactctgccttccgacgacgtgtctaaaactcaggtgagttccagattcgccgaactcccaaaggtggagccctctaaatctgagattagcctgggatctagcgagagctcaagcttggaagaaacgagcgtctccgaggcattccctggcccagaagaaccatccaacgtggaggttagcatgcctactgaggagtccagatcccggtacttcctggatgagtgcttggggcaagaggcagccggacacctcctgggtgagcagaattacttgccacaggaagagccgcaggaggttcctctccaaggcctcctggggttgcaggacccatttgctgaagtggaagccaaattagcacgcctaagttctacagtcgccagaaccgatgccccacaggctgatgtaccaaaagtgccggtccaggtgccagcccccaccgacctcctcgagccatcggacgctcgcccggaggcagaagcagcagacgacttccctcctcggcccgaagtagacttggctagcgaagtcgccctcgaggtcgtgcgcactgcagagccaggggtctggctcgaggcacaagcgcctgtagcgctagttgcccagccggaacccctgccagctaccgctggagtgaaaagagagagtgtggggatggaggtagcagttctgacagacgaccctctgccagtggtggaccagcagcaggttctggcgaggctgcagctcttagaacagcaggtagttggtggggaacaggcaaagaacaaagatttaaaggaaaaacataaaaggagaaagagatatgctgatgagcgccgcaagcagctggtcgccgctctgcagaactctgacgaggattccggtgactgggtgctcctgaatgtgtacgacagtatccaggaggaggttagggcgaaatcaaagctgctggaaaagatgcagcggaaactgagggccgcagaggttgagatcaaagacttgcagtcggagtttcagctcgagaaaattgactacctggccactatccggcgacaggagcgcgacagtatgctcctccaacagctgctcgagcaagtccaaccactcattaggagagactgtaactatagcaatctggagaagatcctccgagagtcatgctgggacgaggacaacggcttctggaagataccccacccagtgataacaaagacgagcctgcctgttgcagtgtctactggaccacaaaacaaacccgcgcgaaagaccagcgccgccgacaacggcgagccgaatatggaggatgacagatataggctcatgctgagtagaagcaattctgagaatatcgcctctaactatttcaggtctaagcgcgcttctcagatcctatctacagacgccagaaaatctctgactcaccacaatagcccacccggtctatcttgccccctgtcaaataactctgctatcccacctacacaggcgccagagatgccacagccccggcccttccgtctggagagtctggacatcccatttacaaaggcaaaacgaaaaaaatctaagtctaacttcggttctgagccactttag

SEQ ID NO: 13839 - DNA, 417 bp, synthetic construct
  source 1..417: mol_type = other DNA; note = Synthetic coding sequence
atgatacttcagcagccccttcagcggggaccacaggggggcgcacaacgcttgccccgcgctgccctcggagttacctggggtttggacgcctcgagcccacttagaggagctgtccccatgagcacaaagcgtaggctggaggaagaacaggaaccacttcggaagcagttcctctccgaagagaacatggctacgcatttcagtcaactgtctcttcacaacgaccacccatattgttcgccaccaatgacattttctccagccctgcctcccctaaggtcaccttgtagtgaactgctgttgtggcgatatcctggttcccttatcccggaagcgctacgccttcttcggctgggtgacacaccctccccgccttatccagccacgcccgccggtgatattatggaactgtag

SEQ ID NO: 13840 - DNA, 573 bp, synthetic construct
  source 1..573: mol_type = other DNA; note = Synthetic coding sequence
atgtttcaggttcctgattccgagggaggcagagctggctcacgtgctatgaaaccccccggcggcgagtcttccaacctgttcggctcccctgaggaggctaccccttctagccggccaaaccggatggcctccaatattttcggacccactgaggaaccacagaatattcctaagagaactaatcccccaggggggaagggaagtgggatatttgacgaatcaactcccgtgcaaactcgacaacatctgaacccgccgggtggtaagaccagcgacattttcggttcgccagtcactgcgacctcacgattggcgcaccccaacaagcccaaagatcatgtttttctctgcgagggggaagaacctaagagtgatctgaaagctgctcgctcgattcccgccggggcagaacccggggagaagggctccgccagaaaggctgggcccgccaaagagcaggagccaatgcctacagtggactcccacgaacctcggctggggcccaggcctcggagccacaacaaggtcttgaaccccccaggtggaaaaagttcgatcagcttttactag

SEQ ID NO: 13841 - DNA, 690 bp, synthetic construct
  source 1..690: mol_type = other DNA; note = Synthetic coding sequence
atgacctgctgcagccaggtgcctccccgaagaaggccctcccttgccctgtctcccagactggactgtaacggcctcaacggcgttcctgggagcatctgggatttcgtgtctggaagcttcagtccatcccctagcccaattctgagcgcagggccccctagctcctcatcagcaagccctaatggagccgagctggcacgggtgcgtcgccagctggacgaagcaaagagaaagattcgccagtgggaggaatcatggcagcaggtcaagcaggtgtgtgacgcttggcaacgggaagcgcaggaggctaaggaacgagccagagtcgctgactccgatagacagctggccctgcagaagaaagaggaagtggaggcccaagtgaagcaattgcaggaggagctggaaggtctcggcgtggcctcaaccctgccaggcctacgcggttgcggagatatcggaacgattcccctgcctaagctgcactctctccagagccagctccgactggacctggaagctgtagacggcgtgattttccagttgcgagccaaacaatgcgtggcgtgtagagaacgggcccatggagccgtgctgcggccatgccagcaccatatcctctgtgagccatgtgccgcaactgctccagaatgtccatattgtaaaggtcagccccttcagtggtag

SEQ ID NO: 13842 - DNA, 5460 bp, synthetic construct
  source 1..5460: mol_type = other DNA; note = Synthetic coding sequence
atggcaagcatcactcagctatttgatgacctttgtgaggcattgctaccggcagccaaaacccacctcggccaaaggagtgtgaaccgcaagcgagccaaaagaagtctgaagaaggtcgcctacaatgccctattcaccaatctgttccaggacgagactcaacagctgcaacccgatatgtcaaagctcccggcccgtaataagatactgatgttgagcttcgatctacgcgtaggcggtttaggaccaaaggccgatagactggaagagctggtggaagagctggaggccgctccttgttgcccactgctggaagtgggcagtgtcctggaccttctggtccagctcgctggatcgggcccacctcaggtgttgcctcggaagcgggattactttttgaacaataagcatgtaggtaggaacgtcccatactccgggtatgattgcgatgatttgagcgtcttcgagatggatgtgcaaagcctgatctccagagaagagtgcctctgccacagtatgattcaggaaacattgcaagtgatggaggcagcccctgggacgggcctgccgactgttggactcttcagctttggagacccatgcggcgacagattcgaacgcgacactcgcgtgtcactcttcggggcgctagttcattcaagaacctacgatatggatgttaggctgggacttccccctgttcctgataacgcggacttgtcaggcctggccattaaggtacccccctcagtagaccagtgggaggacgagggtttccaatccgccagtaatctcactcctgattcccagtccgaaccctcagtgaccccagatgtggatctgtgggaggcagccttgacatacgaagcttccaaacgtaggtgttgggagagggtgggatgtccaccaggtcatagggaagagccgtaccttacagaagccgggagggacgcattcgacaagttttgtcgcctgcaccagggagaattacaactgctggcaggcggggtgctccaggcacctcagcctgtactagtcaaagagtgcgagttggtaaaggacgtgctcaatgtcctgatcggagtggtgtcagcgacattttcgttgtgtcagcctgctcaagccttcgtcgtgaaacgcggagttcacgtatccggcgctagccctgagtcaatttcgtccctgctgagcgaagttgctgaatatgggacctgctacacacgtctgagtcactttagcctgcagccagtccttgattccctgtatagcaaagggcttgtatttcaggcctttacctctggactgaggagatacctccaatactatagggcctgtgtcttgtctacaccacccacccttagcctgctgacaatcggattcctgttcaaaaagctgggaaggcagctgcgctatttggccgaactctgcggagtgggtgcagtgctgcccggcacttgtggtggaggtcccagggcagcatttccaaccggcgtcaaactgctttcctacctataccaggaggctctgcacaattgcagcaacgagcactatccagtactgctgagtttgttaaaaacctcctgtgaaccctatacacgatttattcatgattgggtctactccggagtatttagagacgcatacggcgagtttatgatacaggtgaatcacgagtatttgagctttcgagataagctgtactggactcacggttatgttctcatatccaaggaagtcgaagattgcgtaccagttttcctgaaacacatcgcccatgacatttatgtttgcggaaagaccatcaacctacttaagctgtgctgccctaggcactatctttgctggtccgatgtccctgttcccagaatatcagtgattttcagtttggaagaactgaaagagatagagaaagattgcgccgtgtatgtgggaagaatggagcgagtggccaggcacagctccgtctctaaggaagagaaagaactcaggatggagatcgccaaacaggaactaatcgctcacgcacgtgaggccgcaagcagggtcctgtccgccttatcagatcgccagatgtcagaacggatggcattggacgctaggaagagggagcagtttcagcggctcaaggaacagtttgtgaaggaccaggaacgcagacaagctgcaagacaggaagagcttgacgatgatttttcctacgctcgggagcttcgtgaccgggagcggaggctgaagtctctggaagaagaacttgaaaggaaggccagacaggccctcgttgatcattacagtaagttaagcgccgaggccgcaaggagagaacaaaaagctctgtggcgcatccagcgacacagactcgaaagcgcacggctcagatttctgctggaggatgagaagcacatccaagagatgttaaaggcagtgtcggaggctcaccagccgcaggagccgccggatgtcctgctctcagtgcatcctcaggtaacgtcccctgggccagaacacccagagggaggtcaaggctgcgattcaggttcagctgaacagcactcacctgcgtgggatggttggaatcgacctgggttgctgactcctcagccgctgaagccccttgcagtaggtgccgggggcagaggactccagcaagccgagggcgccagacctttcagtgactccttgagcattggagatttcttacccgttggccccggcgcggaacctagcgtccagacgggcatggttccactgctcgaggtcgcactccagactatcaatcttgacctcccaccctctgctcctggcgaagcccctgctgcagcttccactcagccttcccgccctcaggagtatgacttctctacggttctgcgtccggccgtggcaacgtcccctgctcctggaccccttcaggcagcagagtgtagtcttggcagctctgggctgcagttgtgggaggatagttgtgggaagatggacgcctgtggtagcgcatcaagggagaccctactgccctcccacccaccacgacgagccgccctggaagaaggctcttcccagccgacggaaaggctgtttgggcaggtgagtgggggcggcctgcccaccggcgattatgcttcagaaattgctcctacaaggcctagatggaacacccatggacatgtctccgatgcgtctatcagggttggagaaaacgtgtccgatgtggcccctacccagcctagatggaatacccacggtcatgtcagcaacgcttcaatttccctgggggaaagcgtttccgacgtagcgcccacgaggcccaggtggaatatacacggccacgtgtcaaacgcaagcatcagagtgggagagaatgtcagtgacgtcgcccccactcgccccaggtggaatacacatggccatgtgtcaaatgcgagcattcgcgtgggcgagaacgttagtgacgttgctccaactcggccaagatggaatacacatggtcacgtgagcgatgcctcaatctctcttggtgaatccgtctctgacatggcccccgccagacccagatggaacactcacggccatgtgagtgatgcaagtatcagcctgggcgaatcagtctcagacatggcccctacgagaccaagatggaacacccatggtcacgtgtctgatacgtctatcagggtgggggagaacgtctctgatgtagcccctatacggagccgctgtaatactcatggccatgtgtccgacgcatcaatttctctgggtgaacccgtatccgacgtggtgtccacacgccctagatggaacacacacgtacccatacctcccccccacatggttctgggggccctgtcaccagaggctgagccaaacacaccacgacctcaacaaagtccacccggccatacaagtcagtctgccctctcgctgggtgcccagtcaactgtgctggattgtggcccacgattaccagttgaggttgggccctccttgagctccccatcgtctggctgtggagagggttccatctccgtgggcgaaaacgtgtccgatgtggctccgactcaaccatggtggcctaacacacctggcgactccgtatctgaggaactcggtcctggacggtccggtgatacggaagacttgagccccaactggccgctgaacagtcaggaggatacggcggcacagtcttcaccggggcggggagaggaggccgaagccagtgcagcagaggcacaggggggcgaacaggcataccttgctgggctcgccggtcaataccatcttgagaggtaccccgactcctatgagagtatgagcgagccacccatcgcgcacttgttgagacctgtcctgcctagggcgttcgcattcccagtcgatccacaggtccaatcggcagccgacgaaactgccgtgcagctgagcgagttgcttacactcccagtgcttatgaagcgatcaatcacagcacccttagctgcccacatctccctggttaacaaggctgccgtggactatttcttcgtggagcttcaccttgaagcccactacgaagccctgagacacttcctgttgatggaagacggggagttcgcgcagtctttgtccgacctgttatttgagaaacttggcgccgggcagacccccggcgagctcctgaatccactggtacttaactccgttctgtcaaaggccctgcagtgctccttgcatggggataccccccatgcaagcaatctgtcactggcgttgaaataccttcctgaagtgttcgctcccaatgcccctgatgttttatcctgtctagaactcaggtacaaggttgactggcctctgaacatcgttattactgaaggttgcgttagcaaatatagcggggtgttctcctttctgctgcagttgaagctgatgatgtgggctctgaaagatgtgtgcttccacctcaaacggaccgcactactaagccacatggcaggcagcgtacagtttcgtcaactgcagttgttcaagcatgaaatgcagcattttgtcaaggtgatccaaggttacattgccaatcagattctgcacgtaacatggtgtgagttcagggctcgccttgcaaccgttggggacttagaggagatccagcgtgcgcacgcagagtacctgcataaggccgttttcagagggctcctgaccgagaaggctgcacctgtgatgaatgtgatccatagcatcttttcgttggttttgaaattccgctcacagctgatttctcaggcttggggacctcctggtggtccccgaggagccgaacacccaaatttcgcactgatgcagcagagctacaacactttcaagtactattcgcatttcctgttcaaagtagtgacaaaactggttaaccgggggtatcagccccatcttgaggattttcttctgaggattaactttaataactactaccaggatgcatag

SEQ ID NO: 13843 - DNA, 2250 bp, synthetic construct
  source 1..2250: mol_type = other DNA; note = Synthetic coding sequence
atgtccggatcccacacgcctgcctgtggcccattctccgcgctgacgccgagtatttggccccaggagatccttgccaagtacacacaaaaggaagaatccgccgagcaacctgaattttactatgacgagtttggatttagagtctacaaagaggagggagacgagccgggttcaagcctcctggccaactcgccactgatggaagacgcgccacaacggctacgttggcaagcccacctcgaattcactcacaaccacgatgtcggcgatctcacgtgggacaaaattgccgtgagccttcctcgcagtgagaaactgaggtcccttgtgttggccggaatccctcatggcatgcggccccagttatggatgaggctgtccggagccctgcagaaaaagcgaaactccgagctctcttaccgggagatcgtcaagaactccagcaatgacgagactatagcagccaagcagatagaaaaggacctcctaagaaccatgccaagcaatgcctgctttgccagtatggggagcatcggagtgcctcggctgcgccgggtgttgcgcgccctcgcctggttgtatcccgagattggctactgtcaaggaacaggcatggtcgcagcatgccttctgctgtttctggaggaggaggacgcattctggatgatgtcagccattatagaagaccttttgccggcatcctacttcagcactaccttgctgggtgttcagaccgaccagcgggtattgagacacctgatagttcagtatcttccacggctcgataagctcttgcaggaacatgacattgaattatcactgattaccctccactggttcctcaccgccttcgcctctgtcgttgatatcaagctattattgaggatatgggatctgtttttttatgagggtagccgagtccttttccagcttaccttgggtatgttgcacctcaaggaggaggagttgatccagtccgaaaatagcgctagtatctttaatacactgtccgatataccatctcagatggaagatgctgagctactgctgggtgtcgcgatgagactcgctggatccctcacagatgttgcagtagagacacagcggaggaaacatctcgcatatctcatcgccgaccagggacagctgctgggggccgggaccctcaccaacctgtctcaagtcgtacggaggcgaactcagagaagaaaatctaccattaccgccctgctcttcggagaggacgatctggaggccctcaaggctaaaaacattaaacagacagagctggtggccgacttacgtgaggccatattaagagtggccagacatttccagtgcacagatccgaaaaattgttccgttgaattaacaccagactattctatggagtcacaccaaagggatcacgagaactacgtcgcctgcagtagatcacaccgccggcgagcaaaggcgttattggactttgaacggcatgatgatgatgagctgggcttccgaaagaatgatattattaccatagtctcccagaaggatgagcattgctgggtgggggaactgaacggactccgtggctggtttccggctaagtttgtcgaggttctcgatgagcgcagcaaggagtatagtatcgccggagacgatagtgtgacagaaggcgtgacagatctggttcgcggaacactgtgtcccgcactgaaagccttgttcgagcacggattgaaaaagccctctctgctcggcggagcttgccatccatggctgttcattgaggaggctgcagggcgagaagtggagcgagacttcgcgtcagtctattcgcgtctggtgctgtgtaaaactttccggcttgacgaggacggcaaggtactgacacctgaggagctgttgtaccgcgccgtccagtcagtgaacgtgacccacgacgcagtccacgctcagatggacgtcaaactccggtctctaatctgtgtgggcctcaacgaacaggtgctacatttatggttagaggttttatgctcctcactcccgactgtagagaagtggtaccagccatggagcttcctgcggtctcccgggtgggtgcagatcaagtgtgaattgagggtgctctgttgtttcgctttcagtttgtcacaggactgggagctcccggcaaaaagggaggctcagcaaccattaaaggaaggagtacgagacatgctggttaaacaccacctcttctcctgggatgtggatggatag

SEQ ID NO: 13844 - DNA, 2097 bp, synthetic construct
  source 1..2097: mol_type = other DNA; note = Synthetic coding sequence
atgctatcccccaaaatcagacaggcacgccgggctcgatccaaaagcctggtaatgggtgaacagtcacgttccccagggcggatgccatgcccacataggctcggcccggtgttgaaagcaggctggctgaaaaagcagcgttctataatgaagaactggcagcaaaggtggttcgttctgcgaggggatcagttattttactataaagataaagacgaaatcaaaccccaaggcttcatttcactgcagggcactcaggttacagagttgcccccaggccctgaggatcctgggaagcacctgttcgagattagcccaggcggagccggagaaagagagaaagtgcccgcaaaccctgaggctctgctacttatggccagttcccagagagatatggaagactgggtgcaggctatccgtagggtcatctgggcccccctgggaggaggcattttcggccagcgacttgaggagacagttcaccatgaaagaaaatacggccctcgcctggccccactgctggtagagcagtgtgtagatttcattagggagagaggactgactgaggagggattatttcgcatgccaggccaggctaatctggtccgcgacctgcaagattcgtttgattgtggagaaaaacccctgtttgatagtacaacggacgtgcacaccgtggcctcattgctaaaactatacctgagggagttgcccgaaccagtcgtgccgttcgcccgctacgaggacttcctgagttgcgcccaactgctgacaaaggatgaaggcgagggaaccctggaactcgcaaaacaagtgtccaacctcccccaggcaaattataatctgctgcgctacatttgtaagttcctggacgaggtccaggcttattcaaacgtcaataaaatgtccgtacaaaacctggctacagtatttggaccaaatatcctgcggcctcaagtcgaagatcccgttacaatcatggaggggacaagcttagtccagcacctgatgactgtgttgatcagaaagcattctcaactctttaccgccccagtgcctgagggcccaacaagtcctaggggcggccttcagtgtgcagtggggtggggcagcgaggaagtgacccgggattcccagggtgagcctggtggccccgggctgcctgcacacagaacctcttcccttgacggggcggccgtggcagtgctgtcaaggactgccccaaccgggcccggctcgcgttgcagcccaggcaagaaagtccagacactccctagctggaagagctccttccggcagccacggagcctgagcggttcaccgaaaggaggcggatcaagcctggaagtgcctataataagcagcggcggtaactggctgatgaatggattatcatcactgcgaggccatcggcgagcatcctctggggaccgattgaaagactccgggtcagtgcagcgcctgtcgacctatgacaatgtgcctgcgccagggttagtccccggaataccaagcgtcgcctctatggcctggtccggggcatcctctagtgaatcctccgtgggcggatcccttagttcctgcacagcatgccgggcaagcgactctagtgcgagaagtagcttgcataccgactgggctctcgagcctagtccacttccatcgagttccgaagatccaaaaagccttgacctagatcactctatggatgaggcaggtgctggcgcaagcaatagcgagccctctgaaccagactcccccacgagagaacatgcccggaggagcgaagcactgcagggcctcgtgaccgagcttagggccgaactgtgcagacagcgcactgaatatgaacgatccgtgaaaaggattgaggagggttctgctgatctgcgcaaaaggatgtctagactggaggaggaactcgatcaggaaaagaagaagtacattatgcttgagatcaaactgagaaactctgagcgggcacgcgaagacgctgaaaggcgcaaccagctgttgcagagggaaatggaagaattctttagcactctgggttccctgactgtgggagctaaaggagctcgcgctcccaagtag

SEQ ID NO: 13845 - DNA, 180 bp, synthetic construct
  source 1..180: mol_type = other DNA; note = Synthetic coding sequence
atgactaggggcaaccaaagagaattggcaagacagaaaaatatgaaaaagcaaagtgactcggtgaaaggcaaacgcagggacgatggcctgagcgcagctgcaagaaaacagcgagatagcgaaataatgcagcagaaacagaaaaaggcgaatgagaaaaaggaggagcccaaatag

SEQ ID NO: 13846 - DNA, 372 bp, synthetic construct
  source 1..372: mol_type = other DNA; note = Synthetic coding sequence
atggcccggtatgaagaggtttcagtaagtggctttgaggagttccaccgggccgtggagcaacacaacggcaaaacaattttcgcgtacttcacggggtccaaggacgccggagggaagtcgtggtgtccagactgtgtgcaggcagagcccgttgtcagagaaggcctgaagcatatatccgaaggctgtgtgtttatctactgccaagttggggaaaaaccatactggaaggatcctaacaatgatttccgcaaaaatctgaaagtgaccgcagttccgacgctcctgaagtacgggaccccgcagaaactagttgagagcgagtgcctgcaagctaatcttgttgagatgttgttttctgaggattag

SEQ ID NO: 13847 - DNA, 1401 bp, synthetic construct
  source 1..1401: mol_type = other DNA; note = Synthetic coding sequence
atgggatggataacagaggatcttatacgcagaaacgctgagcataacgattgcgtgatcttctctctggaggagctttcactgcatcagcaggagattgagagactcgagcacatagataaatggtgcagagacttgaagattctgtatctccagaacaacctgataggcaagatcgaaaacgttagcaaacttaagaagttagagtatctgaatctcgccctgaataacattgaaaaaatcgagaatctggaagggtgcgaggaactggctaaattagaccttaccgtcaatttcatcggcgagttaagcagtatcaagaacctgcagcacaatatccatctgaaggagctcttcctcatggggaacccatgcgcctctttcgaccattacagggaatttgtagtcgccaccctcccacaactcaagtggctcgatggcaaagaaatcgaaccatccgagcgaattaaggctctgcaagactattccgtgatagagccgcagattagggagcaggagaaggaccactgtctgaaaagagccaaactcaaggaagaagcccagcgcaaacatcaagaggaggacaaaaatgaggataaaaggtcaaatgctggatttgacggacgatggtatacagatataaacgcgaccttgtctagtctggagagcaaggaccatcttcaggcccctgatacagaggaacacaatactaagaagctggacaactcggaggatgacctggagttctggaacaagccatgcctgtttaccccagaatcacgactggaaaccttaaggcacatggaaaagcagagaaagaaacaggaaaaactgtcagagaagaagaagaaagtgaagccaccccgaactttaataactgaggatggcaaagctttgaatgtcaacgagcctaaaattgatttttctctgaaggataatgaaaagcaaataatcctggacctcgcagtgtaccgctacatggacacatccctcatcgatgttgatgtccagccaacttacgtgcgggtgatgattaaagggaagcccttccagttagttctgcccgccgaggtcaagccagactctagttccgcaaaaagaagccagacaacaggccacctggtgatctgcatgccaaaggtgggagaggtcattacaggtggccagcgtgcattcaaatcaatgaagacaactagtgaccgctcacgagaacaaacaaacacccgaagcaaacatatggaaaaactcgaagtagacccatctaagcatagctttcccgatgtcactaacatagtgcaggaaaaaaagcacaccccaagaagacgtcccgagccaaagatcataccgtcggaggaggacccaactttcgaagacaatccggaagtccctcctctgatttag

SEQ ID NO: 13848 - DNA, 1050 bp, synthetic construct
  source 1..1050: mol_type = other DNA; note = Synthetic coding sequence
atggaagatcctcagtctaaagagccggctggagaagccgtggctttggccttattggaatcccctagacccgaaggaggggaagagccgccacgaccgagcccagaagaaacacagcaatgcaagttcgacggccaagaaactaagggatcaaagttcatcacatcatccgcaagcgattttagtgaccctgtgtataaggagatcgccatcacaaacggatgcattaatagaatgtcaaaagaggagctgcgggccaaactgtctgaattcaagcttgagacccgtggagtcaaggacgttcttaaaaaaaggctcaagaactattataaaaaacagaaactcatgctaaaggagtccaacttcgcagatagctactatgattatatatgcatcatcgattttgaggctacatgcgaggaaggaaatccccctgagtttgtgcacgagatcatcgagttccctgtggtcttgctgaatactcatacattggagatcgaagacacttttcagcaatatgttcggcccgagatcaatactcagctaagtgacttctgcatatcccttaccggcattacacaggatcaggtcgatcgagctgacactttcccccaggtgctgaaaaaggtgatcgattggatgaagctgaaagaactgggcacaaagtacaagtacagcctgcttaccgacggatcttgggatatgtctaagtttcttaatattcagtgccaactctccagactgaagtacccaccttttgcaaagaagtggattaacatcagaaaaagctatggaaacttctataaggttcctcggagccagacaaaacttaccatcatgttggaaaaactaggtatggactatgacgggcgccctcactgtgggctggatgattctaaaaacatagcacgcatcgcagttcggatgctgcaggatgggtgcgaattgagaataaacgaaaaaatgcatgccgggcaattgatgtcagtcagtagctctctccctatcgagggcaccccgcccccacagatgccacacttccgaaagtag

SEQ ID NO: 13849 - DNA, 843 bp, synthetic construct
  source 1..843: mol_type = other DNA; note = Synthetic coding sequence
atgcttagtgctgtggctcgaggttaccaggggtggttccatccctgcgctagactgtccgtgcgcatgagcagcaccggcatagaccgtaagggagttctcgccaatcgagtggcagtggtgacaggatctacctccggaatcgggtttgcaatagcacgccgcctggcaagggatggcgctcacgtggtgatcagtagccggaagcagcagaacgtggaccgtgcgatggccaagctgcagggcgaagggctatctgtggccgggatcgtgtgccacgtgggaaaggcagaagatcgggagcagttggttgcgaaggctctggagcattgcggtggtgtggattttctggtgtgtagcgccggggtgaatccattggtcgggtccacgctcggtactagcgagcaaatctgggacaaaatcctgagtgtgaacgtgaagagccctgccttgttgctcagccagctgttgccatatatggagaatagaagaggcgcagtgattttagtctcaagtatcgctgcttataaccctgtcgttgctctaggggtgtataatgtttcaaagactgctttgttgggactcacgcgaacattggcgctggagcttgcacccaaagacattagggtgaactgtgttgtcccgggaatcattaagaccgatttctctaaagtgtttcacggaaacgaatcattatggaaaaattttaaggagcatcaccagcttcagcgtattggggagagcgaagactgcgctgggattgtaagctttctgtgtagcccggatgccagctacgtgaacggagaaaatatcgctgttgctggatactccacacgactgtag

SEQ ID NO: 13850 - DNA, 909 bp, synthetic construct
  source 1..909: mol_type = other DNA; note = Synthetic coding sequence
atggtgacggaacaggaggtggacgctataggacagacccttgttgaccctaaacagcctttacaggcaagattcagagctcttttcacgctgagaggcctcggcggtcccggcgccatcgcttggatctcccaggcttttgatgacgattcagcattgttaaaacacgaacttgcatactgcctggggcagatgcaggacgctcgcgcaatcccaatgctggttgatgttttgcaggacactcggcaggagccaatggtgcggcatgaggctggtgaggctctgggcgccatcggggaccctgaagtcttagaaatcttgaagcaatacagtagtgaccctgtgatcgaagttgcagagacctgtcagctcgccgttagaagactggagtggctgcagcagcatggaggcgagcccgcagcaggcccatacctgtctgttgaccccgctccaccagcagaagagagagatgtcgggcgcctaagagaggccttactggatgagagtcgccctctgtttgaacggtatcgcgcaatgtttgcactccgaaacgctggaggggaagaagctgctcttgcccttgcagaaggactgcattgtggctccgctttattcagacatgaggtgggatacgttctgggtcagctccagcacgaggccgccgtcccacagctggccgccgcactggcccgttgtaccgagaatcctatggtgcggcatgagtgtgctgaggccctcggtgccatcgcccgtcccgcctgcctcgccgcactgcaggcccatgccgacgacccagaacgcgtggttcgggaaagctgtgaagtggctcttgacatgtacgagcacgagaccggcagggcattccagtacgccgatggtctggagcagctacgcggcgccccaagctag

SEQ ID NO: 13851 - DNA, 3384 bp, synthetic construct
  source 1..3384: mol_type = other DNA; note = Synthetic coding sequence
atggaggtacaggtgtcacaggcctcgctaggcttcgaactgacatcggttgagaaatcgctccgggaatggagccggctttcgcgggaggtcatagcgtggctgtgtccttctagcccgaacttcatcttgaattttcctccaccacctagcgcatcctccgtcagtatggttcagcttttctcatcccccttcggatatcagtctcccagtggacattccgaggaggagagggagggtaatatgaagtctgcaaaaccacaagtgaatcacagccagcacggtgagtctcagcgcgctttatctcccctgcaatctaccctaagctcagcagcaagtccttcccaagcgtacgaaacttacattgaaaacgggctgatttgcctgaagcacaagattcgcaacattgagaagaagaagttgaaacttgaagactataaggatcgattgaagtccggcgagcacctgaatcccgatcaactggaggctgtcgagaagtatgaagaggtgctgcacaacctggagttcgcaaaggagcttcagaagactttcagtgggttgtccttggacttactcaaggctcagaaaaaagcccagcggcgcgagcacatgttgaagctggaagcggagaagaaaaagttgaggactatcctccaggtgcagtacgtgcttcagaacctgacccaggagcatgtccagaaagacttcaagggcggactgaatggagctgtttacctgcccagcaaggaactcgattacttaattaagttcagcaagctcacatgccctgagcgcaacgagtctttgtccgtggaggatcagatggaacagtctagtctttatttctgggatttgctcgaggggagtgagaaggccgtagtcggcacaacgtacaagcatctgaaagatttactgagcaaactgctcaacagcggttattttgagagcatacccgtacccaagaacgcaaaggaaaaagaggtacccttggaagaggagatgctgattcagagcgagaaaaagacccagctatcgaagacggaatctgtaaaagaatccgaatctttgatggagttcgcccagcctgaaatccagcctcaggagttcctcaatagacggtacatgacagaagttgattacagcaacaaacagggcgaggaacagccatgggaggcagactacgcccgaaagccaaaccttccgaaacgctgggacatgctcaccgagcccgatggccaggagaaaaaacaagagtccttcaagtcatgggaagcctccggcaaacatcaggaggtgagcaagcctgctgtgagtctggagcagcggaagcaggacacaagtaaactgagatccacacttccggaggagcagaagaaacaagagatttcgaaatccaaaccatcccctagccagtggaagcaggatacccctaagagcaaggccgggtatgtccaggaggagcagaaaaaacaggaaacccccaagctctggccggtgcaactgcagaaggagcaggatccgaaaaaacaaactccgaagtcatggacaccgtccatgcagtctgagcagaacaccacaaaatcctggacgactccgatgtgtgaagaacaagattccaaacagcctgagactcccaaatcgtgggagaacaacgtggaatctcagaaacatagcctgacatctcagtcacagatttcacctaaaagttggggggtggctaccgcttctctcatccccaacgaccagctcctacctagaaagctcaataccgagcccaaagatgtccctaaaccggttcaccagccagtgggatccagctccaccctgcccaaggaccccgtgttacgtaaggagaaactgcaggatctaatgacgcaaatccagggcacttgcaatttcatgcaggagagtgtgctggactttgacaagccttcctcagcaatccccacatcacagccaccttcagcaacccctgggagtccagttgccagcaaagaacagaacctcagcagtcagagcgactttctgcaggaacccctacaggcaacatcgtccccagttacttgcagttccaatgcctgtctggtgacgaccgatcaggcatccagtggatccgagacggagttcatgacaagcgagactccggaagctgccatacctcccggcaaacagcccagcagtctggcctcaccaaacccccctatggccaagggctccgagcaagggtttcagtctcccccagcgtctagctccagcgtcaccattaatactgcgccattccaggccatgcaaaccgtatttaacgtcaatgctcctctacctccacggaaggagcaggagatcaaggagagtccttactcacccggatataatcaatcttttacaacagcctccacccagacaccgcctcagtgccagctgccatcaatccatgttgagcagacagttcacagccaggagaccgcagcaaattaccatcctgatgggaccatccaggtgtccaacggtagcttggccttctaccctgcgcaaactaacgtttttccccgaccaacacagccgttcgttaatagccgtggttctgtgcgcggctgcactcgcggagggagactgatcacaaacagctaccgtagccccggaggttataagggtttcgatacgtaccgaggactgccttcgatttcaaacggcaactactctcagttgcagttccaggcccgggagtacagtggagcaccttacagccaacgagataactttcagcagtgctataagcgcgggggtacctccggcggcccaagggccaattcccgcgccggttggtctgactcctctcaggtatcatcccccgaacgggataatgagacattcaatagtggcgacagcggacagggcgactctagatccatgacgcctgtcgatgtgcctgtcactaatccagctgcgacaatcttgccagttcacgtctaccccttacctcaacaaatgcgcgtggcattctcagctgccaggacttctaacttagcccccgggaccttggatcagccaatcgtgttcgacctgttactgaataacctgggcgagacttttgacctgcagctgggccgattcaattgtccggtgaacggcacctatgtgtttatcttccatatgcttaagctggccgtgaacgttcccctgtatgtgaatttgatgaaaaacgaggaggtgcttgtgagcgcctacgccaacgatggagcccccgaccacgagacagcttcaaatcacgcaatcctccagctctttcaaggagatcagatttggttgcgcctgcacaggggcgccatttatggctcatcatggaagtattcgacgttctcaggctatctgctctaccaagactag

SEQ ID NO: 13852 - DNA, 2448 bp, synthetic construct
  source 1..2448: mol_type = other DNA; note = Synthetic coding sequence
atggaggtgcgggccagtcttcagaaggtatctggaagtagtgactccgttgcgactatgaactctgaggagtttgttctagtgcctcaatacgccgatgacaacagcacgaagcacgaagagaagccgcagttgaagatagtgtcaaacggggacgagcaattagagaaagcgatggaagagattttacgggattcagagaagcggccgtcatccttgctagtcgactgtcagtcaagcagtgaaatctcggatcattcgttcggcgatatcccggccagtcagaccaataagcccagcctgcagcttatcctggatccttcgaacactgaaatcagcacacctcggccctctagtcccggaggattgccggaagaggactccgtactgttcaataagctgacctaccttggatgcatgaaagtgagtagtcccaggaatgaggttgaagccttacgggctatggccactatgaaatcaagcagccagtatccattccctgtgaccctctatgtccctaacgtgcccgaggggagtgtgcgtatcatcgaccagtcaagcaatgtcgagatcgctagctttccaatttataaagtgctgttttgtgcccgaggacatgatggcactaccgagtcgaattgcttcgcattcacagaaagctcccacgggagcgaggagttccagattcatgtattttcctgtgagatcaaggaagccgtctcgcgaatactgtattctttctgcactgcttttaaacggtcaagccggcaggtgtccgatgtgaaggactctgttattcccactcctgacagcgacgttttcacgttctctgtttcactggaggtgaaagaggacgacggaaaggggaatttcagcccggtgcccaaagaccgtgataagttctatttcaagcttaaacaaggaatcgagaaaaaggtcgtaataaccgtgcagcagctttcaaacaaggagctggccatagaacgctgcttcgggatgttgctttcacccggacgcaacgtgaagaattccgacatgcacctgcttgacatggaatcgatgggaaagtcatacgatggccgggcctatgtcataaccggaatgtggaatcccaacgctcctgttttcttagctctgaacgaggaaactccaaaagataaacaggtgtatatgacagtcgccgtggacatggtagtgaccgaagtcgtcgaacccgttcgtttcctcctcgaaaccgttgtccgtgtgtatccggccaacgagaggttttggtacttctcacgaaagactttcacagagaccttctttatgcggctgaagcagagcgaagggaaagggcatacgaatgcgggagacgccatatatgaagtggtcagcctccagcgggagtctgacaaagaggagcccgtcactccaacttccggcggaggaccaatgagtcctcaggacgacgaggcagaagaggagtccgataacgaactgagcagcggcactggagatgtgagcaaggactgtcccgagaaaatcttgtactcctggggtgaactgttggggaaatggcactcaaaccttggagcgcgaccaaagggtcttagcacattggtgaagtccggggttcctgaagcgctgcgcgccgaggtgtggcagttgctggccggatgtcacgacaatcaggcaatgctggacagataccggatattgatcaccaaggacagtgcccaggagtccgtcattacccgcgacattcacagaactttccctgcccatgactactttaaggacacaggaggagatggccaggaaagtttatataagatctgcaaagcgtactctgtatacgacgaggacattgggtactgtcagggacagagtttcctggccgcggtgctgctgttgcatatgccagaggagcaagccttctgcgtccttgttaagattatgtatgactatggcctgcgtgacctgtatcggaataacttcgaggacttgcattgcaagttctaccagctcgagcgcctaatgcaggaacagctgcccgatctgcacagtcattttagtgatctgaatctggaagctcacatgtacgcgagccagtggttcctgacactctttacagctaagtttccattgtgcatggtgtttcatatcatcgacctgctcctatgtgaaggtctcaacattatctttcatgtcgctcttgctctgctgaagacctccaaggaggatcttctgcaggccgactttgagggcgctctgaaatttttccgagtgcaactccccaagaggtatagggccgaggagaatgctaggcgcctgatggaacaagcgtgcaatatcaaagtgcccacaaagaaactgaagaagtatgagaaagagtatcagactatgcgggagtcccagctgcagcaggaagaccccatggacagatataagtttgtgtacctgtag

SEQ ID NO: 13853 - DNA, 639 bp, synthetic construct
  source 1..639: mol_type = other DNA; note = Synthetic coding sequence
atggcccaaaccgataaacccacttgcattcctcccgaactccccaaaatgcttaaggagtttgctaaggctgccatccgcgctcagccacaggacctgatacagtggggcgccgactacttcgaggctttgtcacgcggcgagaccccacctgttcgagaacgtagcgagagagttgctttatgcaactgggcagagctcaccccagaactcctgaagatcctccacagccaggtcgcaggccgactaatcattcgcgctgaagagctagctcagatgtggaaggtggtgaatttacctacggacctctttaactcagtgatgaatgtaggacgcttcacagaggaaatagagtggctgaaatttctggcactggcttgtagtgccctaggcgtgacaattacaaagaccctgaaaatcgtttgtgaggttctgtcctgtgatcataatggggggctgcctagaatccccttcagcacttttcagttcttgtatacatacattgccgaagtagacggcgagatatgtgctagtcacgtaagtcggatgttgaactacatcgaacaagaggtaataggcccggacggccttatcacagttaacgactttacacagaacccacgggtgtggctggagtag

SEQ ID NO: 13854 - DNA, 1938 bp, synthetic construct
  source 1..1938: mol_type = other DNA; note = Synthetic coding sequence
atggcctcactgttgcaggatcagctgacaacagatcaggacctgctcctgatgcaagagggtatgcccatgcgcaaggttaggtctaagtcgtggaagaagctgaggtactttcgccttcagaatgacggcatgactgtgtggcacgcccggcaggcccgcgggagcgccaaaccaagctttagcatctccgatgtcgagacaattagaaacgggcacgatagtgaactgctgcggagccttgcagaggagctgcccctggagcaagggtttaccattgtcttccacggacgacgcagcaacctggacttgatggcaaatagtgtcgaggaagcccagatctggatgcgcggactgcagctgctggtggacctggtgacctctatggaccatcaggagaggcttgatcagtggctgagcgattggttccagcgtggggataagaatcaggacgggaaaatgtcgtttcaagaagtgcagcggttattgcatctgatgaatgttgagatggaccaagagtatgctttctccctctttcaggctgccgatacaagtcagtctggaaccttagagggagaagagttcgttcagttttacaaggctttaactaagagagccgaagtgcaagagctgtttgagtccttttctgccgatggccaaaaactcacactgcttgaattcctggacttccttcaggaagagcagaaggaacgagattgcacctctgagcttgccttggagctaatcgatagatatgaaccttccgacagcgggaagctcaggcacgtgttgtccatggatgggttcctgtcatacctatgcagcaaggacggtgatattttcaaccccgcatgccttcctatttaccaggatatgacacagccactaaaccactatttcatctgcagcagccacaatacatatctagtcggggaccagctgtgcggacaatcctctgtcgagggttatattcgtgccctgaagcgtggctgtcgatgtgtggaggtcgacgtttgggacggtccctcgggagaaccagtggtctaccacggtcataccctcaccagcagaatcctattcaaagacgtggtcgcaacggtggcacaatatgccttccagacaagcgattaccctgtgatactatcattggaaacgcactgttcttgggagcagcaacaaacaatggctcggcacctcaccgagatactcggtgagcagctgttgtcaacaactcttgatggtgtcctgcccactcagctgccatcccccgaggagctgagacgaaaaattctggtcaagggaaaaaagttaaccttagaagaggatttagaatatgaggaggaggaagctgaacctgagctggaggagtctgaactcgccctggagtctcagttcgagaccgaaccagagccccaagagcagaatttacagaataaggacaaaaaaaaaaagtccaagcctattctctgccccgcgctgtcttctcttgtgatctatttaaaatcggtatcatttcgaagctttacccattctaaagaacactaccatttttatgagatctcttctttctccgagaccaaggcaaaacggctcattaaagaggccgggaacgaatttgtccagcacaacacctggcagctgtctcgggtttaccctagcggactccggaccgactcgagtaattacaatccccaggaactctggaacgccggatgtcagatggtagccatgaatatgcagactgcagggcttgaaatggacatttgcgacggccattttagacaaaacggcgggtgcggatatgtcctcaagcccgattttcttagagacattcagagctcgtttcacccagagaagcccatttctcccttcaaggctcaaactttgtctattccataccggcacctccaacttatcttccctatcaatagcgtgtag

SEQ ID NO: 13855 - DNA, 7554 bp, synthetic construct
  source 1..7554: mol_type = other DNA; note = Synthetic coding sequence
atggtgggggagaggcacgccggggacctcatggtgccgctgggacctcgactacaggcttatccagaagagctcatacgccaaagacctgggcatgatggacatccagagtatctgatcaggtggtccgtgctcaagtgcggtgaggtgggaaaagtgggagtggaagagggcaaggccgaacacatactgatgtggctatcagctcctgaagtgtatgccaattgtccagggctcctgggcgagcgcgccttgagcaaaggtctgcagcatgaaccagccggcgtatccggaagtttcccccgggaccccggtggcttagatgaagtcgcaatgggtgagatggaagccgacgtgcaggcgctggtccgcagggccgcccgccagctggccgaaagtggaactccaagccttacggccgccgtgttgcacaccatccatgtcctgagcgcctacgctagcatcggacccctgaccggggtgttccgcgagaccggcgccctggacctgctgatgcacatgctgtgcaaccctgagccgcagatccgccgttcagccgggaaaatgctgcaggccctggctgcccacgacgcagggagccgtgcacacgttcttctgtccctgagccagcaggacggcatcgaacagcacatggactttgattccaggtatacactgttggaactcttcgccgagacaacatcctccgaagagcactgtatggctttcgagggcattcatctgccccagattcccgggaaacttttgttcagcctagtcaagcgttatctttgcgtgacgagtctgttggaccaattgaacagttcccctgagctgggcgccggggaccaatcttcaccttgtgctacccgcgagaaaagccggggccagcgggaattggaattctcgatggcagtagggaatctcatatccgagctggtgcgttccatgggatgggctagaaacctctccgaacagggcatgtccccacctagacccacccgaagtatattccagccatacatctccggcccgagtctgctgcttccaaccatagttacaacccctaggagacagggatgggtgttcagacagcgcagtgaatttagcagccgatctggatatggggaatacgtgcagcagaccttgcagcctgggatgcgtgtgcgcatgcttgacgattatgaggagatttctgctggcgatgagggggaattccgtcagtccaataacgggatacctccggttcaggtcttttggcaaagcacaggcagaacgtattgggtccactggcatatgcttgaaatcttgggcccggaggaggccacggaggacaaggccagcgccgccgtcgaaaagggggccggagctacagttcttggtaccgcattcccttcttgggactggaaccctatggacggcctatacccccttccctacttgcagcccgaaccccagaaaaatgagagggtggggtacttgacgcaggccgagtggtgggaattgctgttttttatcaagaagttagacctgtgtgaacaacagcccatttttcagaatctctggaaaaacctagatgagaccctcggtgagaaggcccttggggaaatctctgtgagcgtggagatggcagagtcccttctgcaggtcctttcctctagatttgaaggatccactctgaacgatctgctgaactcacagatatataccaagtacgggctcctgtctaacgagccctcatcaagctccaccagtagaaatcactcatgtacacccgaccctgaagaggaatccaaatccgaagcctccttctctgaggaggaaacagagagccttaaagccaaggccgaagcaccaaagacagaggccgagcctacaaaaactagaaccgaaacacctatggcccagagcgactcacaattgtttaaccagttgctcgttactgagggaatgacgctgccaaccgaaatgaaagaggcggcgtccgagatggctagggccctgaggggacctggtccccgatcgtcgctggatcagcacgttgccgccgtggtggccaccgtccagatttcgagcctcgacaccaacttgcagttgagtggcctctctgccctgtcccaagctgtcgaggaggtgacagaacgggatcatccgctggttcggccggatagatctctcagagagaaactcgtcaagatgcttgtggaactgttaactaatcaggtaggagaaaaaatggtcgtcgtgcaagctctgcgtctcctctacctgctcatgacaaaacatgagtggcgcccgctctttgcacgtgaaggcggaatttacgccgtgctggtatgtatgcaggagtacaagacctctgtgctggtgcagcaagctggactagccgcattaaagatgctcgccgtagcctcatcctcggaaatacctactttcgtgactggtagggacagtatccacagcctgttcgatgcacagatgacacgggagatcttcgcaagcatcgattccgctacccggcccggctctgagtctctcttacttaccgtgcctgcggccgtgatccttatgcttaataccgagggttgttcctctgccgcccgaaatgggcttctactattaaacctgcttctgtgcaaccaccatacactaggcgaccaaattataacgcaggaactccgggatactctttttaggcactcaggcattgctccaaggacagaacccatgcccacgactcgtacaatcttgatgatgctgctgaaccgttatagcgaaccccctgggtcgccagaacgagccgccctggaaacccctataattcagggacaggatggctcaccagaattactgatccgctcattagttgggggacccagcgcagaactcctgcttgatttagagcgtgtcctgtgcagagaaggtagtccgggcggtgccgtccgcccccttttgaagcggcttcaacaggagacccagcccttcctgctgctgctgcggacactggacgctccaggccccaacaagaccctgttgctttcagtcctgcgggtcatcacccgcctattagattttcctgaggcgatggtgttgccgtggcacgaagtgttggagccatgcctgaactgcctgagcgggccaagctctgattcagagatcgtccaagagctgacttgttttctgcaccgcctggctagcatgcacaaggattacgctgtggtcctatgctgcctcggggccaaagagattctgtccaaagttcttgataaacactctgcacagcttttactcgggtgtgagctgcgtgatttggtcaccgagtgtgaaaagtatgctcagctctactccaacctaacatctagcatcctcgctgggtgcattcagatggtgctgggccagattgaggaccatcgtcgtactcaccagccaatcaatattccctttttcgacgtttttctccggcacctttgccagggcagctctgtggaagttaaggaggataagtgctgggaaaaggtggaggtgtcctccaacccccatcgagcaagcaagctaactgaccataatccgaagacatactgggagtctaacgggagcaccggatcacactatattacccttcacatgcacaggggcgtgctggtgcgccagctgacacttctggtggcttcagaagattcgtcttacatgcccgctcgggtggttgtctttggcggggactcaacaagttgcatcggtactgagctgaataccgtgaacgtgatgccaagtgctagtcgggttatacttctggagaatctcaatagattttggcctattatccaaattcggatcaaaagatgtcagcagggcggcatcgacactcgtgtgcgcggcgtggaggttctcggcccgaagcctaccttttggccgctatttcgggagcagctatgtcgtaggacatgtctcttttatactatccgcgcacaggcatggagccgagacatcgcagaggatcatcgtagactgcttcagctctgtccgcggcttaatcgcgtgctgcgacacgagcagaattttgctgaccgctttctgccagatgatgaggccgctcaggccctgggcaaaacgtgctgggaggcactggtttctcccctcgtgcagaatataacctcgcccgacgcagagggagtgagtgccttggggtggttgctcgaccagtacctggagcaacgggagaccagtcgtaatcccttaagcagagccgcttcttttgcatcacgcgtgcgaaggttgtgtcatctgctggttcacgttgagccaccacctggccctagtcctgaacccagtacacgtccgtttagtaagaattcaaagggccgcgaccgaagcccggcaccgtcaccagtgttgccctccagctccctccggaacatcacgcagtgttggctgagtgtagtgcaagaacaggtcagtcgatttttggcagcggcatggagagcccccgactttgtacctaggtattgcaagttgtacgagcacctgcaaagagccggctccgagctcttcggcccccgcgccgcctttatgctcgcgctgcggagtgggttctccggagctctgctgcagcagtccttcctgactgctgcgcacatgagtgagcagttcgcccgttacatcgaccagcaaatacagggtggactgatcggcggtgccccaggagtagagatgctgggacagttgcagcgccacctggaacccatcatggtgttatcaggactggaattggcaacgacatttgagcatttctaccaacactatatggcagacagactgttgtcttttggctcttcatggctagaaggggccgtgctggaacagatagggctgtgctttccaaacagacttccgcaactaatgttacagtcattatctacttctgaagagctccaaagacagtttcatttgttccagctgcagagactggataagctatttttggagcaggaggatgaggaagaaaaaaggctcgaggaagaagaagaggaagaggaggaggaggaagcagagaaggaattgtttatcgaggacccaagccccgcaattagtatactggtgctgagccccaggtgctggccagtgagccctctttgctacctgtatcaccccaggaagtgcctgccaaccgagttctgcgatgccctggacagatttagttctttttactcccaatcacaaaaccacccagtgctcgatatgggtccccatagacgcctgcagtggacttggctcggcagagcagagctccagttcggcaaacagattctgcacgtatctacagtgcaaatgtggctgctgctcaagttcaaccaaaccgaggaagttagcgtggagacactcttaaaggactccgatctgagtccagaattgctgcttcaggccctcgtgcctctcacgagcggcaatggcccgttgacgctgcacgagggtcaggacttcccgcacggcggagtcctccgattacacgagcctggcccacaaagaagcggcgaggctctctggctgatacccccacaggcttacctgaacgtggaaaaggatgaaggtcgcactctcgagcagaagcgaaacttactgtcatgcttactggtacgcatcttgaaggcacatggcgaaaagggcttgcacattgaccagcttgtgtgtttggtgctggaggcctggcagaagggccccaaccctcccggcactctgggacataccgtcgcagggggagttgcgtgcaccagcaccgacgttctgtcttgcattcttcatctgttaggtcagggatacgtgaagaggagagacgataggccacagatcctgatgtacgctgcgccagagcctatgggaccctgtaggggacaggcagatgtgccattctgtgggagccaatcagagacatctaagccctctcctgaggcagtggctaccctcgcttcactccagctgccggcggggcgcacaatgtctcctcaggaagtcgagggtcttatgaagcagacagtgcgacaggttcaggagacactgaacctggagccggacgtggcccaacatctgcttgcacatagccactggggcgctgagcagctcctgcagagctatagtgaggatcctgaaccgctgctcttagcagcaggtctgtgcgttcatcaggctcaggctgtgcctgtgagacccgaccattgccccgtgtgtgtgagccccctggggtgtgatgatgacctacctagtctctgctgcatgcactactgctgtaaatcctgttggaatgagtatctcacaacacgtatagaacagaacctggtactcaactgtacatgtcccatcgctgactgtcccgcccagcccacaggagcatttataagagcgatagtaagttcaccagaagttatcagtaagtatgaaaaagctttgctccgaggctatgtcgaatcctgttccaaccttacatggtgcacaaacccacagggctgtgataggatcctttgccgccaaggcctggggtgcggcaccacatgttcaaagtgcgggtgggcatcctgctttaattgtagtttccctgaggctcattatccggcatcctgtggtcacatgagccagtgggtggacgatggagggtattatgatggcatgagtgtggaagcacaatccaaacacttagccaaattgatttccaaaaggtgtccgagttgccaggccccgatcgaaaaaaatgaaggatgcctccacatgacatgcgccaagtgtaaccacggtttctgttggaggtgtctgaaatcctggaaacccaatcacaaagattactacaattgtagtgcaatggttagcaaagcggccagacaggaaaaaagatttcaggactataatgagaggtgtaccttccaccatcaggctagagaatttgcagtgaatctccggaatcgagtgtccgcaatacacgaggtcccgcctcccagatctttcaccttcttgaatgacgcgtgccagggactcgagcaggcgaggaaagtattggcctatgcatgcgtttacagcttctattcacaggatgccgaatacatggacgtggtggagcagcagaccgagaacttggagcttcacactaatgcactgcaaattctgcttgaagagaccctcctccgttgtcgcgatctagcttctagtcttcgcctccttcgtgctgactgtctgtcaacgggaatggaacttctgagacgtattcaagagaggctgcttgccatcctgcagcactcggctcaggacttccgggtgggtttacagagccccagcgtagaggcttgggaggcaaaaggccccaatatgcccgggagccagcctcaggcctcctcaggtccagaagcggaagaggaagaggaggatgatgaagatgacgtgcctgagtggcagcaggacgagttcgatgaagagttggacaatgattctttttcctacgacgagagcgagaatttagatcaagagacatttttttttggcgacgaggaagaggatgaagacgaggcctatgactag

SEQ ID NO: 13856 - DNA, 1476 bp, synthetic construct
  source 1..1476: mol_type = other DNA; note = Synthetic coding sequence
atggaagaaattccggcccaggaggctgccggatcccctagggtccagttccagagcctcgaaacccagtctgagtgtctgtcaccggagcctcagttcgttcaagacaccgatatggagcaaggcctcactggtgatggggagactagagaggaaaataaactgcttatcccaaaacaaaaaatttccgaggaagtccacagctataaggtgagagtgggacggctgaaacatgatatcacacaggtcccggaaacccgcgaagtctacaagtccgaggatcgtttggagagactccaggagatcttgcgcaagttcctctatctggagcgggagttcaggcagatcaccattagtaaggaaacgtttacatcggaaaaaaataacgagtgccacgaacctgagaaatcattcagccttgactcaacgattgacgccgaccaacgcgtgttaagaatccagaatacggatgataacgataaatacgacatgagcttcaaccaaaacagcgccagcggaaaacatgagcacttgaacttgaccgaagactttcagagcagtgaatgtaaggaatccctgatggatctgtcccacctgaataagtgggaatcgatccccaacacagagaaatcctataagtgcgacgtgtgcgggaaaatcttccaccagagctctgccttaactcggcaccagcgaattcatacccgggagaagccgtataagtgcaaggagtgtgaaaagtctttttcccagagctccagtctgtcacggcataagcgaattcatacccgcgagaagccatacaagtgcgaagcatcagataagtcctgcgaagcttctgacaaaagctgtagtccttctagtgggatcatccagcataagaaaatccatacccgcgctaaatcctacaaatgtagttcatgcgagagggtgttttcgagatcagtgcacctcactcagcaccagaaaattcataaagaaatgccctgtaagtgtacagtgtgtggaagtgacttttgtcacacctcttacctcctggagcatcagagagtccatcacgaggaaaaggcctatgagtacgatgagtacggcttagcatacataaaacagcagggcattcatttccgcgaaaaaccatacacctgttccgaatgcggtaaagatttccgtctgaattcccatctaattcaacaccagagaatccataccggggaaaaggcccacgagtgcaatgaatgtggtaaggctttttcccagacctcgtgcttaatccagcaccacaagatgcacaggaaagaaaaaagttacgagtgcaatgaatacgagggttctttctcccacagtagcgacctcatcctgcagcaggaggtgctcacgagacagaaggcattcgactgtgatgtgtgggagaagaatagcagtcagagggctcacttagtgcaacaccaaagcattcatacaaaagagaattcttag

SEQ ID NO: 13857 - DNA, 2709 bp, synthetic construct
  source 1..2709: mol_type = other DNA; note = Synthetic coding sequence
atgtctgaattccggatccaccacgacgtgaatgaactgttaagtctactgcgcgtgcacggaggggatggggcggaggtgtacatcgatctcctccagaaaaaccgcaccccgtatgtcactaccaccgtgtctgctcattcagcgaaagtgaaaattgccgaatttagtcgcacacccgaggacttccttaagaaatacgatgagctgaagagtaaaaatactagaaacctggatcccctggtgtatctgctgagcaaattaactgaggacaaagagacccttcagtacctgcaacagaatgcaaaggagcgggctgaactagcggccgccgccgtgggctcgtctacaacctctattaatgtcccggcagcagcaagcaagataagcatgcaggaactcgaggagctgagaaaacaactgggatctgtggcaaccggcagcactctgcagcagtctctcgagctgaagcgaaagatgctccgagacaaacagaataagaaaaacagcgggcagcatttgcctatatttccggcgtgggtgtatgagagacctgctcttataggagacttcctcattggcgccgggatcagcacggacacggcactacctatcggtaccctcccgctggcgtcccaggagtccgccgtggttgaagacttgctgtatgtgcttgttggcgtcgacggcaggtatgtttccgcccagccactggctggacgacaatcccggaccttcttagtagacccaaaccttgatctgtccatccgggaactggtgcatagaatcctgccagtcgctgcctcgtatagcgcagtgacaagatttatagaggaaaagagcagcttcgagtacgggcaagtgaatcacgccctggctgcagctatgcgcactctagtgaaggaacaccttatcttagtgtcccaactggaacagctgcacagacaaggactgctaagccttcagaaactttggttctacatacagcccgccatgaggacgatggacattttggcatccctagccacaagtgtcgacaaaggcgagtgcctaggcggcagcacgcttagcctgctgcatgataggtcattcagttacacaggagactctcaggctcaagaactgtgcctttatctcaccaaggcggcgagtgcaccgtactttgaagtgctggagaagtggatctatagagggatcattcacgatccttattcagagtttatggtcgaggagcatgagctccgaaaagagcgaatccaggaggattacaacgataagtactgggatcagcgatacacgattgtccagcagcaaatcccttccttcctgcagaaaatggccgacaagattctctcaaccgggaaatacctgaacgtggtgagagagtgcggccatgacgtgacttgcccggttgccaaggaaatcatttacacattgaaggagagggcctatgtggagcagatcgaaaaggccttcaattacgcttcaaaggtattgctcgattttctgatggaagaaaaagagcttgtagctcatctccgctctattaaaagatacttcctcatggaccaaggggactttttcgttcacttcatggatctggccgaagaagaactgaggaagccagtggaagacataacaccccctcgcttggaggccctcctggagttagctctgaggatgtccacagccaataccgatccctttaaagacgacctgaaaatcgatctgatgccacacgatcttatcacccagctcttaagggtgctggccatcgaaaccaagcaagaaaaggctatggcccacgcagaccccacagaattagcactttcaggactggaggcattttctttcgactatattgtaaagtggccgctctcgcttatcatcaatcgcaaggcactgaccaggtaccaaatgctcttccgacatatgttttactgcaaacacgttgagcgacaactttgtagcgtctggataagcaataaaactgccaagcagcattccctgcacagcgcccaatggtttgcgggcgctttcacattgcggcagcggatgctgaactttgtgcagaatatacagtactatatgatgtttgaagtgatggagcctacctggcatatcctggaaaagaatctgaagagtgcatcaaacatcgatgacgtactggggcatcacactggcttcttggacacctgtttgaaagactgtatgctcacaaacccagagctgttgaaggttttttccaaattgatgagcgtgtgcgtgatgtttaccaactgcatgcagaaatttacgcagagtatgaagctggacggggagctaggcggccagactctggaacacagtacagtgctgggcttgcccgctggagccgaagagcgtgctcggaaagagttggcacggaagcatttggctgagcacgccgatacggtgcagctcgtgtcgggctttgaggccacaatcaataaatttgacaaaaactttagtgctcacctactggatctgctagcacggctgagtatatactcaacgtcagactgcgaacatggtatggcctccgtgatctccaggttggatttcaatggcttctacaccgagcgcttagaaaggctgagtgcagagagatctcagaaagccacacctcaagttcccgtgctcagagggccccctgcaccggcgccaagagtcgccgtgactgcgcagtag

SEQ ID NO: 13858 - DNA, 2289 bp, synthetic construct
  source 1..2289: mol_type = other DNA; note = Synthetic coding sequence
atggcaatgcaggagaagtaccctacggaagggatcagccacgtgacatcccccagttcagacgtgatccagaagggtagctctctgggaaccgaatggcaaacacctgtgatttctgagcccttcagaagccgtttctcccgctgcagctccgtggcagactccggcgataccgccatcggcacgtcatgttctgacatagccgaggatttctgcagcagcagcggatcaccaccttttcagcccattaagagtcacgtcactattccgactgcccatgtcatgccaagcaccttggggaccagccctgccaaacctaactcaacaccggtcggcccatcgtccagtaagctgcccctctccggccttgccgaaagtgtcgggatgacacgtaacggggacctgggtgccatgaagcactctcctggactatcgcgcgacctgatgtatttcagcggagctaccggagagaatggtattgagcagtcctggttccccgcagttggacacgaacggcaagaagaggcacgcaaattcgatattcccagcatggaaagtaccctcaaccagagcgccatgatggagactctgtactccgatccacatcaccgagtcagattccacaatccacgcacaagtacaagtaaggagttatatcgggtgcttcctgaagccaagaaagcaccggggtccggcgccgtgtttgagagaaacggcccacactctaattcatctggggtactgcccctggggctgcaaccagctccaggactcagcaaaccccttccatctcaagtgtggcaaccatcccccgatacctggcatccacgcgaacagtcctgtgaattaagtacctgtcgacagcagctcgagttaatccggttgcagatggagcagatgcaattgcagaatggagctatctgccaccacccagctgctttcggcccctccctgccaatcttggagccggcacaatggatctctattcttaattccaatgaacatctgttgaaggaaaaagagctgcttatagacaaacagagaaagcatatttctcagctagaacagaaagttcgtgagagtgagttacaggtccatagtgctctgctgggccgaccagccccgtttggagatgtttgtctgctgcggttacaggagcttcaacgtgagaacacgtttctaagggctcaattcgctcagaaaaccgaagcactgtccagagaaaagatagacctggagaagaagctatcagcgagcgaagtggaagtgcagctcattagggagagtttaaaagtggcacttcagaaacatagcgaggaggtgaagaaacaggaggagagggtgaaaggacgcgataaacatataaacaaccttaaaaaaaaatgtcagaaagaatccgaacagaatcgagagaagcaacagcgaatcgaaactcttgagcgctacctggcggacttgcccaccctcgaagaccatcaaaagcagtcacaacaactaaaggattcagagctgaagagtaccgagctgcaggaaaaggtcaccgagcttgagagcctgctggaggagacccaggccatttgtagggagaaggaaatacagctggagagtcttaggcagagagaagctgagttctcctctgctggccattcgttgcaggataaacagtccgtggaggaaaccagtggggagggcccagaggttgagatggagagttggcagaaaaggtacgacagtctgcagaagatcgtggagaagcagcagcagaagatggaccaattaagatcccaggttcaaagcttggagcaagaggtcgctcaggaggaaggaacttcacaggccctccgggaagaagctcaacgaagagacagtgcgctgcagcagctccggacagcagtaaaagaattgtccgtccagaatcaggatcttatcgagaaaaacctcaccttgcaggagcacctccggcaggctcaaccgggctctccacccagcccggacaccgctcagctggccctggagctccaccaagaactcgccagctgcttacaggacctccaggccgtgtgtagcattgttacacagcgggcccagggccatgacccaaatctttctttgctactgggtatccactccgcccaacatcccgaaacccaacttgatttgcagaaacctgacgttatcaaacgaaagctcgaagaggtccaacagttgcgaagagatattgaagatctgcgaaccaccatgtctgacaggtatgcccaggacatgggagagaattgtgtcactcaatag

SEQ ID NO: 13859 - DNA, 1443 bp, synthetic construct
  source 1..1443: mol_type = other DNA; note = Synthetic coding sequence
atgattgtcgcggactccgaatgtcgcgccgaactgaaggactacttgcggtttgcccccggcggggtaggtgattccggaccaggggaggagcaacgggagtccagagcccggagaggcccccggggaccctcagccttcattcctgttgaagaggttcttagggagggagctgagtcactcgagcagcacctggggctggaagcgttgatgtcctcgggtagggtcgacaacctcgccgtcgtgatgggcctgcaccccgactatttcacttcattttggcgccttcactacctattgttgcatacggatggcccactcgcttcctcgtggagacactacattgcaatcatggccgctgcacggcatcagtgcagttatctggtgggatcacacatggccgagtttttgcagaccgggggcgatcccgaatggctcttggggctgcatagggcccccgagaaacttagaaaactgagtgaaatcaacaaactgctagcacatcgaccttggttgattaccaaggaacacatccaggccttattgaagactggagagcacacatggtcactggccgagctgattcaggcattagtcttgttgacacattgtcactcattgtcttctttcgtgtttggctgtggcattctgcctgaaggagacgctgacgggagtcccgcaccacaagctcctacgcctccatctgaacagtccagccctcccagtcgcgacccactgaacaattccggaggattcgaatctgctcgcgacgtcgaggccctgatggagcgcatgcagcaattgcaggaatccctgctccgggatgagggcacctctcaagaggaaatggaatcgcgctttgaacttgagaagagtgagtctttattggtcacaccgtccgcagacatattggagccctctccccaccccgatatgctgtgcttcgtggaggaccccacttttggctatgaagactttacacgtagaggtgcgcaggccccacctacgttccgggctcaggactatacctgggaggaccacgggtattccctgattcagagattgtaccccgagggcgggcaactgctggacgagaaattccaggctgcctattccctgacctacaacacaatcgcaatgcatagtggagtggatactagcgtgcttagacgcgccatctggaactatattcattgtgttttcggaattcgctacgatgactacgactatggggaggtgaatcagttgctcgagagaaaccttaaagtgtacattaaaaccgtcgcatgttaccccgaaaagactacacggcggatgtataacttgttctggcggcatttcaggcacagtgaaaaagtgcacgtcaatctgctgttactcgaagcaagaatgcaggcagccctcctttatgcgctaagagcgattactaggtacatgacttag

SEQ ID NO: 13860 - DNA, 633 bp, synthetic construct
  source 1..633: mol_type = other DNA; note = Synthetic coding sequence
atgccaggagtgaaactcacgacacaggcctactgtaagatggtcctccatggggctaaatatccgcattgcgccgtcaatgggctactcgttgccgagaaacagaagccccgcaaggagcacctgcccctggggggcccaggcgcccaccacaccctcttcgtggactgtatccccctgttccacggtaccctcgccctggcccctatgttggaggtagctctgaccctcattgacagttggtgcaaggatcactcttatgtgattgctggatattatcaagcgaatgagcgcgtcaaagatgcatcaccaaatcaggtcgccgaaaaggtcgcttcaagaatcgccgagggcttttctgatacggcattgataatggtggacaacacaaagttcacgatggactgtgtggcgcctactatccacgtctacgagcatcacgagaaccggtggcggtgtcgcgatccgcaccatgattattgtgaggactggcctgaggcccaacggatttccgccagcctgttggactcaaggtcctacgagaccctcgtggattttgataatcacctggacgatatacgtaatgactggacaaaccctgaaataaataaagcagtcctgcatctttgttag

SEQ ID NO: 13861 - DNA, 1059 bp, synthetic construct
  source 1..1059: mol_type = other DNA; note = Synthetic coding sequence
atgaccgaggccgggaagctgccactccccttaccccctaggttagactggtttgtacatacacagatgggacagttggcccaggacggagtccctgagtggttccatggagccatcagccgtgaagatgccgagaacctgttggagagtcagccactgggctcgtttctgattcgtgtctctcacagccacgtggggtatacactctcttataaggcccaaagttcatgctgccactttatggttaagttgttggacgacggcaccttcatgattcccggggaaaaggtggcccatacatcgctggacgccctggtgacatttcatcagcagaagcccatagagcctagacgggagttactcacccagccatgccgccagaaggatccagccaacgtggattacgaggacctgtttctctactcaaatgctgtcgccgaggaggccgcatgtcccgtgagcgctcctgaggaggcaagtcctaagcccgtgctgtgccatcaaagtaaagagaggaagcccagcgccgagatgaaccgtattacaactaaggaggcgacaagctcgtgtccgcccaaaagtcctcttggagaaacccgccagaagctctggcgatcattgaaaatgttaccagagaggggccagcgtgtacgccagcagcttaagtcccacttggctactgtgaacttgagttccctattggatgtcagacggagcacagtcatctcgggaccaggaaccggtaagggctcccaggatcatagtggcgatccaacctctggggacaggggatatacagatccctgtgtagcgacctccttgaagtccccttcacagccacaggcaccgaaagatcgcaaggtgccgacccggaaagccgagaggtccgtgtcctgtatagaggtgacccctggtgaccgtagctggcatcagatggtagtcagagccctctcgtcacaggaatctaagcctgaacaccagggacttgccgaacctgagaatgaccagctccccgaagagtaccagcaacctcccccattcgcccctggatattgctag

SEQ ID NO: 13862 - DNA, 480 bp, synthetic construct
  source 1..480: mol_type = other DNA; note = Synthetic coding sequence
atgacacactgttgcagcccctgttgccaaccaacctgctgccgcactacgtgctggaagcccaccaccgttactacttgcagctcaacaccgtgctgtcagccaagttgttgtgtgagctcctgttgtcaaccgtgctgtaggcctacctgttgtcagaatacctgttgccagcccatttgtgtgacctcctgttgccaaccctcctgttgtagtactccctgctgtcagccaacctgttgcgggcaaactagctgcgggtcaagctgcggacaaagttccagttgcgctcctgtctactgtagacgtacctgttaccacccgactactgtatgcctgcctggttgcttgaaccagtcctgtggtagcaattgttgccagccatgctgtcgtccagcctgctgcgaaactacttgttgccggaccacttgttttcagcctacatgcgtctcctcttgctgtcagccatcttgctgctag

SEQ ID NO: 13863 - DNA, 615 bp, synthetic construct
  source 1..615: mol_type = other DNA; note = Synthetic coding sequence
atggaccccaaagacagaaagaagatccagttcagtgttcctgccccacctagtcaactagatccacgacaggtggaaatgatccgccgacggcgccccacgcctgcaatgctctttcgactcagtgagcattcatcgcccgaagaagaggcctccccacatcaacgtgcatctggggagggccatcatctgaaatccaaacgtcccaacccatgtgcctacaccccaccgagcttgaaggccgtccaaaggatcgccgaatcacatttacagtccatctcaaacctgaacgagaaccaggcttctgaggaagaagatgaactgggggagctgcgggaactgggctaccccagggaggaagatgaggaggaggaagaagatgatgaggaggaggaggaggaagaagatagtcaggctgaggtactcaaagtgatacgtcaatcagccggacagaagacaacctgtggacagggattggaaggaccttgggaaaggcctcctccgctcgacgaaagtgagcgtgacggggggtctgaggatcaggtcgaggacccggctttatcagagccaggggaggagccacagcggccctccccttcagagcctggaacctag

SEQ ID NO: 13864 - DNA, 2061 bp, synthetic construct
  source 1..2061: mol_type = other DNA; note = Synthetic coding sequence
atgaccgatgccctcctccctgccgccccccagcccctggagaaggaaaatgatgggtattttcggaaaggatgcaaccccctggcccagaccgggcggagtaaactccagaaccagagagccgcacttaaccagcagatccttaaggcagttcgcatgcgcactggagctgagaatctcctgaaggttgccacaaatagcaaggtgcgggagcaggtgcgattagagttatcctttgtaaactccgatctacagatgttgaaggaggagttggaggggttaaatattagtgtgggtgtataccagaatacagaggaggcttttacgattccattgattccactgggattaaaggagaccaaggatgtcgattttgctgtggtcctcaaggattttattctggaacactacagtgaagatggctatttatatgaagatgagatcgcagatctgatggatctaaggcaggcctgtcggacgccatctcgcgatgaggctggcgtggagctgttgatgacatatttcattcaactcggctttgttgagtccagatttttccctcctacgagacagatggggctactcttcacatggtatgactcccttaccggtgtgcctgtgagccaacagaatctgctgctggagaaggcatcagttcttttcaacactggggcactgtacacgcaaattggcaccaggtgtgaccgccagacacaggcaggcctagagtcagccattgatgcatttcagcgggctgctggcgtcctgaactacctgaaggataccttcacacacactccttcttacgatatgagcccggccatgcttagtgtgctggtcaaaatgatgcttgcccaggctcaggaatccgtcttcgagaagatctccttacctggaatccgcaacgagttcttcatgttggtgaaagtcgcccaggaggccgctaaggtcggtgaggtgtaccagcagctccatgccgcaatgtcccaggcacccgtcaaggaaaatatcccctatagctgggcgtcactcgcctgcgtcaaagctcaccactacgcagcgcttgcgcattacttcactgcaattctgctgatagaccaccaagttaaacccggcactgatttggatcaccaggaaaaatgccttagccagctctacgatcacatgccagagggactgactccgttggccacactgaagaacgaccagcagagaaggcagctcggcaagtcacatttgcgaagagctatggcacaccacgaagagtctgtgcgagaagcctcactctgtaagaagcttagatctatcgaggtccttcagaaagtgctgtgcgcagcacaagagcggtcaaggctcacatatgctcagcatcaggaggaggacgacctgcttaatctcattgacgcgccatcagtggttgcaaagacagaacaagaagttgatattatactcccccaattcagcaagttgaccgttacggacttttttcagaagctcggacctctgtcggtgtttagcgccaacaagaggtggacaccacctcgcagcatcagattcacggcagaagaaggggacttgggctttactctgcgaggaaatgctcccgtccaggttcactttctggatccctattgtagcgcctctgtcgccggtgccagagaaggagattacattgtgagcatccagctggtggactgtaaatggttaacactttccgaagtcatgaagctgctgaagtcttttggggaggacgaaatcgagatgaaagtcgtgagtctgttggatagtaccagcagcatgcataacaaaagtgccacatactccgttggtatgcagaagacctacagcatgatctgccttgctattgatgacgacgacaagacagacaaaactaaaaagattagcaagaaactaagcttcctcagttggggcacaaacaagaaccggcagaagagtgcaagtacactatgtctcccctctgtgggggccgctaggccacaggtgaagaagaagctgccttcgccattttccttactgaattctgattcaagctggtattag

SEQ ID NO: 13865 - DNA, 1254 bp, synthetic construct
  source 1..1254: mol_type = other DNA; note = Synthetic coding sequence
atgcccctgtatgagggccttggctccggaggggagaagaccgctgtggtgatcgacctgggcgaagctttcaccaaatgtggcttcgcgggagagactggccctcgttgcataatacccagcgtgatcaagcgtgctggcatgcccaaacccgtgcgtgtggtccagtataacatcaacacggaggagttgtattcctatctaaaggagtttatccacatcctgtatttccggcaccttctggtaaatcctagggacaggcgcgtcgtgattatcgagtccgtgctgtgtcccagccattttcgagagacgcttacacgggtgctgttcaagtactttgaggtgccctcagtactgctcgcgccatcacacctgatggcgcttttaacactcgggatcaactccgcaatggtgctggattgcggatatagggagagtctggtgttgccaatttatgaagggattcctgtgctgaattgctggggtgccctgcctctgggcggtaaagccctacacaaagaactggaaactcaactactggagcagtgtactgtcgatacttctgtggcgaaagagcagagtttgcccagtgtcatggggagcgtgccagaaggggttctagaggatatcaaggctagaacctgtttcgtcagtgatctaaagcgcggcctgaaaatccaggcagctaaatttaatatagacgggaataacgaacgaccgtccccccctccaaacgtggattatcccctggacggagaaaagattctgcacatcctgggaagcatccgggattccgtcgttgagatactgttcgaacaggataatgaagaacaatctgtggccactctcatcctggattcacttatccaatgccccatagacacgcgcaaacaacttgccgaaaacctggttgtgatcggaggtacctctatgctgcctggttttctccacaggttgctggctgaaatacgatacctggtggagaagccaaagtacaagaaagccttagggacgaagactttccggattcacactccccccgctaaagctaattgtgtggcatggcttgggggagccatcttcggcgcgctccaggacatactggggagtaggtccgtaagcaaagaatactacaaccaaacaggccggatccccgattggtgtagccttaacaacccacctctggagatgatgtttgacgtggggaagacgcagccccctttgatgaaacgagcctttagcaccgagaagtag

SEQ ID NO: 13866 - DNA, 2643 bp, synthetic construct
  source 1..2643: mol_type = other DNA; note = Synthetic coding sequence
atgtctcaacctgcagggggtcggcgcaagccaagaacactcgggccacctgtgtgctcgattagaccctttaagagctcagagcagtatctcgaggcgatgaaggaagacctcgccgaatggctaagagatctgtacggacttgatatagacgccgcaaactttctgcaggtcttggagacaggattggtgctctgtcaacacgccaatgtggttactgacgcggccttggcatttctcgcggaagcaccggctcaagctcaaaagatcccgatgcctagggtgggagtgagctgcaatggtgccgcccagcctggcacctttcaggcccgcgataacgtcagcaatttcattcagtggtgccggaaggaaatgggaatccaggaagtcttaatgtttgaaaccgaagacctcgttttgcgcaaaaacgtgaaaaatgtggtcctgtgcctgttggaactaggccgtcgggcctggcggttcggcgtagctgctccaactctggtgcagctagaggaagagattgaagaggaagtccgaagagagctggcattgccaccccctgaccccagccccccagccccgcccaggagacagccctgccattttcggaacctcgaccagatggtccaatcactggtgtctcattgcacctgccctgtgcagttctcaatggttaaagtctccgaggggaagtatagggtgggggatagtaacactttgatctttatccgtatcctgaggaatcacgtgatggtgagagtagggggaggctgggatacactaggacattacttagataaacatgacccttgtaggtgtacctccctcagccacaagccaggatctttcctgaagcccccagcgcccccagtgcagcatgaagtaagggtgcaagacggtccgtctcagacccaaccaacaatgacaattagtcgcagtcaaagccccccaccacctgtcgactggaagacctatacctcttcagaccgacgcctgagaccacccactccttcgtcccccagacctagaagggagcggggggccggtactggcgcctccagggagatggcaccctttttgcgctgtcaggagcgaagcctaatcccaagttggaggcagcccacagccggagacagccctccttctcctcaatcaagcagtactcaaaaggggagagaccctcagtgcacctcctctggcaagagggaggaacgctacccacctgagctgccgagagggcgcatccccaccagttgggtgcatgaagaaaccgattcctggggtacagatgctgggaatcccacaccccagcgcctgcgagcaattgaggcaaccacaaagggcatttctgcacgggggccaagtccactccctaggtcctttggaccagcggagtgtcttggcttgcgcttgcccttacgcgacgaagccaaaggcgctttttttcaatttagagagccggagagcgtcaggagcccaacccctgtgcagggcctgactaagatacccataaggctaccccctgcaaggccaccaacccctggaaggagtttccctggcgcaacctctggcagcccaaggacagagcttggacgtgatcctatcccacttcgcgctgttactgtcgatctggcaggcagcacccatggcgactgttctgttgaggtgcggcaagaggatcagcagcttgacatacaggtcatggccgaagcacgggagagttgggacctcggcttgcaggagcaggagggcaggtatacccctctacccctcggaggaaacaaagagcaagctatctactgtagcctggaggaggaaatcctggggaacatgaagcttcttgaggttcggagcgcatgtcctcagggcacacgatcaggggtaatcccccgttctggtgtgtatattccccgtcttgcaggccagtggcctgagccaggcggaccatatgataaagcaatccaggaactggcacagggctctccatcccttctcaaagttgacctggaggcctggaaggctgctcctaccggctcccctaagcccgccgtgacgcccggacccggatccctgaaaggaaaattgggcgcaaggcagagcgggcctcggaccaaagcgtccctgtcagccaagggcacacacatgagaaaggtgcctcctcagggcggccaggactgtagcgcctccacagtttcagccagtcccgaagctcctaccccttccccccttgaccccaattctgacaaagctaaggcatgcttgtcaaaagggagacgaacactgcgcaagccaaagagagtgcccagtatctataagctgaaactgcgcccaaggattcgcccacggcgtgaccaccgacctgagaagcaaccaagcaggattcctagacctctggcctacgtgtttctgggaccagctcgccagccacctaaagaccgactcctgagagcggtgctgggatctaaaggaggcgaagcctctagggtggacggggcttccgtaggtgaggaggaagaagagggaaaggaagagaaagagcccgcagcccccctagagagcagcccacagccccccgagggactgcagccacactggctgaaccaggctccactccctcctgaggaagaaagctgggtctag

SEQ ID NO: 13867 - DNA, 14262 bp, synthetic construct
  source 1..14262: mol_type = other DNA; note = Synthetic coding sequence
atggtgccggaggaacgaagggtcggcctgtcgagcgatgaaacctcttctgactccctgaaatcatggcattctatctgcgtgctggattccaaagagcaacctctggcttgtcagcagaaacaaaggcaatttgtcaagcctgtgaccgagtccgaacagcctactgtacttgagctgctgttagctgagcttcgcactcttttctccgccgttctgcaggacagttctcccgcagcctggcggtacctgcacgccgttctgggactactgcctccttaccgagaactcctggtgggccatctggacctgcttccctttttggagcaactctattgttgggcaccctgggtacagacccatctgcatctcgatctgctcggcgccatagtacaggcgttccctccagactctagtctgttggattcagcctctcacgcagattgttgcccacagaaacgaaggttacaccatcggcctccttgccctgcatgtcccttcgtgcaagcccaatggtcaaggcagcaggtaaaggaggagctggcaacgtggctgagaccattgacgcttccagagctgcagcgctgtctcgggatcgtgggagcccaagtggcacttgaggaagcagtatggctggatggtttgagtttgctaccattagctctggccgccgatattccagtgaggtacgagtcttcagacaccgacaatgcagaggtggagccagtgggccgtaaagaaacaaggtcccagctggactatgaggtgccaagggagaaagcattccaaaagtcttcaacggggttcagtccagagacaagcttcctagattcacaggtgatgacggccctgaagatggagagatacctaaagaagatccactttctgtacttgaatgtggcccctagtagatattttagaccttacagtttgatggtggtgcctcccgacaaagtgaatccggagcactatattttcagtccctttggaatcctacacgtgcatccagtcgagggatcggagactatgacattgggaacttggcaccaccactgcgtattatggcaacagttacagtttatcccttttttcaagtactgcctgcttcgcaaaagttttacgtgttggaaaaaaaacgtgagactgcagggccttcatagattgcagaagttcctcgaaaaccatttactgctggcagtgcctcatttcggagcagggttgcttcacatttcccgccttttgcaagaattgcattcggtctcttggctgccacaggagctggatagatgttacgagttgttagatttgcagacagcgctggctgaggaaaagcacaaggccttgagactgctccaccggtgccttaacctttgcacgagtatactaagacttgttcacgaagatacctatcatatgcagcagtgtctccaggaaagagtccaaaattgtgacaggattcgtacgggccagggatccatctatctacagagggtgcagcataaacagctcgaacagaagctcaaacaggctgaggcctggtggctgcagctgggaaagtttgcgcggcttgtggactatatgatctgccagtcgctgattagcgtgttagaagagcagattacttcctttgtggctaacatcctacaagcccccagacagaagccatttcttagctcacagctggtgttcgatgaccatggccagctgtctcacgtcccatgtgtggagaacatgatccagaccctcactggcggcctccagtccgtcaaaacaagtgccttgcaggtggtacagagcgccgatttgaagacttccagcgattcactgtactctgaagaggaagatgaggaggaggattcaaaagacgaattccttatgcccaaattccaaggccaacctagtgatgctgtctctattttctgtggcccaaacgtggggctcgtttggccgtggaagtcgcaccccattgcaggtatcctcgaggtcagaggttgtaggctgagagggcagtatttcccacacaactataagcaattggaggaggatctagacaataatccaaaaatccagcaggcactgaacattcagcaggtgttgctagaaggtgtgctctgcaaggtacaggagttttgtcgtgagcatcactggataactggaatctacgaatttctgcagagttggggaccacagaagctggaagacatgagagggggccccatcaaaaattacgtgacgctggtgtcaaggctcaatgtttggcaggcaagagtgtccagcatgccaattgagctgctcacaaaagggggccttctcctgctgtcgtgtcacgacgtgcaggcggaaatggagtccaaactgaatagcatccggaaagacatactggctcatgtgcaaaacgagtgctggaacttgtcccagcagttgatgacggagctcacagatttcatgcacatcttccggacaattaactctgacattcacgctatcgctcagtgtacacagaagctgaacgaggccaatgaacagtatgtggagttagaagagagaatggagtacgtccgggcactccatgaactcatccgtaaccacttttcccttttctcagccgaaaacgaagccttagatatctcagtccgccgccaatttggcgagagccctatacctccctgtccaccacccccccaaccccacctcctgcactgcccacttctggcccctcagctgctcgacatgtgggaagcattccaatttgagaagtctcaggcctctgaatttcttttgtccaagcgtcacgctattatgccaaagctgcagcagttgatggccgcagccctggccgaattagagggactgctggcgaaagccctttctggaccttttatggacccaacacaggaccagcgcagcaccgaacaccagcttgtctcacttgagagacagttccagaacaccgtgagcgatctgtctgagctgcatcatgcatacgctatctttaccgaagacgagactcctgtgcccttaccaatatgcgggacaagaccgatcgtgcagcagcagagaatatggcatctgtacagggtaattagtgagaatatcagtgagtggaagtgcatggccttcgcaaagttttcccctgccatggcccaggagaagacagagggttggctgacggaagccgccaggatgtcaacaacgctggaattacattcacctgttctgcagcattgtatgcgaatcttgggcgaatttcgatcttatctgcctttgctcacaaagctgggcagcttgcatccacagtcactcaactgccaatgtttgctgagggcactcggccttggctccctccagactattgaacttctgacacttggccaactcctgacctatcccttgctagagttcgcggataggataaaccaggtttggcaaaacgagaatgagaggatccatgcacaagagaccattcgacggttgcagagatactgggaggctcgacagctaaggttgctcaacttcatcctccacgtgccttatgaaccccccgcttcagagcgtagtaagcgacaggttctgcgatctccacaatgggaagtggtggacaaagactcaggcactttcatcttatctgactactctaatctccaggactcaatccaagagagcttgcaggtgctatccaaaatcctggccattgagaagtccggtgatcttaataagatagcgttggagtgggtggcgattatgcatggactcggcgcactgttagaggtctggctcacgtttcagcagaagtggatcttccttaataaggtcctgcacgaaatgaagatccaatttcccaatgcagatctaaactccagattcaaggttatggacgaccaataccgcacccttatgaggatttctgtcgccgaccccatggtgctctcactagtggttccatctgcagaaagatcaccctactttcaaggacagcagctccagcagctcttgcaggctggatcggttgaattggaaggtataatcatgtcactcgaatctgtcctctacggagtctgcgcccattttccccggctgttttttttgtccgactctgagttagtggccttactcgctgcgcgactggaatcctgcgaggcccagctttgggtccggaggtgttttcctcacgtgcacgcagtttctttcaggagctgcccaactggcgagaaaaatactgacgattgggaatcgtcgccaaacacacagacccaggttgaggccctcgctgtgttgggcgccgggggtgaggaggtcaagctgcagggcccacttcctctgcatcctgatcttccgaagtggctggctagccttgagaagtgcctgcgcttggctctggtgcatatgttgcagggttgtgtggcagccaggctagcccgcggaccctctctgggggaggcactgaagcagctaccgaaacagaataaactctacctgcagctctacgttcagcactggatcgaccttgtgcaggccttcccttggcagtgtgttctggtggccgaggaagttgtgtggcgtgctgagatggaagaagctctgctcgaatggggcaccttagcaatggtgagtatgcacatgagaaaactggaggtgctggtcaacttcatgagagctcagcgggcttctcaaggtggtcagtcactgccaagtgtccggcagacctccctgctgtcagccctgcttgtaatggccgtgacccaccgtgatattgcccagctgcttgaacagcaccaggtttctgaccttactgatttccactgggtacgccagcttaaatatcacctggggagtccacacataatacccaaatcccccctgcagtcactgaagacaatcgcctccagtgaaccttccctatctcctgccgcctgttggattgacgtcctgggccgtagcttcttatataactacgagtatcttgggccgaggttaggtcccctgccttccctgctgcccgaacgccccgctttagtactcctgctcgccctcgaggaagtcgcgtgcggcacagtgcttggcccaaatggcgttgggaagagggccattgtgaactctctggctcaggcattggggagacagttggtcatgttaccctgttccccacagattgaggcacaatgcctctcgaattatctgaatggggcacttcaggggggtgcgtggctgctattggaaaaggttcatcagctgccgcctgggcttctgtcggctctaggccaacggctgggagagctgcaccacctgtatgcccccctgtatcaggaggcatctcgtaatacatcaaccatcgatccaacgcagccacaactgttgggctcatcttttttcgaaaaacatcacgtgagcgtccgactaggctatggatgcctactcgtgctccgggccttgtcctctgccgtcccggccaatctgcacctactccttcgccctgtagctctggccctccccgaccttcgacaagttgccgaactgaccttgctcggcgctggaatgcgtgatgcgttccagatggccacccggctcagtaagtttttttcactggagcgcgaattagttagtggccccttgccctgtagattgcccttgctcaagcagatcttggaagacacaatccgcacactgaatgtgactaaggaggaaccgaagtgccagaagccgcgcagccttgcagcgatagaggaggccgctttattgcgaagcccattgtttagcattctgaatggtctgcacttgcacaatctgagggggctcctctgcgctctgtttcccagcgctagccaagtgctggctgagccgatgacatacaaacttatgaaacccctggtggtggaggaactgcagcaagtggggctggatccctccccagacatactaggctccctggaacagttgtcacaggccctgtcgagagcaagtggcatcctcttactgggtcccgctggcagtgggaagacaacttgttggcattctttatttaagatccagaaccggttggcagcaatggaagatacatctacccagggttgccagccggtggagattacccatctgtacccgagcggtctatctcctcaggaatttctggggtggctggagggatcatgctggcaccatggcattttccctaaagtgctgcgcgcagcgggccaatgtaacaacatggggcagaagagacaaactgaagaatccatcggaatccagcattggattatctgcgacggtgcctcaaatggggcgtggctcgattctataacgtgcttacttagtgagctcccccagttgtcgttgccttcaggtcagcagatcgcccgccctcccggtacatttcttcttatggaagttgccgacaccactggtataagtcctaccgtcgttggctgttgtgctctggtttggtgcgggggagaacagacttggcagtgtatcctgtccgccctgatggcctctctgccatatgagtaccgcctacaacatcgcacagtcgccgagctgaaccacatggccgaagtactagtccctgccacactgcgctttctcacatgtcagggtgtgtcttccctccttcaggtgcacggtcagcaggcagtatgcgctggagtggccgaggtgacctcaatggctcgcattctgcacagtttactggatctacatctgaggctcaaggaggaaaaggcccctggccccgaagatctctcctactctgacccggttgcgcagtcttttaggtcttctaaaagttcctttcttaaccgaagccaagtggactcagatgacgttcctgacaagtgccgggagcaccttctcgctgttagttcatttctgttcgcgctgatttggggcttcggggcgcacctgcctagccgcttctggcccatctttgataccttcattcgggacagtatttcaaggctgagcaattatccagagcctcccccttctgcccttgtgtttgatctgcatgtgagtccagaggacgggaccttggtgcccttcacaggccagtacctgagcagtcatatcaagggaacactggggaccttccacccatctattcagacagagcggctcttatacgtagtcgatctgctgctgagcggaggccagccagtccttctggcaggagaagctgctaccggtaagtctgcgtttgttgaggtgcttgtagagccccatcacccatatatatactctcccattcacccagcttttagctcctcacatctcagactcctgctgtcccgtggtatccaaggtcagacccaagccagtccgcagcctggacaccaccaggactcaaaaccttcccttctgttccttttagaggatcttcatctggcgacctccgatcccgagaagagctgccaacctgttctcgagacattgaggcaggcaatggacggaactgtctatgcccactccaccctggagctccagacacttcaacccacagtgaactttctggctacagtaactgtgcccggttattgcgagaggccgctatgtcccagacttttcaggttattcactgtgcttgctctggagtccatgacacaagccactctactggaacgtcatgtccccatcatccaggcctggctcgagcgttttccttcagtcgagagggagcgggcactggcacgaggtctcgtgcgcgcttccgtggaggcatgggaagcggtctgtaactgtttcatgccttcacctctgcatccccattatcatttcagtctgcacagcgtatctcacttgttgagctccctccaacttctgcctaacaggacaggatcccgaggcttcgtggattaccccaatcaccaggagcatctccgcagggttagcgggttaagagggacgtgtctcaccgttatgatggccacccgcaatgttgtaagactgtggctgcatgaggcacagaggacattctgcgatcgactggacagccctcgcgagcggagttattgcgccaagctcttgcttgtcgtggctcagtccgtgttctgctgtggcccgggaccgcagcacctgggcaaggaccatcaggagtcggaggaagaggaagaagaggaacgcgtcccagaggtcgagtcagagggcgagcttgctcagtgggaggactttagcaattcaaattcagagaccgaagaggaagaagagccttatggactgcaggtggctagagtgtctaattctcgggatccttctctgacgccctcaatcggtccagtgagtaggggtatgaaggaatccatttcccataagatcagacaggaaaagggtacacgcgcaagtaattatcggctacaggttcggaggagctttaaaacttggtggcagaagaagcctcagatggatctcatatcgcctctgctgctgccggttctcctgttgcaccctcaggagaaacccagtgacctggtgttctcccaggagctcatactgggccctaactcagagaccccaaatctctacctggagcgccagtgggaaaaactggaggaacagctcgccacctctgcagcacagcttaagctgtcgcctcacttggccagatgccatagcatggcccagcacgtcgcacgactggttcgggttttggccaggccaaggcagcacggcctattgctatcgggagcactcgggacagggagacacaccgcgatcaccttggcaagcagcatctgccaagcacactttttccatctgccatctggaagtgaggaggccatcctgcagtgcctacgcgacgcttcttggcacgccggcatgctgtcacagcctgttgctctgctggtgccctcaggcgttgacttgaccactctgcaccgcctgctggcactggctaccagtggatctttccctgggcagtacactgaagcagacctcgatcgcataggggagcacttgcctagagaaaaccttggcgtgaaacaaaatatcaagaaggaaatggtgctccaacggtttcatcaacaagtgtgcagccatctccacctgtttttcctaataggcgataaacaggctcataaacagcttccaagcactctgttcttgcgactcctgcaactggccaccgcgagtattgataggtatgagccttgggaccaggccgccctggccaaggttgcacaacatcatctagagggagcacagtcagtgccactggatgacggctcttggaaatatccagatctgcaagcatcgattccttccgtggccaaagcaatggccttaattcaccttagcgctacacactatcacgagcatctctgcccagcactcccattagtgacgcccaaaactttcctggatttcctggataccttcttgatgctgcagcagcagacaattctgaaaattaagaataaggcccagcgtgtgcaaaacgccctggagaatctgaggatgctgataaaggaacacggaacacacgccaatttgatttttgatctggaacaacagctgaaagattcagggaagagcctctcaatgtttcaacagcagctggagcaatcaaagttgctgtataaacagcagctggaggaatgccggcaccaggaaaatctgatcgagaatctggctagacagcgcgacgctcttcaagcccaacgtgaggcttttcttgagcagatgtccaaggcttttctggaacccctctctcaactgcaagtggctgactttgaggagattaggtcttaccgggctcctcccgagtcagtagtgcgggtgactgacgctatgtgtgatctcttccatcatgaaacagggtgggcctcagctaaacagctcctctgcaccgaagatttttaccaggagctggtttttttcccaaaagaaaaaattactgattctgagcttatcaagctacatctgatcctcaaggccccaggaatggacgatgctgctctgcgagccgtgagtcgccctgccgcttcattagctgcctggctgtgggctgtgcttcattacggtctcgcgcactgccgcggtctgccaacggatttactcctacaacaggttgaggccactttgacccgcgaacaggctagattaggatattaccagtttcaggcgcaggagacccttgagcataatcttgctctagctaagatggttgaagacgctcaagcgagtcacaattgcgtggccaagactctgagtcaggcacagtgtggccagtatcataagtggcccatgaaagccgcacttcttacacccatgagggcctggacaacccagctccaaaagctgaaaggccggtgtatgacagtgtttggagatacgttgctttgctcagccgcaattatttacctaggaccctttccacccctaaggcggcaagagttactggatgagtggctggcgttgtgcaggggttttcaggaggctctcggacctgatgacgttgcccaggccctgaaacgtaaacaaaagtccgtgagtatcccacccaagaatcctctcctcgcaacccacagccccttttcaattctctccctgctgagttctgagtctgagcagtatcagtgggatggcaatctaaaaccccaggccaaatctgcgcaccttgccggcttacttctgcgcagccccacccactattccagttgtcgatggcccctgctcctggacccaagcaacgaggcgcttatctggctggacccactccctctggaagagaataggagcttcgcccctgcactaacagagggcagaggtaaaggtcttatgagaaaccagaaacgcgaatccaaaacggacatgaaagaggaggacgacgaaagtgaagagtctaacgaggccgaagatcagacaaaggagcagaaggcagaagagcggaagaacgaacaggaaaaggagcaagaagagaatgaagagaaggaggaagaaaagacagagagccaggggagcaaaccagcgtatgaaacacagctccccagtctgccttacttgagtgttctgagcggggccgatcccgagcttggctcacaactacaggaagccgctgcctgcggacttcccgtattgcttacaaatgtggaattgggcctcgggtgtgaagaactgcaatggctccttcagagagagcagctgtctccgccacaggtgcagcctgggttttgtctgtatctaagcacaacccttagcctctgcgcaatggagaaagtgctggggtgcgaactgctgaagggcttgaacgttctcgatttaggacttaacatggagatactggaagaacaaatgctgcatgagattttgtgcagggagtatcccgaactagagacccgctggcaagatctcaaaatccgggcgttggatacatgcaaggctgtggaggccgcggaggagcggctcttgacaatgctacttttccaaaacccgaagcggcaaaagccagccaagttcctgcgcaacatcgtcagagctcaagggaaactgtgccagctgcgggcacactgcgaggagttagaggggcaaaagttacaagagatggtgctgtgggcaccctatcggcctgtggtctggcacggcatggccatggtcaaagcactcagccagctgcagaacctgctccccctgttttgcatgtcaccagagaactggttagctgtcacaaagcaagccctggactccatgaagccccgcgagattaatcacggggaggatctggcttctcacttactccagttgagagcccatttgactaggcaactcctcgggtccacagtgactgcattgggattaactcaggtgcccttggtgggcgccctcggcgccctcgcactcctgcaagccactggaaaggcaagcgagctggaacgactcgcactatggccgggactcgcagcttccccatctacagtccactctaagccggtttcggacgttgctcgccccgcctggctgggaccaaaggcctggcatgagtgtgaaatgctcgagttgctacccccatttgtggggctgtgcgcatccctggctgggcattccagtgcctggcaggcatatctgagcctttcttccaccgtgctcgggccggcacccggccccggccctgagccactgtctctactgcaaaaattaatcctgtggcgagtgctcaggcctgagtgccttgccggagcattggcggactttacaactagccttcttggcagaccattggatgagaatacctatgctcctactatgccctttaaacatagccaagcgacgcagcccatgcttattctcttacctccccctggacacccgagcgctactctgcacccactgactgttattcagaaactcgctgcaaaataccagcaagggcagaaacaactgcaggtgattgccctgggtagtgaggcatgggaccctgtgtccgtagtcgttagtaccctttctcaggctatgtatgaaggccactggttggtactcgacaactgccatttgatgccacactggcccaaggagctgctgcagcttctcttggagctcctgggtcgagccaaggttgttgctgaccttgaaagcgaacagctgctggaccagccagaatcccggaatgtttccacagtacaccgcgatttccggctctggttgatcgttcctgctgaatccagcgcttcactcccagccgtcctgacacagcactctatgcctgttttttggaatcaatcactggagctgggtcatgtgcttatcgatagcgtggaattagctcagcaagtactatatatgcagcctccgacccaggccctgcccctgctgctgcttcacggtctgctgcttcataggcaactctacggaacccgcctgcaggcacataggggccggtggagccaggtgacattaacacaggtcctgcagacacaggaccagttatgggccagcctgtctaaccctagagccgcgatgcaggaacttgctgcctccgtgttttatgggggcccgctgggagacactgaggatagagaagccctcatttcactgacgcaggcatgcctgtccccaagcagcggctcctgggtgcagcctcataccccacagtctctattggcaacactgatgcccctgcctgaactcagggagctcgacgctatggcggagtgtaaggcccagatgcaccttctgccatcaccgcctgaacccaggctctgtggcctgtcagagggcccccaggcatggctcctcaggaggcagagccgcgcactgctcagcgccctacagcgcagctctcccgtgtgggtgccggaaagccggcgaggagcccaactcgccgaacggcgactccggcagcgacttgtccaggtaaaccggcgactggagtctctgcaggaccttctgacccatgtgattagacaggatgagtccgatgctccatggagcgttctcgggcccaatgctcgccgcccccttgagggcgtcctagagacagaggccctagagctttctcagctcgtcggcaccttgcaaagggacctcgattgtcttctgcaacagctaaagggggctcctccttgcccctctaggcgatgcgctgccgtggcccacgctctgtggacgggaagactaccactcccctggagaccccatgcgcctgccgggccccagccaccctggcattggttgcgccaactgagcaggaggggacagctgctagtccgctacctcggggtgggcgcggatgccagttctgacgtccctgagcgtgtgtttcatctgtcagccttcaggcacccaaggcggctgcttctggccctgaggggcgaggctgcactcgaccagaatgtcccctcttcaaatttccctggctcaagggggagcgtgtcatctcagttacagtacaagagactggagatgaatagcaatcctctgcacttccgcgtggagaatggccctaaccctactgtccccgagcgtgggctgttactcatcggtctccaggtcttgcatgccgagtgggaccccatcgccggcgctctgcaggatagcccttcatctcagcccagcccacttccacccgtaagtatcagtacccaggcaccagggacctctgacctgcccgctccagccgatctgaccgtctatagctgcccggtctatatgggtggtccgttgggtaccgccaagctgcaatcccggaatatcgtaatgcaccttccgctgcctactaaactgacccccaacacgtgcgtccagagacgggtgcatgtctgtagtcctcccctgtcgtag

SEQ ID NO: 13868 - DNA, 1179 bp, synthetic construct
  source 1..1179: mol_type = other DNA; note = Synthetic coding sequence
atggatctgtttggcgacctccctgaacctgagaggtctcccaggccagcagccggaaaagaagcccagaaggggcccctactcttcgacgacctaccacccgcgtccagcacagattctggctcaggtggtcctctcctatttgacgatctgccaccagcctcgagtggcgactccgggtctcttgccaccagtatctctcaaatggtgaagactgaaggcaaaggcgccaaacgtaagacctccgaagaagaaaaaaacggatcagaggagctcgtggaaaaaaaggtttgtaaagccagctcggtgatctttggcttaaaaggctacgtggctgaacggaagggcgagcgcgaagaaatgcaggacgcgcacgtcatcctcaatgacatcaccgaagaatgtagacctccttccagtctgattacccgggttagttattttgcagtgtttgatggccatggcgggattcgtgcaagtaagtttgccgcccagaatctgcaccaaaacctgatcaggaaattccctaaaggagatgtgatttccgtcgagaagaccgtcaaacgctgtctgctggatacattcaaacatacagatgaggagttcctgaagcaggcctcctctcagaagccagcctggaaagacggcagcacagcaacttgcgttctggcagtggacaacatcctgtatatcgctaacttgggcgattcacgagcaattttgtgtagatataacgaggagtcacagaagcacgctgcacttagcctgagtaaagaacataatcctacacagtacgaagaaagaatgcgcatccaaaaagcaggcggcaatgtcagagatggccgcgtgctgggggtgctggaggtaagtcgcagtataggcgacgggcaatataagcgttgcggagttacaagcgtaccggatatcagacggtgccagcttactccaaatgaccgcttcatcctgcttgcatgtgatggactgtttaaggttttcacccctgaggaggcggttaactttatcctgtcctgtctagaagatgaaaagatccaaacgagagagggtaagagtgcagccgacgctcggtacgaggcagcctgcaatagattggctaataaagccgtgcagcgcgggagcgccgacaacgttaccgtcatggttgtccgtatcgggcactag

SEQ ID NO: 13869 - DNA, 2193 bp, synthetic construct
  source 1..2193: mol_type = other DNA; note = Synthetic coding sequence
atgtttggcagaaaaaggtccgtgtccttcggaggatttggatggatcgacaagaccatgcttgcaagtcttaaggtgaagaagcaggaactggctaacagtagtgacgccactttgccagaccgaccgctcagcccacccctaacagcacccccgacaatgaaatccagcgagttttttgagatgctcgaaaagatgcagggaattaaactagaagaacagaagccagggccccagaaaaacaaggatgactacattccctacccgtccatcgatgaggtggtggaaaaaggcgggccatatcctcaagttatcctgcctcagtttggcggctattggatcgaggaccctgaaaacgtgggaactcctactagtctgggcagcagtatttgcgaagaagaagaggaggacaatctctcccctaacacttttggatacaaacttgagtgtaaaggcgaggcccgagcgtatcgcagacattttctgggcaaggatcacctaaatttttactgcaccggctcttctctcggcaacctgattctgtcggttaaatgcgaggaggctgagggtatagaatatctgagagtaattctgagatcaaagctgaagacagtccatgaaagaatccctctcgcaggcctctcaaaactgccctccgtaccacaaatcgcaaaggcattttgcgacgatgccgtgggcctgagattcaaccccgttctataccccaaagctagccaaatgatagtgagctacgatgaacacgaagtcaataacacttttaagtttggtgtcatttaccagaaggcgcgacagacattggaagaagaactgttcgggaacaatgaggagtctcccgctttcaaagaatttctcgatctcctgggcgacaccataacactgcaggactttaaaggcttcagaggaggattggatgtgactcatgggcaaactggggttgagagcgtgtataccacattccgggatcgggagatcatgtttcacgtctctactaaattacctttcaccgacggggatgcccagcaactacagagaaaacgacatattgggaacgacattgtcgcaatcatttttcaagaagagaacacaccgttcgttccagacatgattgcttccaatttcttgcacgcttacattgtagtgcaggtcgagacaccaggtaccgagaccccgtcttacaaggtttctgttacagcccgtgaggacgtcccaaccttcggccctccactgcccagtcctcctgtgttccagaaggggcccgaatttagggagtttctgctcactaagctgaccaacgccgagaatgcatgttgtaaaagcgacaaattcgcgaaactcgaggatcggactcgagccgctctcctggataacttgcatgatgagctgcatgctcacacacaagcaatgctaggtcttggtcccgaggaggataagttcgagaacggggggcatgggggatttttagaatcgttcaaaagagcgatcagagtcaggagtcactcgatggagaccatggtcggcggccaaaagaagtcccactctggcggaatacctggctcactttctggcggcattagccacaatagcatggaagtgaccaagacaacattcagtccccccgtagtggctgctactgtgaaaaaccagagtagaagccccatcaaaaggaggagtgggctttttccccgtcttcacaccggtagtgaaggtcagggagatagtcgcgctagatgtgacagcacctcttcgaccccaaagacacctgacggaggtcacagcagccaggagatcaagtccgagacctcgtccaaccccagcagccctgaaatctgtcccaataaggaaaaaccctttatgaagcttaaggagaatggacgtgccattagtcgcagctcctcttctacatcgtccgtaagcagtactgccggcgagggagaggcaatggaggaaggagactccggtggtagccagccttccaccacgagccctttcaagcaagaggtgtttgtctactccccctctccatcaagcgaaagtccgtccctgggcgcggcagcgacccccattatcatgtctcgctcaccaaccgacgcaaaatcacgtaattctcctcggtctaacctgaagttccgttttgataaactgagccacgcttcatcaggagcagggcactag

SEQ ID NO: 13870 - DNA, 1110 bp, synthetic construct
  source 1..1110: mol_type = other DNA; note = Synthetic coding sequence
atgtggtccgggagaaagctgggaagcagcggaggatggttcttaagagtgctaggcccaggcgggtgcaatactaaggcagctcggccactcatctcatcggctgtgtatgttaagaaccagttatccggaactctgcaaatcaagcctggcgtgttcaatgagtatagaaccatttggtttaagtcttatcggactatctttagctgtctgaatcgcatcaaatcatttagatatccctgggcacgactgtattccacaagccaaacgactgttgactcgggggaagtcaagacattcctggcactggcccataagtggtgggatgagcagggagtgtacgctccccttcactcaatgaacgacctaagggtgccattcatcagagacaatctccttaagaccataccgaaccatcagcctggaaagccccttctgggtatgaagatacttgacgtaggctgtgggggagggcttctgacagagcctctcgggaggttgggcgcaagcgtaataggaattgatccagtcgatgagaacatcaagacggcccaatgccataagtcatttgatcccgtactggataaacggattgagtatagagtctgttccctcgaggaaattgttgaggaaactgccgaaacttttgatgcagtggtcgccagcgaggtggttgagcacgtaattgacctggaaacttttttgcaatgttgctgtcaggttctgaaacccggcggatctctgttcatcaccaccattaataagacacagttatcatacgctttgggaattgtgttctctgagcagatcgcctccatagtgcccaagggaacccacacctgggagaagtttgtgagcccagagaccctggagtcaatactggagtccaacgggctgtctgtgcagacggttgtgggaatgctgtataatcccttcagtgggtactggcactggtccgaaaatacctcactgaattacgccgcttatgccgtcaagtctagggtccaagagcatcccgctagcgccgaattcgttcttaagggtgaaacagaggaactgcaggcaaacgcttgtacaaaccctgccgtgcacgagaaactgaaaaagtag

SEQ ID NO: 13871 - DNA, 1782 bp, synthetic construct
  source 1..1782: mol_type = other DNA; note = Synthetic coding sequence
atggaaggctgcatgggagaggagagcttccagatgtgggaactgaatcgaagacttgaggcatatttggctagagtaaaggctcttgaagagcaaaatgaactcctgagcgccgagcttggcggcctccgagcgcagtctgccgatacgtcttggcgagctcacgctgacgacgaactggctgctcttcgtgccctggtggaccagaggtggagagaaaaacacgcagccgaagtggcgagggataatctggcggaggaactagagggagtagcagggcgctgtcagcagctgcgactcgctagagaacgtacaacagaggaggtagccaggaaccgccgtgctgtggaggccgagaagtgtgctcgggcttggctttcctctcaggtagcagaactcgagagggaattggaggctctccgtgtggctcatgaagaggaacgcgtcggattgaacgcgcaggcagcctgcgctccaaggtgtcccgcacccccccgtggccctcctgctccagcccctgaagtcgaagagctcgcaaggcggctgggtgaagcttggcggggcgcggtcagaggctaccaggagcgggtggctcacatggagactagcctggggcaagcaagggaaaggctcggacgtgcagtgcagggcgctcgggaggggcgcctcgagctacagcagcttcaggcagaacggggagggctgttggagaggagagccgcacttgagcagagacttgagggaaggtggcaggagagactacgcgcgaccgaaaagtttcaattggcggttgaagctttagagcaggagaagcagggcctgcagtctcagatcgcacaggtcctggaagggcggcaacagttagcccacctcaagatgtcgctaagcctcgaggtggccacatatcgcactctgctggaagcagaaaactctcggcttcaaacaccagggggaggcagtaagacctctttgagctttcaggaccccaagcttgaactgcagtttcctcgtacgcccgaagggcgacgtctcgggagtcttctgcctgtcctaagccccaccagcctgccctcaccgctgcccgccaccttagagactcctgtgccagctttcctgaagaaccaagaattcttacaggctcgcacgccaacactggcgtctacaccaatcccccctactccccaggccccatcccccgcggtcgacgctgagatacgcgctcaggatgccccgctgtccttacttcagactcaaggcggtcgaaaacaggcccccgagccacttcgcgctgaggcccgggtcgccattccagcaagcgtgctccccggccccgaggaaccagggggacagcgtcaggaggcgagtaccggtcagtcccctgaagaccacgctagtcttgcgcctccactgtcaccagaccactcctccttggaggccaaagacggtgaatctggcgggagtcgggtattcagcatttgccgcggtgaaggagaaggtcaaatctgggggttggtggaaaaggagacagctatcgagggtaaagtggtgagctccttgcaacaggagatctgggaggaagaagacctcaaccgaaaagaaattcaggactcgcaggtccccctagagaaggagacactcaagtcattgggcgaggagattcaggaatccctgaagacattagaaaaccagtcccatgagacactggaacgggagaatcaggagtgtcctcgctcactcgaagaagatctggaaacactcaagtcgctggaaaagaagaagtag

SEQ ID NO: 13872 - DNA, 3456 bp, synthetic construct
  source 1..3456: mol_type = other DNA; note = Synthetic coding sequence
atgatggcagcagctctgggcccacccgaagtgattgcccagttggagaacgccgcaaaggtgctcatggctccaccctcaatggtgaacaatgaacagcgccagcacgcggaacacatctttctctcgtttagaaaatctaagtcgccttttgccgtgtgcaaacacatccttgagacttcgaaggtcgattacgtactcttccaggcggcaacagccatcatggaggccgtcgtgcgcgagtggattctgttagaaaagggctctatagaaagcttgcgcacattcctactcacttacgttttgcaacggccgaacctgcaaaagtatgtgagggaacagatcctcctggctgtggccgtcatcgtcaagagaggctccctcgacaagtcaatcgactgcaagtcaatttttcatgaggtgtctcaactgatttcaagcggcaacccaactgtgcagacactggcctgctccattcttaccgcactcctgtctgaattctccagctcttcaaaaacaagcaacattggactttccatggagttccatggcaactgcaaaagggtgttccaagaagaagatctcagacagatctttatgttaacggttgaggtgctgcaggaattttcccggcgggagaaccttaatgcccaaatgtccagcgtgtttcagcgctacctggcacttgctaaccaggtcctgtcatggaatttccttccgcccaatctcggacgacactacatagcgatgttcgaaagctcccagaacgtcctgctgaaacctacagagtcctggcgcgagaccctcctcgacagtcgggtgatggaactgttttttactgtccatcgcaaaataagggaggactctgacatggcgcaggattccctgcaatgcctcgcacaattggccagccttcacggaccgatctttccagacgagggcagccaagtcgactatctggctcattttatagaaggcttgcttaatacaatcaacggcatcgaaatagaggactccgaagcagttggcatcagttctattatctcaaatctgatcaccgtatttccaaggaacgtcctcaccgccattcctagcgagctgttctcgtcatttgtgaactgccttacacatctgacttgttcatttggcaggtctgcagcactggaagaggtgctggacaaggacgacatggtctacatggaggcctacgataagctactggagtcttggttaactctcgtacaggatgacaagcactttcataaaggattctttacccagcatgctgtacaggtctttaactcctacatccaatgccatctggcagccccggacggcactaggaatctgacagctaacggcgttgcctctagagaagaggaggagatctcagagctgcaagaggatgaccgggaccagttttccgaccagctggcaagtgttggcatgctcggccgaatcgccgccgagcactgcatcccactgctcaccagccttcttgaagagcgggtcacacgccttcacggtcagctgcagcggcaccagcagcagcttttagcgtctccggggagttcaaccgtcgataacaagatgttggatgacctatatgaagacattcactggctgatcctggtgacaggttacctgttggcagacgacacccaaggagagactcccctcattcccccagagataatggaatattcgataaaacactcttcagaagttgacattaataccaccctgcagatcctggggtcgcccggtgagaaggcctcctctataccggggtataacaggaccgattcagtaatcaggctgttaagcgctatcttacgggtatcggaagtcgagtctagggcgattagagccgatcttactcatctgctttcgccacaaatggggaaggacatcgtgtggtttctcaaacggtgggctaagacttacctgcttgtggatgaaaagctgtacgatcagatatcactgccattttccacagcgttcggcgcggacacggaaggttcccaatggatcatcggatatttactccagaaggtcatcagcaacttatcggtgtggtctagcgagcaggacctggccaacgacactgtgcagctcctggtcactctagtagagcgaagagagagggcaaacctggttatccaatgtgaaaactggtggaatctagctaaacagttcgcctcaagaagcccaccactgaacttcctctctagccctgtgcagcggaccctcatgaaagcgttagtgctggggggatttgcccacatggataccgaaacaaagcaacagtattggacggaagttctgcagccactacagcaaaggtttctcagggtgatcaatcaggagaacttccagcagatgtgccagcaagaagaggtgaaacaggaaataacagcgaccttagaggccctttgcgggattgcggaggcaactcagatcgataatgtagcgattctcttcaattttctgatggactttctcaccaattgtattgggcttatggaggtttataaaaacacgcctgagacggtgaatctgataatagaggtgtttgtggaggtggcccataagcaaatttgctacctgggtgaaagtaaggccatgaacctttacgaagcatgtctaacactgctccaggtctattcaaagaacaatttgggtcgacagaggattgacgtgacggcagaggaggagcagtaccaggacctgctgctgataatggaactgctaactaatctactgtcaaaggaatttattgacttcagcgatacagatgaggtttttcgtggccatgaaccaggtcaagccgccaatcgatccgtcagcgcagctgacgtggtcctctacggagtaaatctcatccttcctctgatgagtcaggacctattgaagtttccaaccctatgtaaccagtactacaagctcattactttcatatgtgagatcttcccggagaaaatacctcagttgcccgaggatctcttcaaatctttaatgtactcactggagctaggtatgacctccatgagctccgaggtttgccagctctgtctggaagcccttacccctctcgccgaacagtgcgcaaaggctcaagagactgactccccactgtttctcgcgacacgacatttccttaaactggtttttgacatgctagtgctgcaaaaacacaataccgaaatgaccaccgctgctggcgaagccttctataccctggtatgccttcatcaagccgaatatagcgagctcgtggagactctcctgagcagccagcaggatccagtaatatatcaaaggctggccgacgccttcaataagttgacggctagcagtactccccctaccctcgacaggaagcagaagatggcctttcttaaatccctggaagaatttatggctaatgtcgggggacttctgtgcgtgaaatag

SEQ ID NO: 13873 - DNA, 1578 bp, synthetic construct
  source 1..1578: mol_type = other DNA; note = Synthetic coding sequence
atggcagctggcggaagtggaggtagggcctcctgtccaccaggcgtgggcgtgggaccagggacaggcggaagccccggaccttccgccaacgctgccgcaacacccgccccaggaaatgccgcagcggcggcagccgccgctgcagccgctgctgcagccccaggacccacgcctcctgctcctccgggacctggcactgacgcccaggcagcaggagcggagagggccgaggaagccgcggggcctggagctgcagccctgcagcgtgaggcagcctacaattggcaagcaagtaaacccactgtgcaggaaagattcgcttttctgtttaacaacgaggttctgtgcgatgtccattttctcgtgggaaaagggctgtcatcacagagaatacctgctcaccggtttgtcctggcggtaggatcggctgtgttcgatgctatgttcaatgggggaatggccaccacgtccacagaaatcgaactccccgacgtggagccagcagctttcctggctttattaaaattcctctatagcgatgaggtgcagattgggcctgaaacggttatgaccaccctatatacagctaagaaatacgcggttcccgctcttgaagcccattgcgtcgaattcctcaaaaaaaacctgcgtgcggataacgcctttatgcttcttacccaggcacgactttttgatgaaccccaactcgctagcctgtgtcttgaaaacattgataaaaacacggcagacgctatcaccgccgagggctttacggatattgacctggacaccctggtggcagtgctggaacgggacaccctgggcatccgcgaggttcgcttatttaacgctgtcgttcgatggagcgaggccgagtgtcagcgccaacagctacaggtgaccccagaaaaccgtagaaaggttctaggaaaggcccttggtcttattcgctttcccttgatgacaattgaggagtttgctgccggccccgctcaaagtggcattcttgtagatcgggaggtggtcagtctgtttcttcacttcactgtgaatccaaaacctcgggttgaatttattgatagacctcgatgctgtctgagagggaaggagtgcagcataaaccgcttccagcaggttgaaagccgctggggctattcgggtacttccgatcgtattcgttttagcgtgaacaagcgaatatttgttgtcggcttcgggctttatggaagcatccacggccctaccgattaccaagtgaatatccagatcatacataccgattcaaatacagtcctgggccaaaatgacacaggattcagctgcgacggcagcgcctcaaccttcagagtgatgttcaaagaaccagtggaggtcctcccaaatgtcaactacacagcttgtgctaccttgaaggggccggactcccactacgggaccaagggtctgaggaaagtcacacatgaaagccctacaactggggccaagacttgtttcacattttgctatgctgccgggaataataatggaacttcggtcgaggacggccagataccagaagtgatcttttatacttag

SEQ ID NO: 13874 - DNA, 525 bp, synthetic construct
  source 1..525: mol_type = other DNA; note = Synthetic coding sequence
atggccaccgtggcggaactaaaggcagtgctgaaagatacactggagaagaagggtgtgcttggccatctgaaggctaggattagggcagaggtgttcaacgctctggatgacgaccgtgaaccgaggccttctctctctcatgagaacctgcttatcaatgaattgatcagagagtacctggagttcaacaagtacaaatatactgcttctgttctgattgctgaatcaggccaacctgtggttccactagatcgacaatttttgattcacgagctgaacgcgtttgaggagtctaaagacaatacaatacccctgttgtacggcatcctcgcacatttcctgcgggggaccaaggatgggattcagaatgcttttctcaaaggaccatccctgcagccttctgacccttccctgggccggcagccatcaagaaggaagccgatggatgaccacctgcgcaaagaagaacaaaagagcacaaacatcgaagatctacatgtgagtcaggctgttaaccgctag

SEQ ID NO: 13875 - DNA, 1257 bp, synthetic construct
  source 1..1257: mol_type = other DNA; note = Synthetic coding sequence
atggctgggtccttacctccctgcgtcgtggactgcggcactggatacacaaaactcggctatgctggtaatacagagccgcaattcatcatcccctcctgtatcgctattcgggagagcgctaaggtggtagaccaggctcagcgccgggtgctacgcggtgtggacgacctcgacttttttataggggatgaggccatagacaagcctacttacgccaccaaatggccaattcgtcacggtatcatcgaagattgggatctcatggagaggtttatggagcaggtggttttcaaatacctaagggctgaaccagaggaccactatttccttatgacggaaccgccgctcaacactcctgaaaaccgcgaatacctagccgaaatcatgtttgagtccttcaatgtaccaggcctatatatagcagttcaggccgtgctcgctctggccgcctcgtggactagccggcaggtgggggaacgaaccctcacaggcatcgtcatcgattccggtgatggcgttacacatgtcattcctgtggccgaaggttacgtcattggctcttgcatcaaacacatcccgatcgccggcagagacataacgtacttcatacagcagctgctgagagaaagagaagtaggcatccctcccgaacaatctctggaaactgccaaagccatcaaggagaaatactgctacatctgccctgacatcgtgaaggagttcgctaagtacgatgtggatcctcgtaagtggataaagcagtacaccggcatcaatgccataaatcagaagaaatttgtgatcgatgttggctatgagaggttcctcgggccagagatcttcttccaccctgaatttgcaaatcctgactttatggaatctattagtgatgtagttgatgaggtgatccaaaattgtcccatagacgtccgtaggcctttatacaagaatgtcgtcctctcaggaggctccaccatgtttagggactttggaagacgacttcagagggatttgaagagagtggtggacgctcgcctaagactgtccgaagaactttcgggaggacggattaaacctaaacctgtcgaagtgcaagttgtgacccatcacatgcagagatacgcggtgtggtttggagggtctatgttggcctcaactccagaattttttcaggtctgccacaccaagaaggattacgaagagtatggaccctctatctgtagacataatcccgtgttcggcgtgatgagctag

SEQ ID NO: 13876 - DNA, 1044 bp, synthetic construct
  source 1..1044: mol_type = other DNA; note = Synthetic coding sequence
atggctgcagccgagcctgcaagctctggccagcaggccccagccggccaggggcagggacaacggccgccgccccagccacctcaggctcaagcgccgcaacccccgccccccccacaactaggcggtgccggtggagggtcaagccgtcacgagaaatcgctggggttgctcacaacaaagtttgtgagtctactgcaggaggcaaaagatggggtcctcgatctgaaagccgctgcagataccctggccgtgaggcagaagcggagaatatatgatatcaccaacgtgttggaaggaatcgatcttatcgaaaagaaaagcaagaatagtatccagtggaaaggggtaggggccggatgcaacactaaggaagttattgatcggctgaggtaccttaaagccgagattgaggacctggagctaaaggagcgggaactggaccagcagaagctgtggttgcaacagagcatcaagaatgtgatggatgattctatcaataaccgaaccttcagctacgtcacacatgaagatatttgcaactgtttcaacggcgacacactgctggcgattcaggcgccttccggtacacagctggaggttccaatccccgagatgggacagaacggacaaaaaaaataccagatcaatttgaagtcgcatagcggtcccattcacgtcttgctgatcaacaaagaaagcagctcatcgaagcccgtggtctttccagtgcctcctcccgacgacctgactcagcccagctcacagtccctgactcccgtcactccgcaaaaaagctccatggccacccaaaacctacctgaacagcacgtatcagagaggtctcaggcgcttcaacagacctctgctaccgacattagttcggccgggagtatttctggcgacattattgatgaactgatgagttctgatgtgttccccctcttgcggctgagccctacccccgctgatgactataacttcaacctggatgataacgagggcgtgtgcgacctttttgacgtgcaaatcctgaattattag

SEQ ID NO: 13877 - DNA, 636 bp, synthetic construct
  source 1..636: mol_type = other DNA; note = Synthetic coding sequence
atgtgccctggaaattggctgtgggcaagtatgacatttatggcccgcttctcccgttcatcatcgaggtctcctgtgaggacgcgtgggactcttgaagagatgcctaccgtccagcatccatttcttaacgtgtttgagcttgagagactactctatacaggaaaaacagcatgcaaccatgctgatgaggtatggccgggactgtatcttggtgaccaggacatggcgaacaacaggagggaattgcggagattgggaattacccacgttttaaatgcctcgcacagccgttggcgcggaacgcctgaggcttacgagggactgggtattcgttatttaggcgtggaggcccacgatagcccggccttcgatatgagcatccacttccagaccgccgccgatttcatccatagagctttgagccagcccggcgggaaaatcctcgttcattgcgcagtgggagtgtcccggtccgctacacttgtcctggcgtatcttatgctgtaccaccacctgacactcgtggaggccatcaagaaagtgaaggaccataggggcataattccaaatcgtggttttctgaggcaacttctcgctctggacagacggctccggcaaggtcttgaggcttag

SEQ ID NO: 13878 - DNA, 948 bp, synthetic construct
  source 1..948: mol_type = other DNA; note = Synthetic coding sequence
atgcctggcttgagctgtcggttttaccaacataaatttccagaagtggaagatgtagtcatggttaatgttaggtccatagccgagatgggcgcatacgtctccctgttagagtacaataacattgaagggatgatactcctgagtgagttatcacgccgtcggatccgatccattaacaagctgatcaggatcgggcgcaacgaatgtgtagttgtaatcagagtcgataaggagaagggttacatagatctctctaagagacgcgtgtcccccgaagaagcaattaaatgcgaagacaagttcaccaagagcaagactgtatatagtattcttcgtcacgtggccgaggtgctggaatacactaaggacgaacagttggaaagcctttttcaacgcaccgcttgggtgtttgacgacaagtacaaaaggccaggctacggagcatatgatgcattcaagcatgctgtctcagatccatccatcctcgattcactggatctgaatgaggacgagcgcgaggtactgatcaacaacataaaccggcggctcacgccccaggccgtcaaaatccgcgccgacatcgaggtggcatgctacgggtacgaggggatcgacgcggtcaaagaggcactgagagccggcctgaactgttccacagagaatatgcccattaagatcaatctgatcgccccaccaagatacgttatgactaccacaaccttagagaggactgagggtttaagcgtactcagtcaagccatggctgtcatcaaagagaagatcgaggaaaagagaggagtgttcaacgtgcagatggagcccaaggttgtgactgataccgacgaaacggagctggcgcgtcaaatggagaggctagagcgagagaacgctgaggttgacggggatgacgacgccgaggaaatggaggccaaagccgaggactag

SEQ ID NO: 13879 - DNA, 318 bp, synthetic construct
  source 1..318: mol_type = other DNA; note = Synthetic coding sequence
atggccggacaggaggacccagttcagagggagatccatcaggactgggccaaccgggagtacatcgagattatcacttcttctataaaaaagattgccgatttcctcaattccttcgatatgagctgtcgaagccggttggctactctgaacgagaaactgactgctttggaaaggaggattgagtacatagaagcacgcgtgaccaagggggaaaccctccgtacagtgccttgctgttgctgggaggtcgccctacacaataccggacacatgggcaaagccccagcagcctttagttcgtttttgtctccgtag

SEQ ID NO: 13880 - DNA, 1902 bp, synthetic construct
  source 1..1902: mol_type = other DNA; note = Synthetic coding sequence
atggcagccgccgctgctgctgccaccactgccgcttgcagttcaggctcggcggggaccgacgcagcaggggccagtggattgcaacagccaccgccccagcctcagccccagcctgctgcagcagcacctgctcaaccacctccggagccaccccgaaagcctcgaatggatccaagaagacggcaagcagcattgtcttttctcacaaatatttcgttggacgggcggctgcctcctcaagacgctgagtgggggggcggagaagagggcggagctgctaagccgggagctgggggggcttgcggagctagaactaggttcagcctccttgcggctgccgaaaggggcggttgcatcgccctagcagcacccggtacccccgctgctggcctggctgctggatctggcccatgtttaccacagccgtcctcacttccccccctgatccccgggggccacgctaccgtttccggccctggcgtcgcacgcggttttgcctctccgctgggggctggtcgcgcttccggcgagcagtggcagccaccgcggcccgccccactcgccgcgtgtgcacagctccagttgttggacggatccggcgccgcaggccaggaagaactcgaggaagatgacgccttcatctccgtacaggtcccggccgcagcctttctcgggtcaggcacccccggtagtggaagcggttctcgtgggagactgaattccttcactcagggaatactgccgatcgcattctcacgacccacttctcaaaactactgcagcctcgagcagcctgggcaggggggctctacttccgcgttcgagcagctgcagcgctctcggaggagactgatatcccagagatcgtcactggaaactctggaggacatcgaggagaacgcccctctccgacgctgcagaacgctttctggatcacccaggcctaagaactttaagaagatccactttatcaagaatatgcgacaacacgacacccgcaatggacgtattgtgcttatctccgggcggcggtccttttgctcaattttctctgtgttgccttaccgcgacagtacccaggtgggagaccttaaactggatggtgggcgccagtcaaccggtgccgtatccctaaaagagataattggactggaaggcgtggagctgggagccgacggaaagacggtaagttacacacagtttttactgccgacaaacgcattcggagcccgacgcaacaccatcgacagcaccagcagctttagccagttccgcaacctctcccacagaagcttgtctatcggcagggccagcgggacacaaggttctcttgacactgggtccgatctgggggacttcatggactatgatcctaatctgctcgatgacccacagtggccgtgtggcaagcataagcgagtgcttatcttcccatcttatatgacaactgtgattgactatgtcaagccaagcgatctgaaaaaggacatgaacgagaccttcaaagagaaattcccccacattaagctcacactcagtaagatacgctcacttaagcgagagatgcgaaagctggcacaggaggattgcggacttgaagagcccaccgtggccatggccttcgtatatttcgagaaactggcactgaagggcaaactgaataagcagaaccgcaagctgtgtgcaggcgcttgtgtattgctcgcagctaaaattggctccgatctgaaaaaacacgaagttaagcacctgatagataaactggaggaaaagttcagactaaatcgaagagaactgatcgcctttgagtttcccgtgctcgtcgcattggagttcgcccttcatttgccagaacatgaagtgatgccccactatcgtaggctggtccagtcttcctag

SEQ ID NO: 13881 - DNA, 3423 bp, synthetic construct
  source 1..3423: mol_type = other DNA; note = Synthetic coding sequence
atgaccactgcagtggaaagaaaatacataaacataagaaagcgactggatcagttggggtacaggcagacactgacagtcgagtgtctccccctggtggagaaattattcagcgatctcgtacacaccactgaatcattgcgtcaatctaaactaagtgcagtgaaagccgagaaggagtccgccaatttcgatttcgtgcttgaaccgtataaattggagaacgcacgactgtcacgagaaaacaatgaactgtatctcgagctgatgaagcttagagaacactcggatcagcatgtcaaagagctaaagacaagcctgaaaaagtgcgccagggagaccgccgatttgaagttccttaacaatcagtacgcccacaagctcaaactcctcgaaaaagagtccaaggccaagaatgagagaattcagcagttgcaggaaaaaaacctacacgctgtggtccagacccccggagggaaaaagagaagcatcgctttccgccggcagagaatgcagatcgacgaaccagtgccccccagcgaagtctctagctaccctgttccccagcctgacgatccgtacattgctgatctgctgcaggtagccgataaccgcatacaagaattgcaacaggaggttcaccaactccaggagaagcttgctatgatggaaagtggagtcagagattactcaaaacaaatcgaattgcgggagcgggagatcgagcgcctctctgtcgccctggacggcggcagatcacctgacgtcctgagccttgagagccgcaacaaaaccaatgagaaattgatagcgcacctgaatatccaggtcgactttctgcaacaggctaacaaggatctggagaagcggattcgtgaactgatggaaaccaaggagactgtgacgtcagaggtggtgaacttatctaataaaaacgagaagctgtgtcaggagctcacagaaatcgatcagctggctcagcagctggaacggcacaaggaggaggtgctcgagacggccgacaaagagctgggggaagcaaagaaagaaataaaacggaagctcagcgagatgcaggatcttgaagagacaatggccaaactgcagctcgaactgaatttatgccagaaggaaaaggaacgtttgtcagacgaactccttgtgaagtccgatttggagaccgtggtgcatcagctagaacaggaaaagcagaggctctctaagaaggtggaatcatttgccgtgaccgaacggcaattaacactagaagttgaaaggatgagactggagcatgggattaagaggcgggaccggagtccaagtagattggacaccttcttgaagggaatcgaagaggagcgggattattacaagaaagagctggaacgtctgcagcatattattcagagaagaagctgctcaacatcctacagtgcgagggagaaaagttccattttccgaactcccgagaaaggcgactacaacagcgaaatacatcagatcacaagggaacgcgatgaacttcagcgaatgctggaacgtttcgaaaaatatatggaggacatccaatccaatgtaaagcttctgacagctgaacgcgacaagctctctgtgttatacaatgaagcccaggaggagctctctgcactacgaaaagaaagcacccagaccaccgctcctcataacattgtaagtctgatggagaaggagaaggagttggccctctctgacctgcgtcgcatcatggcagagaaggaagctcttcgtgaaaaattggaacacatagaggaagtgtctttgtttgggaaatcagagttggaaaaaactattgaacatttgacatgtgtgaatcatcagctggaatctgagaagtacgagttaaagagcaaagtcctgattatgaaagagactatcgaaagcctggaaaacaaactgaaggtgcaggcccaaaaatttagccacgttgctggagacagctcacatcagaaaaccgaggttaacagcctgagaatagtgaatgaacagcttcagcggtcagtcgatgattaccaacatcgccttagcatcaaaaggggtgagttagagtctgcacaggcccagattaagatcctggaggagaagattgatgagctgaaccttaagatgacatcccaggatgaggaggcccacgttatgaagaagactattggcgtgattgataaggagaaagactttcttcaggagaccgtagatgaaaagaccgaaaagatcgccaaccttcaagagaatctcgcaaataaagaaaaagctgtggcacagatgaaaatcatgattagtgaatgcgaatccagtgtcaatcagctgaaagagacactggtgaatcgcgatcgcgaaattaattcactaaggaggcagctggatgccgcccataaggagctggatgaagtgggtagatcaagagagattgccttcaaagaaaaccgaagacttcaagacgatctggcgacaatggcacgggagaaccaggagatctccctcgaactcgaagcagctgttcaggagaaggaagagatgaagagccgtgtccataaatacatcactgaagttagccgttgggagtcccttatggcggcgaaggaaaaagaaaaccaagatctgctggaccgatttcaaatgctccataacagggctgaggactgggaggttaaggcccaccaagccgagggggagagctctagcgtccgacttgagctgctttccatagacactgagaggcggcatttgagggagcgggtggagctgctagagaaagagatacaggaacatatcaatgcacatcacgcttacgagtcccaaatctcatccatggcaaaggccatgagccgactggaggaggagctgcgacaccaagaggatgaaaaagccacagtattgaatgacttgagtagcttacgtgaactgtgtattaagctggattctgggaaagacatcatgacacagcagctgaactctaagaatttggagtttgagagagttgtggtcgaactcgagaatgtgaagagtgaaagcgacctgctgaagaagcaactatctaacgagcgacacaccgtgaagaatctggagtcccttctggctacaaaccgggataaagaatttcattcacacctgacatctcacgaaaaagacacggaaattcagctgctcaaggagaagttgactctgtcagaaagtaagctcaccagccagtcccgggagaacactatgttgagggccaaagtcgcacagctccagactgactatgatgcgcttaaacgtcagatctccacggagagatacgagagagagcgggcaatccaggagatgcgacggcacggcctcgccactccccccctctcctccactttacgtagcccctcgcactcacctgagcaccgcaatgtctag

SEQ ID NO: 13882 - DNA, 1512 bp, synthetic construct
  source 1..1512: mol_type = other DNA; note = Synthetic coding sequence
atgccaaacgtggcagagaccgaacggtccaatgatagtggcaacggagaacacaaatccgagaggaagtctccggaggagaatttgcagggcgccgtcaagtcattctgcacctcagctagcggagctcccctgggacccaagggggacggccactatccatggtcctgccccgtgacccacacacgcgaaaaaatttatgctatctgtagcgactatgcatttctcaatcaggcaacgtctatctacaagacacctaatccctctcggtcaccgtgcctgccggattccaccagcctgagtgctggaaataactcaagcaggtacatcggcattccgactagtacctctgaaataatctacaacgaggaaaattctctggaaaacctgtcgaacagcctgggaaaattaccgttggcatgggaaattgataagagtgagtttgatggagtgaccacgaacagcaagcacaagtcggggaacgctaagaaacaggtatccaagagaaaaactagcgacaagaaagggaggtaccagaaagaatgcccgcaacattcccctctcgaggacataaaacagagaaaagtgctagacttgaggaggtggtactgtattagtcgacctcagtacaaaacgagctgcggcatttcttctctgatttcttgctggaacttcttgtattctacaatgggcgcagggaatctccctcccattacccaggaggaggccctgcatatactgggcttccagcccccctttgaagatatcaggttcggcccgttcacagggaatacaacactcatgcgttggttccgccaaatcaacgaccacttccatgtaaagggatgcagctatgtgttgtacaagcctcacggcaaaaataagaccgctggagaaaccgccagtggggctctcagcaaactgacgcgggggttgaaagatgagagccttgcttatatctaccactgccagaatcactatttttgtcctattggttttgaggcaaccccagtgaaggctaacaaagccttcagtagaggacccctttctccacaagaagttgaatattggatcctgataggcgagtcaagccgaaagcatcccgccatccactgtaagaagtgggcggacattgttaccgatctcaacactcagaaccctgagtacctggatatcagacatctcgagcgtgggttgcagtataggaaaaccaagaaggtgggcggcaacctgcactgcatcattgcatttcagagactcaactggcagcgcttcggactttggaacttcccgttcggcaccattagacaggaaagtcagcctcccacccatgcacagggcatagcaaagagcgaatccgaggataacatttccaagaaacagcacgggaggcttggcaggagctttagcgcatcctttcaccaggattctgcgtggaaaaaaatgagcagtattcatgagaggcgaaacagcggctatcagggatacagcgactacgatggtaacgactag

SEQ ID NO: 13883 - DNA, 813 bp, synthetic construct
  source 1..813: mol_type = other DNA; note = Synthetic coding sequence
atggaagctgaggaattggagcaggagagagagcagttacgcctgcagctctgggaagcgtattgccaggttaggtatctgtgctcccatctccggggtaatgacagcgccgactccgcggtaagcactgattcatctatggacgagagcagcgagacttctagtgctaaggatgtccccgcagggtctctgcggaccgctctgaatgaactcaaaaggctgatacagtccattgtggacggtatggaacctactggctccagacgattggacgatgacagcctcgaggaacagatccggcaaacatccgaggactccagggctctccgagagctgatggagggcgagaggggtaagctccgacagtcacttgaggaacttcagaggctccacagccaggtgaccctgctctctgtggagatgacggccttgaaggaggagcgggacagactaagagtgacgtccgaagataaagagccaaaagagcagctgcaaaaagcaattagggatcgggacgaagcaatcgccaaaaaaaatgccgtagaactggagttagccaaatgtcggatggacatgatgtctctaaactcccagctgctggatgccatccagcagaagctgaatttatcccagcagctagaggcatggcaagacgatatgcaccgagttatagaccgccaactaatggatacccatcttaaagaacgctctcagcctgccgctgctctttgtcgcggacatagcgccggacgcggtgatgagccttccatcgccgagggcaagcgcctgtttagttttttcagaaagatttag

SEQ ID NO: 13884 - DNA, 2379 bp, synthetic construct
  source 1..2379: mol_type = other DNA; note = Synthetic coding sequence
atgttaccagccggcgaaatcggagcctccccagccgccccatgttgcagcgagtcgggagatgaaaggaagaacttggaagagaagtcggatatcaatgtaacagtcttaattggaagtaaacaagtctcagaagggacagataacggcgatctgccgtcctacgtcagcgctttcatcgagaaagaagttggaaatgaccttaagtctctcaagaaactggataaactcatagagcagcgtacagtctcaaagatgcagctcgaggagcaagttttaacaatctcgagtgagatcccgaaacgaatcagatcagcccttaagaatgccgaagaaagtaaacaattcctgaaccagtttctggagcaggagacacacctgttctctgcgatcaattcacatctgctgactgctcagccctggatggacgatttaggtactatgatctcccagatcgaggaaattgaaagacacctggcatacctcaagtggataagtcagattgaagagctgtccgataatatccagcagtaccttatgacaaacaatgtgccggaagcggcctctactttggttagcatggctgagctagacattaaactgcaagagtcatcttgtactcacctgctgggcttcatgagggcaaccgtaaaattctggcataaaatcctgaaggataaacttactagcgactttgaagagatcctggctcagctccactggccatttattgctccacctcaatctcagacagttggcctaagccgaccagcgtcagctccagagatatattcctatctcgagactctgttttgtcaactcctgaagctgcaaacaagtgacgaactgctgaccgaacctaagcagttgcctgagaaatactctctgcctgcttcacctagtgtgattctcccaatccaggtgatgctcaccccgctccagaagagatttcgctaccactttcggggtaacagacagaccaatgtcttgtcgaaacccgagtggtatctggcccaggtcctcatgtggataggtaaccacaccgagttcctcgacgagaaaatacagcccatccttgataaggttgggtccctggtcaatgccagacttgaattctctagggggctgatgatgctggttcttgagaagctggccacagacatcccctgtttgctgtacgacgataacctgttctgccatctggtggatgaagtgcttctgtttgagagggagctgcactctgtgcatgggtatccaggaaccttcgcctcctgcatgcatatactgtccgaggagacatgcttccagaggtggcttaccgttgaaagaaagttcgcgcttcagaaaatggattctatgctgtcgagtgaggcggcttgggtcagtcagtataaggatataaccgacgttgacgagatgaaagtaccagactgcgcggaaaccttcatgaccctcctgctcgtaatcacagatagatacaaaaatttacctacagcatcacgaaaactgcagtttcttgaattgcagaaagatctggtggatgatttccgaattcgtctcactcaggttatgaaggaggaaactagggctagcctaggattcagatattgtgcaattcttaacgcagttaattacatctcgactgtactggctgactgggcagacaatgtgttttttctgcagctgcagcaagctgcactggaagtgttcgccgaaaataacactctttccaaactccagctgggccagctcgcaagcatggaaagctccgtttttgatgatatgatcaatctgctggaacggctgaaacatgatatgctaacgaggcaggtagaccatgtattccgcgaggtcaaagacgccgccaagctgtacaaaaaagaaagatggctgtcactgccctcacaatccgagcaggccgtgatgtcattgtcgagcagtgcttgtcctcttctgctgactctgagggaccacctgctgcagctcgaacagcagctgtgcttctcactcttcaaaatcttttggcaaatgctggtggaaaaattggatgtgtacatctatcaagaaatcatactggctaaccacttcaacgaagggggggcagcacagctccagtttgatatgaccagaaatctgttcccgctttttagccattactgcaagcgtccagagaactacttcaagcatattaaggaggcctgcatcgtcctaaatctgaatgtcggttcggccctgctcctgaaagatgtcttacagtccgcaagtggtcagctgccagccactgcagccctgaatgaggtcggcatctacaaactggcccagcaggatgtggagatcttgctgaatcttagaaccaattggcctaacaccggtaaatag

SEQ ID NO: 13885 - DNA, 1068 bp, synthetic construct
  source 1..1068: mol_type = other DNA; note = Synthetic coding sequence
gtgcgaggtgtccgcgcggccactgcggctgctgtcgctgccaccgcagctagcgggctttctaggagggaagccggaggccgagctggagcagcagccgccgtggtgaggcctccaggtaggaaatgcggcaggtgcagaaggcttgcaaactttccaggccggaaacgtcggcgtcgccgtcggaagggccttggggcaacgactggaggctgcggcgaagcagtgagttctctccatcctgctccacactctccttccagcgtgcgaccagccggacgacgcgccagacgccagagacggggagcgggaagcgcagagcggccaatgtctggggctggtgaggctctcgccccagggcccgttggtccccaaagagtcgctgaggccgggggcgggcagctgggatcaaccgcccaaggcaaatgcgataaggacaataccgaaaaagacatcacccaggcaacaaattcccactttacgcacggcgagatgcaggaccagtcaatctggggaaatccaagcgatggagaactaatcagaacacaaccacaaaggttgccgcagctgcaaaccagcgcacaggtacccagcggggaggagataggcaagattaaaaatggccatactggcctttctaacggcaatggtattcatcacggcgcaaagcacgggagcgccgacaatcggaagttgagcgcgccagtgtcccaaaaaatgcaccgtaagatccagtctagcctgagcgtgaactcagacatctccaagaagtctaaagtaaacgcggtgttttctcagaagaccgggtcctcccctgaggactgctgcgttcattgcatcttggcctgtctcttttgcgaattcttgaccctgtgcaatattgttttgggacaggcttcttgtggcatctgcacaagcgaggcttgctgctgttgctgcggagatgaaatgggcgacgactgtaactgcccgtgtgatatggattgtgggataatggatgcatgttgcgagtcctctgattgtctggagatttgcatggagtgttgcggaatttgctttccatcctag

SEQ ID NO: 13886 - DNA, 378 bp, synthetic construct
  source 1..378: mol_type = other DNA; note = Synthetic coding sequence
atgctgtcccgcctacttaaagagcatcaggctaagcagaatgagcggaaagaacttcaagagaaacggcggcgggaggccattactgccgccacttgtctgacagaggccctggtcgatcatttgaatgtaggagttgctcaggcctacatgaatcagaggaagttagatcacgaagtgaagacccttcaagtccaggcagcccagtttgctaaacagactggacagtggatcggtatggtcgaaaacttcaatcaagccttgaaggaaatcggagatgttgaaaactgggcaagaagtattgagctcgacatgcgcaccatcgcaacagccctggagtacgtttataaaggccagctccagagcgcaccatcttag

SEQ ID NO: 13887 - DNA, 2337 bp, synthetic construct
  source 1..2337: mol_type = other DNA; note = Synthetic coding sequence
atgaccacacggcaggccacaaaggacccattacttagaggagtgtcccccaccccaagtaagattcccgtccgatcacagaagcgcactccctttccaacagtgacatcttgtgccgtcgaccaagagaatcaggatcctcggagatgggtacagaagcctccgctgaatattcagcggccactggtcgacagcgcgggtcctaggcccaaggctcgacaccaggcagagactagccaaaggctggtgggcatcagccaacccagaaatcccctggaggagctgagaccgtctccccgtggccagaacgttggtcccggacctcccgctcaaaccgaggcacctggcactatagagtttgtggccgatcccgcagccctggccaccatactctcaggggagggtgtaaagagttgtcatctaggcagacagccatctctggcaaagagagtgcttgtgcgtggcagccaaggaggcaccacgcagcgggtacagggggttcgcgcctcagcgtacctggctccacggacgcccactcacagactggatccagcacgcgcctcgtgctttagtcgcttagaggggccgggccctaggggtcgtaccctgtgcccccagcgactccaggccctgataagtccgagtggaccctcattccacccatccacaaggcctagttttcaagagctaagacgagaaaccgctgggtcaagccgcacaagcgtgtcccaggcttccggcctgctcttggagactcctgtgcagccagctttcagcctcccaaagggcgagcgtgaagttgttacccacagtgatgaaggaggggtggcctctctgggactggcgcagagggttcccctccgtgaaaatcgtgaaatgtcgcacactcgggattctcatgatagccatttgatgccatctcccgcacccgtcgcccaacccctcccaggacacgtggtgccttgcccctctccctttggaagagctcagcgggtgccctctcccggacctcctaccttgacctcctattccgttttgcggcgcctaacagtgcaacccaagactcgcttcacccccatgccttctacaccaagggtgcaacaagcccaatggctgcggggagtttcaccacagtcctgttctgaggaccctgcgctcccgtgggagcaggtggcagtccgactcttcgatcaggaatcctgcatccgcagtctggaaggatctggcaaaccccctgtggctacgccatcgggcccccacagtaatcgcacccctagcctgcaggaggtgaagattcaacggattggcatcctgcaacagcttcttcgtcaggaagtggaaggcttggtcgggggtcagtgcgtgcctttgaacggaggctcctcactggacatggtcgaactccagccacttctgacagaaatctcgcggaccctgaacgcgaccgagcacaacagcgggacatcccatctccccggcctgttaaaacactctggactgcccaaaccctgtcttccagaagaatgcggtgaacctcagccctgcccccccgccgagcccgggccgcccgaggcattttgtaggtctgagcccgaaattcccgagcccagtcttcaggaacagctggaggttcccgagccctacccaccagctgagccccggcctctcgagagctgttgcaggagcgaacctgagatccccgagtcaagtcggcaggagcagttggaagttcccgagccttgtcctcctgctgaacctcgtccacttgagagctactgcaggatcgaacccgaaataccagagtctagcaggcaagaacagcttgaggtacctgagccatgcccgcccgcagagcccggacccttgcagccctctacccagggtcagtccggtccacccggtccctgcccccgagttgaactgggtgcgagcgagccctgcaccctagagcaccgctcattagaatcaagcttacctccctgctgctcacagtgggcaccagccactactagccttatcttctcatcccagcatcccctctgtgcatcaccccctatctgctctctgcaatccctcagaccacccgctggccaggccgggctgtcaaacctggctcccagaacactcgctctgagagagcggttgaagtcgtgcctgacagccatccactgtttccacgaagctaggctggacgacgagtgcgccttctatacctctagggctccacctagcggacctactcgggtttgtactaacccggtggcaaccctgctggagtggcaagatgcactgtgtttcattccagtgggatctgccgcaccacaagggagcccctag

SEQ ID NO: 13888 - DNA, 1803 bp, synthetic construct
  source 1..1803: mol_type = other DNA; note = Synthetic coding sequence
atgagctgccggtcctacagggtgtcatccgggcaccgcgttgggaacttctctagttgtagtgccatgaccccccagaacctgaacaggtttagggcgaactccgtgtcatgctggtccgggccaggcttccgtggactcggctcttttggatcgaggtcagtgatcacattcggtagttattccccaaggatcgccgccgttgggtctcgtccaattcactgcggagtgaggtttggagctggatgcgggatgggtttcggcgacggcaggggcgtcggactcgggccccgcgccgattcttgtgttggccttgggtttggtgcaggttccgggatcggctacggattcggagggcctgggttcggctacagggtgggtggcgtcggagtgcctgccgccccctccatcacggctgtaacagttaataaatccttattgactccactcaatttagagattgatcctaatgcccaacgggtgaagaaagacgagaaagaacagatcaaaaccctgaataataagtttgcgtccttcatcgataaggtgagatttctagaacaacagaataaattattagaaacaaaatggtcgttccttcaggaacaaaagtgcatccgcagcaatctggagccacttttcgagtcctatattactaaccttcggcgacagcttgaggtcctggtcagcgatcaagcccggcttcaagctgagagaaaccaccttcaagatgttcttgagggctttaagaagaagtacgaggaagaagtggtttgtagggcaaacgcagaaaacgaatttgtcgccttgaagaaagatgtggacgccgcgtttatgaataagagcgacctagaggccaacgtcgataccctaacgcaggaaattgactttttaaagactttgtatatggaggaaatccaattactccagtcccacatctccgagacatctgtcatcgtgaaaatggataactcacgagatctcaatctggacgggatcatagccgaagtgaaagcacagtatgaagaggtggctcgccgcagccgggccgatgccgaggcatggtaccagactaaatacgaagagatgcaggtgacggccgggcagcactgtgataacctacgaaatatccgcaacgaaattaatgagttaacccgactgattcagcggttgaaggctgagatcgagcacgccaaggcccagcgtgccaaacttgaagccgccgtggcagaagccgaacagcagggagaggccaccctatctgacgctaaatgtaaattggccgatctcgaatgcgccctgcagcaggccaaacaggacatggcgaggcagctttgcgaatatcaggagttgatgaatgcaaagctcgggttggacatcgaaatcgctacctacaggagattgctggaaggagaagaaagtcggctgtgcgagggcgtcggaccagtgaacatttcggtgtcgtcgtctagaggtggtctggtgtgtggacctgaacctctggtcgccggatctaccctgtccagaggaggcgttacattctccggctccagctccgtttgtgcaacatcaggcgtcctggcgagttgtggtccaagtctcgggggcgctcgcgtggcacccgccaccggggacctgcttagcaccggcacacggtcaggatctatgctgatcagcgaagcgtgtgttcccagcgtcccctgtcccctgccaactcagggcgggttctccagctgctcaggaggccggtcgtcatccgtcaggtttgtgtccacaactacatcttgcaggacgaaatactag

SEQ ID NO: 13889 - DNA, 1542 bp, synthetic construct
  source 1..1542: mol_type = other DNA; note = Synthetic coding sequence
atgtcctaccattcttttcagccgggatcacggtgcggatcccaaagcttctccagctacagtgcagtaatgcctcgaatggtgactcactatgccgtatcaaaggggccatgccgaccaggcggcggtagaggcctcagggcgcttgggtgcttaggctcgcgaagcctatgcaacgtgggctttggccgcccgagagtcgcttccaggtgtggaggcaccttgcccggctttggctatcgcctgggcgccacatgcggcccttcggcttgtattacacccgtaaccatcaacgagtcactattggttcctctcgcactggagattgaccccacggtgcaacgggtgaaaagagatgagaaggaacaaatcaaatgtctaaataatagattcgcatcttttatcaataaggtgcgtttcctggagcaaaaaaacaaactcctggaaactaagtggaacttcatgcagcagcaacgatgttgccagacgaacatcgagccgattttcgaggggtatatctcagctctgaggcggcagctggactgcgtgagtggtgatagggtgaggctggaaagtgaactctgcagtttgcaagctgccctggagggatataaaaaaaaatatgaggaagagctctccctccgcccatgtgtggagaacgaatttgtggctctgaagaaggacgtggatacagccttcctaatgaaagcggatcttgagacaaatgcggaggctttagtccaggagatcgatttcctgaagtcgctgtacgaggaagagatttgcctcctgcagtcacagatcagcgagacttctgtcattgtgaagatggataactcccgcgagctagacgtggatggcattatagcggagattaaagcccaatatgatgacatcgcctcaaggtctaaagccgaggctgaggcctggtaccagtgtcgatacgaagaattgcgcgtgaccgctggcaaccactgtgataatctgcgaaaccgcaaaaacgagattttggagatgaataagctgattcaaagactgcaacaggaaaccgaaaacgtaaaagctcagaggtgcaagcttgaaggcgctatcgccgaagctgaacagcagggagaagcagccctgaacgatgcgaagtgcaaattggctgggctggaggaggctctgcagaaggccaagcaggatatggcatgtctcctgaaggaatatcaggaggtcatgaacagcaaactagggctggacatcgagattgcaacatatagacgcctgcttgagggcgaggagcacagactctgtgaagggattggacctgtgaacatctcagtatctagctcaaaaggggctttcctttatgagccatgcggagtaagcactcccgtgttatcaacaggggtacttaggtctaacggtggttgcagtattgtgggcaccggtgaactgtatgttccatgtgaaccccagggtctgttatcctgcggatcaggaagaaagtccagcatgactcttggcgcaggcggttcgtccccatcccacaagcactag

SEQ ID NO: 13890 - DNA, 1632 bp, synthetic construct
  source 1..1632: mol_type = other DNA; note = Synthetic coding sequence
atgatgccaacgcccgtgattctcctgaaagaagggacggacagctcacagggaatccctcagctggtgtccaatatcagtgcctgtcaggtgatagcagaggctgttcgtacaacactcgggcccagagggatggacaagctcatagtcgacggaagagggaaggccaccatctctaatgacggcgctacaattcttaagctgttagatgtggtccaccccgcggccaagactttggtagacatcgccaaatcgcaagatgctgaagtgggggatggtacaacttccgtgaccttgctcgcagcagaatttctaaaacaggtgaaaccatatgtcgaggaaggcctccatccacagattatcatccgagcgtttcgcacagcaacccagctcgcggtaaataagattaaggaaattgccgtgaccgttaagaaagctgacaaggtggaacagcgtaagctcctggagaaatgcgctatgaccgctctgtcctctaagctgatttctcaacagaaggcgttctttgctaagatggttgtagacgcagtgatgatgctcgatgacctccttcaactcaaaatgattgggattaagaaagtgcaggggggcgcattagaggattctcagcttgttgccggagttgctttcaagaagacattcagctacgctggcttcgaaatgcagcctaaaaagtaccataatcctaaaatcgccctgctgaatgtggaacttgagcttaaggcggaaaaggacaacgcggaaattagggttcatacagtggaagactaccaagctatagtggatgcagaatggaacattctgtacgataaacttgagaagatccaccactctggggccaaagtggttttatcaaagctcccaatcggtgacgttgccacccaatattttgccgaccgcgacatgttctgcgccggtcgggtgccagaggaggatctcaagagaacgatgatggcgtgcggagggagcatccagaccagtgtaaacgcactgtccgcggacgtgctcgggcgttgccaggtatttgaggagactcagatcggcggggagaggtataacttctttaccggctgtcccaaggccaaaacatgtaccttcatcttacgtgggggtgcagaacagtttatggaggagacggagcgcagtctgcatgacgcgattatgatcgttagaagggccattaagaatgactcagtcgtcgccggcggcggcgctattgagatggaattaagcaaatatcttcgtgattattcccgcacaataccggggaaacagcaactgctgatcggagcatatgcaaaggctctggagattatccctcgccagctgtgcgacaatgctggctttgacgccactaacatattaaataagctgcgcgctcggcacgcacagggaggcacttggtacggtgtcgacataaacaacgaggacattgctgacaattttgaagcttttgtgtgggagccggcaatggtgcgaattaacgcgttgacagcagcttcagaagccgcttgtctgatcgttagtgtcgatgaaacgataaagaaccccaggagcactgtcgatgcccctaccgcagccgggagaggcagaggcagagggaggcctcactag

SEQ ID NO: 13891 - DNA, 1479 bp, synthetic construct
  source 1..1479: mol_type = other DNA; note = Synthetic coding sequence
atggccccggtcggggttgaaaaaaagcttcttctagggcctaacggcccagccgtggccgccgcgggagatctgacatctgaggaggaggagggacagtccctgtggtctagtatactgagcgaggtgagtactcgggcaaggtctaaactgccgagtggcaaaaatatccttgtgtttggggaagatggatccgggaagaccacgctcatgaccaagctgcagggagccgagcacggtaagaaaggtcgggggcttgaatatctatacttatcagtccacgatgaggatcgcgacgaccatacacgctgtaacgtctggattctggatggagatctgtaccacaagggattattgaaatttgcggttagcgccgaaagcttgcccgagactttggtgatcttcgtcgcagacatgtcccgcccctggactgtgatggagagcttgcagaagtgggcaagtgttctgagggaacacattgataagatgaaaatcccacccgagaagatgcgggagcttgagaggaagttcgtgaaggacttccaggattatatggaacccgaagaaggatgtcagggctctccccagcggcgaggccccttaacctccgggtcagacgaagaaaatgttgccctgccccttggggataacgtgttgacacataacttagggatccctgtactggtagtctgcactaagtgtgacgcagtgagtgtgctcgaaaaggaacacgactatcgggatgaacatctcgatttcatacagtctcacctcagaagattctgcctgcagtacggcgctgcgcttatctacacgagtgtcaaagaggagaagaatctggatctcctctacaaatatatcgtccataagacctacggattccatttcacaacgcccgccctggtcgtggaaaaagatgcagtgttcattcctgcgggatgggacaatgaaaaaaaaattgccatcctgcacgaaaatttcacaactgtaaaaccggaggacgcttatgaggacttcatagtaaagcctcctgtgcggaaattagtgcacgataaagagcttgccgcagaggacgagcaggtatttctcatgaaacaacagtctcttctggctaagcagcccgcaacccctactcgggcctcagagtctcctgcacgcggaccatctggatcccccaggacacagggcagggggggccctgctagcgtgccatcatcgagccctgggaccagtgtaaagaagccagatcctaatattaaaaacaacgccgccagcgagggggtgctggcatcatttttcaactctctgctttctaaaaaaacaggcagccctgggagtccaggtgccggaggtgtccagtcaactgccaagaagtctggacagaaaaccgttctttccaatgtccaggaggagctcgatagaatgacacgaaagcccgatagcatggttacgaattcttcaaccgaaaacgaggcttag

SEQ ID NO: 13892 - DNA, 540 bp, synthetic construct
  source 1..540: mol_type = other DNA; note = Synthetic coding sequence
atggacaaagactttgacaagctccatgagttcgtcgagatcatgaaggagatgcagaaagatatggacgaaaaaatggatattctgattaacacccagaaaaactataaactgccacttagaagggcccctaaggagcagcaggagctcaggctgatgggtaaaactcacagggagccccagcttcgacccaagaagatggacggcgcctctggagttaacggtgctccatgtgcattgcacaagaaaaccatggcccctcagaagactaaacagggctccctggaccctctgcaccactgcggcacatgctgtgagaaatgccttctttgtgctttaaaaaacaactataaccgtgcggcgccactgaaagaggcacgccacctgcttactgcaaattccattgatccatccgccgccctggtacttctcattgaatttctgctcttaaccctggtgactggtgccgccgctcccggcttggatgcgtgcggacaccagcgtaatatgagggacgagattaactccgagagaaggtag

SEQ ID NO: 13893 - DNA, 3600 bp, synthetic construct
  source 1..3600: mol_type = other DNA; note = Synthetic coding sequence
atggcatccgcaggcacccagcactactccatcggtcttaggcagaaaaactcctttaagcagtctggcccttccggcacggtacctgcgacccctccagaaaagccttccgaagggagggtgtggccccaagcacatcagcaggtaaagccaatttggaaattggaaaagaagcaggtagaaaccctgtcggcgggactcggcccagggttgctgggggtcccaccacaacctgcttactttttctgtcccagtactttatgctcatccgggactacggcggtgatagctggccacagttcttcctgctatcttcacagtttgccggatctctttaactccactctgctgtaccgacgcagcagttatagacagaaaccataccagcagttagaaagcttctgtctccgatccagtccatctgaaaaaagccccttctcactgccgcaaaagagtctgccagtaagcctgactgcaaacaaagctacttccagtatggtgttttccatggctcaacccatggccagcagtagcaccgagccttatctgtgcttggccgcagctggtgagaatccttctggcaagtccctggcctccgcaatttcgggcaagatcccatcaccactcagtagctcatacaagccaatgttgaataacaattcttttatgtggccaaactctactcccgtgccgctcctgcagaccacccagggcctgaaaccggtgagcccacctaaaatccagccggtttcctggcaccactccggcggcaccggagattgcgcaccccaaccagtggaccacaaagtgcccaaatctattggcacggtgccagcagacgcttccgcccacattgcgctgtccacggcttcctcgcatgacacttctactacttccgtggcctctagttggtataatcgcaataatttagctatgagagccgaacctctctcctgcgcgctcgacgacagctcggattctcaagatcccacaaaagagataaggtttactgaggccgttcgcaaacttacagcacgaggcttcgaaaaaatgcccaggcagggatgccagctagagcagtcttccttccttaatccttccttccagtggaacgttctgaaccggtccaggagatggaaacctcccgccgtgaatcagcagtttcctcaagaggatgctggctccgtcaggcgagtcctgcctggagcatccgataccctggggctcgataacactgtgttttgtaccaagaggatctccattcatcttttggcctcgcacgcatcgggactgaaccataaccctgcgtgcgaatcggtgatagacagcagtgccttcggagaggggaaagctccaggaccgcctttcccccagaccctggggattgcaaatgtcgctacccgactgagttccattcagttaggccagtccgaaaaggagaggcccgaggaggcccgtgagttggattcgagtgatagagatatctcctcagccacagatctgcagcctgatcaggcagaaacagaagatacagaagaagaactagtagatggtctggaggactgttgcagccgtgacgagaatgaggaggaggagggcgattcagaatgttctagtctgagtgcagtatcgccgagcgagagcgtggcgatgatttctcgcagctgcatggaaatccttactaagcctctttcaaatcacgaaaaggtggtacgcccagctctgatctacagcttgttcccgaacgtgccacccacgatctatttcggcacccgagatgaacgggtcgagaagctcccttgggagcagcggaagttactcaggtggaaaatgtctactgtgaccccaaacatcgtcaagcagacgatcggcaggtctcacttcaagatctctaagcgaaacgacgactggctcggttgctggggacatcacatgaaaagcccctcctttaggtctataagggaacatcagaagttgaaccatttccctggctcctttcagatcgggcgcaaggatcgcctctggaggaacttatcacgtatgcagagccgcttcggtaaaaaggagttctctttcttcccacaaagtttcatcctgcctcaggatgctaagctcctgaggaaagcttgggaatccagttctcggcagaaatggatcgtgaagccaccggcctccgctcgtggcataggcatacaggtcatccacaagtggtcccaactgccaaagcgaagacctctcctggtgcagagatatctgcacaagccttaccttatctcaggaagtaagtttgacttacggatctacgtttacgtaactagctacgacccactgaggatttatctatttagcgatggcctcgtgcggttcgcctcttgtaaatatagcccatccatgaaaagccttgggaataagttcatgcatctcactaactactccgtgaacaagaagaacgcagaatatcaagcaaatgcggatgaaatggcctgccaaggacataaatgggccctgaaggccctgtggaattacttgagtcagaaaggtgtgaactcagacgcaatttgggagaagatcaaggacgtggtcgtaaagaccattatctctagcgaaccctacgtgacctctctgctcaaaatgtatgtccggcgcccgtatagttgccatgagctctttgggtttgatatcatgctggacgagaatttgaaaccctgggttcttgaagtgaacatttcaccctcactgcattcctcaagtcctctggatatatcgatcaagggacagatgatccgcgatcttctgaatctcgcgggctttgtattaccaaacgcagaagacatcattagcagcccgtcctcctgtagcagctccacaaccagcctgccgacttctcctggcgataagtgccgtatggccccagagcatgtcaccgcccagaagatgaagaaagcttactacttaacgcagaaaatccctgaccaggatttctacgccagcgtgctcgacgtattgactccagatgacgtccgaatactggtggagatggaggacgaattttcccggcgaggtcagttcgaaaggatattcccttcgcacatctcctccagatacctcaggtttttcgagcagccgcgctacttcaacatcctgactacacagtgggagcagaaataccatgggaacaagctgaagggggtggacctcctgagaagctggtgctataaaggatttcatatgggtgtggtcagcgattcagccccggtgtggagcctgccaacatccttgctgactattagcaaggacgacgtgatccttaacgcatttagcaagagcgagacatcaaagttaggcaagcagtcctcctgcgaagtcagcctccttctcagtgaggacgggaccacccccaaatctaagaaaactcaggcaggtcttagtccatatccccagaaacctagttcctcgaaagattccgaggatacaagtaaggagccctctctctccacacagactttaccagtaataaagtgctcaggccagacgagcagactctcagcatcgagtacctttcagtcgatcagtgacagtctgctggctgtttctccatag

SEQ ID NO: 13894 - DNA, 2772 bp, synthetic construct
  source 1..2772: mol_type = other DNA; note = Synthetic coding sequence
atgctgagaaggggtagccaagctttgagacgattttcaacaggccgggtttatttcaaaaataagttaaaactcgctctgattggacagtcgttgttcggccaggaggtgtacagtcacctgagaaaggagggacaccgggtggtcggcgtgttcaccgtccctgataaggatggtaaggcagaccccctggcccttgcggcggagaaggacggtacaccagtcttcaaactgcccaagtggcgggtaaagggtaagacaattaaggaggtggctgaggcttatcgttccgtcggcgctgaacttaacgtactccctttttgcacacaatttatccccatggacataatcgattctcccaaacatggctccataatttatcacccctccatacttccgaggcacagaggcgcgtcggcgatcaattggaccctcattatgggagacaaaaaagcgggattctcggtcttttgggcagatgacggtcttgataccggcccgattctcctgcagcgctcttgcgatgtggaacccaacgatacagtggacgctctttacaaccggtttctcttccccgagggcattaaggcaatggtggaggcagtgcagctcatcgccgacggaaaggcgcctagaattccccagcctgaggagggcgcaacgtacgagggtatccagaagaaggaaaacgccgaaattagctgggaccaaagtgctgaggtgctacacaactggattaggggccatgacaaagttcccggcgcttggacggagattaacggccagatggtgacgttttatggttcaacgctcttaaactccagcgtgcccccgggcgaacctctcgaaattaaaggagctaagaagcccgggctggtgacaaagaatggactggtgctcttcggcaatgacgggaaagctttgacagtgaggaacctgcaattcgaagatggcaaaatgatcccagcctctcagtatttcagcactggcgagaccagcgttgtggagttgacagctgaagaagtcaaagtcgctgagactattaaggtcatctgggccggcatcctctcaaacgtgcccataatcgaggacagtactgactttttcaaatccggagcctcatcaatggacgtcgcgcggcttgtggaggagattcgacagaagtgcggtggcctccaactgcagaatgaggacgtgtacatggcgacaaaatttgaagggttcatccaaaaggtggttagaaagctgcgcggcgaggaccaggaggtggagcttgtcgtggactatattagcaaagaggttaacgaaattatggtgaaaatgccatatcaatgcttcattaatggccaattcacggacgctgatgatggcaagacatacgatacgatcaaccctacagatgggtctacgatctgtaaagttagctacgcttccctggctgatgttgacaaggcagtggccgcagccaaagatgcctttgagaatggtgagtggggccgcatgaatgctagagagcgcggtcggctaatgtaccggctggctgaccttctggaggagaatcaggaagagctggcaaccattgaagcactggattctggtgccgtttataccctggccctgaagacccatataggcatgagcgtgcagacctttaggtattttgccggatggtgcgataaaatacagggttctaccatcccaataaaccaggcccggccaaaccggaatttgacgttcacgaagaaagagccactgggcgtgtgtgccattatcatcccatggaattacccactcatgatgttagcttggaaaagtgctgcttgtctggcagcaggcaacacgttggtccttaagccagcccaggttacgcctcttacggctttaaaatttgccgagctcagcgtaaaagccggattcccgaaaggtgtgatcaatattattccagggagcggaggcatcgcagggcagcggctgtcagaacatcccgacattcgcaagcttgggttcaccgggagcacccccatcggcaaacaaattatgaagtcctgtgcggtgagcaatctgaaaaaggtgagtctagaacttggtggaaagagccctcttatcatattcaatgattgtgaactagataaggcagtacggatgggtatgggagcagtatttttcaacaagggtgagaactgcatcgctgccggccgactctttgtggaagagtccatccacgatgagttcgtcacaagagtggtagaagaaattaaaaaaatgaaaatcggtgaccctctggaccgtagcaccgaccatggcccccaaaatcacaaagcccacctggagaaactactgcagtactgcgaaacaggggtgaaggagggcgccacacttgtgtacggcggaaggcaagtccagcgtcctggcttcttcatggagccaaccgtctttacggacgttgaggactacatgtacttggcaaaggaagagtcgtttggtcctattatggtgatttcaaaatttcagaatggcgacattgacggggtgctgcagcgcgctaatagcaccgagtacggcctggcgtctggtgtattcacacgggacattaataaggccatgtacgtgagtgagaagttggaggccggcactgtcttcatcaacacctataacaagactgacgtggcagctcctttcggcggggtgaagcaatctggttttgggaaggacctgggagaagaggccctgaatgaatatctgaagactaaaacagtcactctcgaatactag

SEQ ID NO: 13895 - DNA, 1323 bp, synthetic construct
  source 1..1323: mol_type = other DNA; note = Synthetic coding sequence
atggaaggcgtactctacaagtggacaaactacctgtcaggatggcagcctcgctggttcctgctttgcggaggtattctgagctactatgatagccctgaggacgcgtggaaaggttgtaaggggtctattcagatggcagtgtgtgaaatccaggtgcactctgttgataacacccgcatggacctgattattcctggcgagcagtacttctatctaaaggctcgctctgtggctgagcgtcaacgctggctggtggccctggggtccgcaaaggcgtgcctgaccgattctcggactcagaaggaaaaagagtttgcagagaacactgaaaacttgaagacaaagatgagtgagctgaggttgtattgcgatctgttagtccagcaggtggataaaacgaaggaagtgactaccaccggagtgagcaacagcgaagaaggaattgacgtggggacattgttaaaatctacttgcaatacattcctgaagacactcgaagagtgtatgcaaatcgcaaatgcagccttcactagcgaactgctttataggacccctcctggcagtcctcagctggctatgttgaagtctagtaaaatgaagcatcctatcataccaatacacaactccctggaaaggcagatggaattgtccacctgcgagaacggcagtctgaatatggaaatcaatggtgaggaagaaattttaatgaaaaataagaacagcctgtacctgaagtctgcagaaatcgactgttcaatttccagtgaggagaatactgatgataatatcaccgttcagggggaaatcaggaaggaggatggaatggaaaacctgaagaatcacgataataacctcacacagagcggatcagatagtagttgttctcccgagtgcctgtgggaggagggtaaagaagtgatccccacgttcttttctacaatgaatacctccttctctgatatagaactgctcgaagacagtggaattcctaccgaagcttttttggcctcctgctacgctgtagttcctgtgctcgacaaattggggcctacagtatttgccccggtgaaaatggacctggtagggaatattaaaaaggtcaaccagaaatacatcaccaataaggaggaattcaccacactgcaaaagattgtcctgcacgaggtggaggctgacgtggcacaagtgcggaattcagcaaccgaggccctcctctggctgaagagggggctgaaattccttaagggcttcttaacggaggtgaagaatggcgagaaagacatccaaactgcattgcgcaatcctaccgagaatacgtag

SEQ ID NO: 13896 - DNA, 1272 bp, synthetic construct
  source 1..1272: mol_type = other DNA; note = Synthetic coding sequence
atggcgatctgtcagttcttcttacaaggccgctgccgcttcggggataggtgttggaacgagcatcctggcgcccgaggagccggggggggccggcaacagccccaacaacagcctagcgggaataaccgcaggggctggaatactacaagccaaagatacagcaatgttattcagccatcctctttcagcaagtcgaccccttggggcggctcccgcgaccaggaaaaaccctactttagtagcttcgattcgggtgcaagcaccaaccgcaaggagggctttggcttgagtgaaaatccattcgcctccttgtctccagacgagcagaaggatgagaaaaagctgctcgaaggcatcgtgaaagacatggaggtatgggagtcttcaggacagtggatgttctcagtgtattccccagtgaagaagaagccaaatatttctggattcaccgacataagccctgaggagctgcggctggagtaccataacttcctgacctccaacaacctgcaatcatatctgaattccgtccagcgattgataaaccagtggcgtaacagggtcaacgagctgaaatccctgaacatcagtaccaaggtggccctgctgtctgacgtgaaggatggcgttaatcaggccgcaccggcctttggttttggaagcagtcaggcagctactttcatgtcacctggattccccgtgaataactctagttccgataatgctcagaatttctcttttaagactaactccggattcgcggcagcttcctccgggagtcccgccggtttcggctcctcccctgcctttggtgcagcggccagtaccagttctgggatttccacctccgcgcccgcatttgggttcggaaaaccagaggttacctccgctgcctccttctctttcaagtcccccgctgcaagcagctttggctcgcccggtttctctgggctgcccgcatctttggcgactggaccggtccgggctcccgtggctccagctttcggcggggggtccagcgtggctggctttggttcgcctggaagtcactcccacacggcttttagcaagccttcttctgatacgttcggcaatagttccatttccacatctctgtcagcctctagctccattatcgccacggataacgtgctgtttacccctcgtgacaaactaaccgttgaagagttggagcagttccagtccaagaagttcacactagggaagatccctctaaaaccacctccgctggagttgctcaacgtgtag

SEQ ID NO: 13897 - DNA, 1323 bp, synthetic construct
  source 1..1323: mol_type = other DNA; note = Synthetic coding sequence
atgatggccgatgaagaagaggaagtaaagcctattctccagaaactgcaagaactggtggaccagctgtatagcttccgtgactgctactttgaaactcactcagtggaggacgctggcagaaaacagcaggatgtacagaaggagatggaaaagaccttgcagcagatggaggaagtggtggggtccgttcagggaaaggcccaggtgctgatgttgaccggcaaagcactgaatgtcacacctgactactctcccaaggccgaagaacttttgagtaaggccgtaaaattggaacccgaattagtcgaggcctggaaccagttgggggaagtctattggaaaaagggagatgtcgctgctgcccatacctgcttcagcggagccctcactcactgcagaaacaaagtatctctgcagaacctgtccatggtcttacggcaactgaggacagatacggaggacgaacattcacatcatgtgatggatagcgtgagacaggcaaagctagctgtacagatggacgtacatgacggccgctcatggtatatcctggggaactcttatctcagtctctatttcagcactggtcagaacccaaaaatttcacaacaggcactgagtgcctacgcacaggccgaaaaggtggatagaaaggcgtcttcaaaccctgatctgcatctcaaccgagcaacactgcataagtatgaagagagctacggtgaagctctggaaggcttcagccgagccgccgctctcgaccctgcttggcccgaacctagacaaagggagcagcaattactggaattcttggatcgacttacttcgcttttggagtccaagggcaaggtcaagactaagaaactccagtcgatgcttggatccctcagaccggcacaccttggaccctgcagcgatgggcactatcagtcagcatcagggcaaaaagttactctagaactaaagccgttgagcaccctacagccgggcgtcaattccggtgccgtcatcctggggaaggtggtcttttcactgacaacagaggaaaaggtgccatttacatttggcctcgtggattcagatggcccatgttacgctgtgatggtttacaacattgtgcagtcatggggtgtactgatcggcgacagcgttgctatacctgaaccaaaccttcggctgcacaggatccagcacaaaggaaaggattattctttcagctcagtccgcgtggaaactcccctgctgttggtggtgaacggcaagcctcaagggtctagtagccaggctgtggccacggtggcaagtagaccccagtgcgaatag

SEQ ID NO: 13898 - DNA, 1341 bp, synthetic construct
  source 1..1341: mol_type = other DNA; note = Synthetic coding sequence
atggaagagaccatcaaggatcctccaactagcgcagtgctcctcgatcattgccacttctcccaagtgatctttaactctgttgagaagttctatatcccggggggagatgtgacttgccattacacattcacccaacacttcattcccaggcgaaaggactggataggcattttcagggtaggctggaaaactaccagggagtactacacttttatgtgggttaccttgccaatcgatttgaataacaaatctgccaagcagcaagaggttcagttcaaggcctactacctacctaaagatgacgaatattatcagttctgctacgtagatgaagatggagtcgtgaggggcgcctctatccccttccagttcagacccgagaatgaggaggatatcctggtggttaccactcagggtgaggttgaggagatcgagcaacacaacaaggagctttgcaaggagaaccaggaactgaaggatagctgcatttccctgcagaaacagaacagtgacatgcaggcggaactgcagaagaagcaggaggaattggagaccctgcaaagcatcaacaaaaaactggagctgaaggtgaaggaacagaaagattactgggaaactgagctattgcagctaaaggagcagaatcaaaaaatgagtagcgagaatgagaaaatgggaataagagtcgatcagctgcaggcgcaacttagcacccaggagaaagagatggagaagctggtgcaaggagatcaagacaagacagagcagctggagcaactgaaaaaagaaaacgaccatctattcctgtccctaacggagcagcggaaagaccagaagaagctggaacaaacagttgagcagatgaaacagaacgaaaccacagcaatgaaaaaacaacaggagctcatggacgaaaatttcgacttgtccaaacgcctgtcagagaatgaaatcatttgcaatgcactccagcgacagaaggagaggctggagggagagaatgacttgctcaagagagagaacagtcggctgctgtcatatatgggcctggatttcaatagcttaccataccaagtgcctacatccgacgagggtggggccaggcagaatcctgggcttgcttatggcaatccctactcagggatccaggaatccagctcgccctccccactctccataaagaaatgccctatttgtaaggctgatgacatatgcgatcatacacttgagcagcagcaaatgcagccactatgttttaactgtcccatctgtgacaaaatatttccagccactgagaaacagatctttgaagaccacgtgttttgtcactcactgtag

SEQ ID NO: 13899 - DNA, 1329 bp, synthetic construct
  source 1..1329: mol_type = other DNA; note = Synthetic coding sequence
atggctctgcctggtgccagggctcgagggtgggctgccgcggctagagccgcccagcggaggcggcgtgtggaaaacgcaggtggctccccttcgcctgagcccgccggtcggcgagccgccctgtacgtgcactggccttactgcgaaaagagatgctcttactgcaactttaacaagtatataccccgtcgactggaagaggccgctatgcagaagtgtctcgtgactgaggcccagaccctgctcagattgtcaggtgttcaaagggtcgagtcagttttctttggaggggggacacctagcctggctagtcctcacaccgtggcggctgtgcttgaagccgtggcccaggccgcccatttgccggctgatttagaggttactctggaagccaaccccacctcagcacccggcagcagactggcggaattcggcgctgcaggagttaataggctgagcattggattgcaaagcctggacgatacggaacttcgtctgctaggtaggacccatagcgcctgcgatgccctgcgtacattagctgaggcacggaggttatttccaggacgagttagtgtggaccttatgcttggcttgcctgcacaacaggtgggaccttggctggggcagcttcaggaactgctgcaccattgcgatgatcacctctccctctaccagctgagcctcgagcgagggacagcattatttgctcaggtgcagcgtggggctctgcccgccccggaccctgaactcgccgcagagatgtatcagcggggccgagccgtcttacgagaagctggctttcaccaatacgaggtgtccaactttgctaggaatggtgctctgtccacccacaactggacgtactggcagtgcggccagtacctgggggttggacctggagcccatggtcggttcatgcctcagggagccggaggtcacactcgagaggcacgcattcagaccttagagcctgataactggatgaaggaagtcatgctgttcggccacgggactcgcaagcgagtgcccttggggagactcgagctcctcgaagaggtgctggctctaggcctgcggactgacgtcggtattactcatcagcattggcagcagttcgaaccccaattgactctttgggacgtctttggggccaataaagaggttcaggaactgttagaacgaggactccttcagctggaccatcgtggccttaggtgtagttgggagggactcgcagttctagattccctactccttacactattaccacaattgcaagaagcctggcagcagaggacgccgtcaccagtcccaggagggtag

SEQ ID NO: 13900 - DNA, 1278 bp, synthetic construct
  source 1..1278: mol_type = other DNA; note = Synthetic coding sequence
atggacaagaacataggcgaacaattgaacaaagcttacgaagcttttagacaggcctgtatggaccgggattccgcagtgaaggagctgcagcaaaaaacggaaaattatgaacagcggattcgagagcaacaggagcagttatccttgcagcagactataatcgataagctcaagtcccagctcctgttggtgaacagcacccaggacaataactacgggtgtgttcccctgctcgaggacagcgagacccgcaagaataatcttaccttagatcaacctcaggacaaggtgatcagcgggattgcacgcgagaaattacctaaggtacggcggcaggaggtcagtagtccccggaaagaaacaagcgccagaagcttaggcagccctcttctgcacgagcgtgggaacattgagaagacattttgggacctcaaggaagagttccacaagatatgcatgctggccaaagcacagaaagatcacctttccaagttaaacatcccagatacagctaccgagactcagtgcagtgtccccatccagtgcactgataagacagataagcaggaggctctgttcaaaccgcaggctaaagacgatattaacagaggcgctccgtccattacttccgttacacccagaggactgtgtcgcgatgaggaggatacatcattcgaatccttgtccaagttcaacgttaagtttcctccaatggacaatgacagtacctttctccacagtactcccgagaggcctggcatcttgagtccagccacctcagaagccgtttgccaggagaagtttaatatggagttcagagataacccagggaactttgtgaaaactgaagaaaccctttttgaaatacagggcatcgacccaatagcctcggcgatacagaatttgaaaaccaccgataaaacaaaaccttcaaacttggttaatacatgcattcgcacaacattggacagagctgcctgcctccccccaggcgatcacaatgccctgtatgtaaactcgttccccctgcttgatccctctgatgctccgttcccctccctggactcaccgggtaaagccatccgaggtccccagcagccaatttggaagcctttccctaatcaggacagcgattccgtggtgctgtctggcactgatagtgagctccatatcccccgggtgtgcgaattttgccaggcggtgttccctccaagtatcacctctcgcggcgatttccttaggcaccttaacagtcactttaacggggagacctag

SEQ ID NO: 13901 - DNA, 2055 bp, synthetic construct
  source 1..2055: mol_type = other DNA; note = Synthetic coding sequence
atggaaaacctgcagacaaacttcagccttgtgcaaggatccaccaagaagctaaatgggatgggggatgacggatccccaccagccaagaagatgatcacggacattcacgctaatggcaaaactattaataaagtgcccacagtcaaaaaagagcacttggacgattatggcgaggctcccgtggagactgacggagagcatgttaagcgcacctgcaccagtgttcctgagactctgcacctgaaccccagtctgaaacacaccctcgcccaattccacctgtcctctcagtccagtttaggcgggccagcggcatttagcgctcgccactcccaagagtcaatgagccccaccgtgtttctgccactgccttcaccccaggtgctgccaggaccccttctaatcccatctgactcatccacagagctcacacagacagtactggagggggagtccatcagttgctttcaggttggcggcgagaaacggctgtgcttgccacaagtgctaaattccgtgctacgggagttcaccctgcaacagataaataccgtctgcgatgagctttacatatattgtagtcgatgtacttcagatcagttacacattcttaaagtactgggcatcctgcctttcaacgccccctcttgcggcctgatcacgctcaccgacgcccagcggctttgtaacgcactgctgcgccccaggaccttcccacagaacggttccgttctgcctgccaagtcaagcctggctcagcttaaggagaccggctccgctttcgaagtcgagcatgaatgtcttggcaagtgccaaggtttatttgcaccccaattttacgtgcagcctgatgccccctgcatacaatgcctcgagtgctgcggaatgttcgcgcctcagacattcgtgatgcatagtcatcgtagcccagataagcgaacgtgtcattggggcttcgaatcagccaaatggcattgctacctgcacgtgaatcaaaaatatctcggcacaccggaggagaagaaattgaagataatactcgaggaaatgaaggagaagtttagtatgagaagcgggaagcgcaatcagtctaagactgacgctccgtccggaatggaacttcagtcatggtaccccgtcatcaagcaggaaggggaccacgtatcccagacacactcatttttgcatccctcctattacctttacatgtgtgataaagtcgtcgctccaaatgttagtctaacaagtgccgtctcccagtcaaaggaattgacaaagactgaggcctccaaatctatttcgagacagtctgagaaggcccattccagcggaaagttacagaagaccgtgagttatccagacgtaagcctggaagaacaggaaaaaatggatcttaaaacttcgcgcgaattgtgctctcgcctggacgccagtatttcgaacaactccactagcaaaagaaaaagtgaaagtgccacctgcaatctggtcagggacatcaataaggttggaatcggcctagtagcggccgccagttcacctctcttagtgaaagacgtcatttgcgaggacgataagggcaagattatggaggaggtcatgaggacatatcttaaacagcaggagaagctaaatttaatccttcaaaaaaagcaacaactgcagatggaagtgaagatgctatcctcttccaagagtatgaaggagctcacagaagagcaacagaacttgcagaaggaactggaatcactgcagaacgagcacgctcagcgcatggaggaattttacgtagaacagaaagatttagagaaaaagctggagcagatcatgaagcagaaatgtacctgcgacagcaacctcgaaaaggataaagaagctgagtatgcagggcagctggccgagttaagacagcggctcgaccatgccgaggcagaccgacaggaattgcaggatgagttgaggcaggagagggaggcacgccaaaaactcgagatgatgatcaaggaactcaaactccaaattctcaagagcagtaagactgcgaaagagtag

SEQ ID NO: 13902 - DNA, 1080 bp, synthetic construct
  source 1..1080: mol_type = other DNA; note = Synthetic coding sequence
atgtcctaccgcagggaactcgaaaaatatcgggacttagacgaagatgaaattttgggagctctgacagaagaggagctgcggacactcgagaatgaactcgatgaactcgaccctgataacgctttattacccgcaggtctgaggcagaaggaccagactactaaggcacctacgggcccgttcaagagggaagaattgctcgatcatctggaaaaacaggccaaagaattcaaggacagagaggaccttgtcccctatactggcgaaaagcggggcaaggtgtgggtgccaaagcagaaacctttagatccggtgctcgagtctgtgaccttggaacctgaattagaggaggccctggccaacgcctcagacgctgaactatgcgacatagccgccatattgggcatgcacacactgatgtctaatcagcagtactatcaggcgttaagcagcagctctattatgaataaagagggcctaaactccgtgatcaagcctactcagtacaagcctgttccagacgaagaaccaaactctactgatgtagaagaaacactggagcgtatcaaaaataatgaccctaagttagaagaagttaacctgaataatattaggaacattcccatccctactctgaaagcgtatgctgaggctctgaaggaaaatagctatgtcaagaagttttctatcgtgggcacgaggtctaacgacccagtcgcatacgcactggcggaaatgcttaaggaaaacaaagtgttgaaaaccctgaacgtcgagtccaattttattagtggtgccggcatcctcaggctggtggaagccctgccatacaacacaagtctagttgagatgaagattgacaaccaaagccagcctttaggtaacaaagtggagatggaaatcgtgtccatgcttgaaaaaaatgcgactctcctgaaatttgggtaccacttcacacagcaagggccccggcttagagcctctaatgccatgatgaataataatgatttagtcagaaaaaggagattggccgatctcaccggtcctattatccctaagtgcaggtccggcgtgtag

SEQ ID NO: 13903 - DNA, 1941 bp, synthetic construct
  source 1..1941: mol_type = other DNA; note = Synthetic coding sequence
atggaggagagaggctcgccggacggtgacctggctcgttccctggaacaagggccagaaggccccgagactccaatccaggtggttctgagagtcagacctatgtcggcagcagaattgcgacgaggccagcagtctgtgctacactgttctggaactcggactctgcaggggggccccgaggtagcgtttcgcttcggcgccgttctcgatgcggccagaactcaggaggatgtgttccgtgcctgtggcgtgcgccggctaggggagctggctttgcgcggcttttcatgtacagtgttcacctttggacagaccggttctggcaaaacctatactcttaccggccctcctccccagggtgagggggtgccagtgccccccagcttggccggcatcatgcagcggacgttcgcttggcttctggaccgggtgcagcacctgggtgcccccgtgacgctacgcgcaagttaccttgaaatttataatgaacaggtgagagaccttctgtccttgggcagtccacggcctctgcccgtcaggtggaacaagacccgcggattctatgtggaacagctaagagtggtggaattcgggtcactagaagcactcatggagctgctccaaacgggcctgtccaggcggaggaattcggctcatacattgaaccaggctagttctagaagtcacgctctgcttactctctatatttcgagacagacagctcaacagatgccttctgtggatcctggggaacccccggtcggggggaagctctgttttgttgatctcgccggctcagaaaaagtggcggctaccgggtcccggggggaactgatgctggaggcgaactctatcaatcggtctctactcgccctgggccactgtataagtctgcttctggacccgcagaggaagcagtcccacatcccttttagagactctaaactgaccaaacttctcgccgactcactcggaggacgcggagtcacgctaatggttgcctgcgtaagtcccagcgcccagtgtctgcctgaaacactatcaacactgcgatacgcaagccgggcccagagggtgaccactagaccacaggcccccaagtcaccagtcgccaagcagccccagaggcttgagacagagatgttgcagctgcaggaagagaatcggaggcttcaattccagctcgatcagatggactgcaaggcctccggcctctcaggcgcccgggtggcctgggcccagcggaacctgtatggaatgttgcaggagttcatgttagagaacgagcgactgcgaaaggaaaaatcacagctccaaaacagtcgggatctggctcaaaatgagcaacggatactagctcagcaggtccacgcacttgaaagaaggttattaagtgcttgttatcatcaccagcaggggcccgggcttacccctccatgtccatgtttgatggcacctgccccaccctgtcatgccctgccacctttgtactcctgcccttgttgtcacatttgtccgctttgccgggtgccactagcgcattgggcatgcctaccaggagagcatcacctaccccaggtgctcgacccagaagcatcaggggggagacccccgtcggccaggccgcctccttgggctcccccctgttctcccggcagcgccaagtgcccaagagagcgctctcattctgattggacccagactagggttctcgccgaaatgttaactgaggaggaagtagttccgtccgctcccccactacccgtgagacccccgaaaaccagccccgggctgcggggcggcgcaggagtgcctaacctcgcccaacgcctggaggcattgcgagaccagattgggtcatccctgaggagaggccgctctcagccgccttgtagtgagggtgccagatcacccggccaagtgttgcctcctcactag

SEQ ID NO: 13904 - DNA, 462 bp, synthetic construct
  source 1..462: mol_type = other DNA; note = Synthetic coding sequence
atggcacgaaacaccctgagttcgaggttccggcgcgttgacatcgacgagtttgacgaaaataagtttgtggacgaacaggaggaggccgccgctgcggccgcagaaccagggccagatccatcagaggtcgacggcttgctgcggcagggtgatatgctccgcgcttttcacgccgctcttcgaaacagtccggtgaataccaagaaccaggctgtgaaggagcgggcacagggggtggtgttgaaggtgctgacgaactttaaatcctccgagatcgagcaggccgtacaaagcttggatcggaacggcgtcgacctgctcatgaaatacatttacaaaggcttcgagaagccgactgaaaactcttccgccgtcctgctgcagtggcatgagaaagccctggcagtcgggggcctagggtcaattattcgcgtactcacagctagaaagactgtctag

SEQ ID NO: 13905 - DNA, 3318 bp, synthetic construct
  source 1..3318: mol_type = other DNA; note = Synthetic coding sequence
atggctgcaacggctagcgccggagtacccgccacagtgtccgagaagcaagagttctatcaactgctgaaaaacctgatcaacccaagctgcatggtgaggcgccaggctgaggagatctatgagaatatacccggtctgtgcaagactacttttcttttggatgcagtgcgaaatcgacgggcaggatacgaggtgcggcagatggctgccgctttactccggagactgttgtcttctggtttcgaagaggtatatccgaaccttcctgcagacgtccagcgggacgtaaaaattgaactcattctggcagtgaaactagaaacacacgcctccatgagaaagaaactatgcgacatatttgctgttcttgcaaggaaccttatcgatgaagacgggaccaatcactggcccgaaggtttaaaatttctgatagactcgatctatagcaaaaatgtggtcctgtgggaagtggccctccacgtgttttggcactttccaggtatattcggcacccaagaacggcatgacttggatattatcaagcggctgctggatcagtgtattcaggatcaagagcaccccgccattagaactctgtccgctagagcggctgcagcattcgttctggccaacgagaataacatagcgttatttaaggacttcgcggacctgctgccaggcatccttcaggccgtgaatgactcttgctaccaggatgatgacagcgtgctggaatcactggtcgaaattgctgatacggttcctaagtacctgggaccgtatctggaggacacattgcagctctcactgaagctgtgcggagattcgaggctctcgaacctgcagcgccagctggccctggaggtaattgtgactctgtccgaaaccgccacgccaatgctgaaaaagcacaccaatattatcgcccaggccgtgccgcacatcctggcgatgatggttgacctgcaggacgacgaggactgggtgaacgcggacgagatggaggaggacgatttcgattcaaacgctgtggcagcggaatcagcactcgacagactggcctgtggtttgggaggaaaagttgtgctgccaatgaccaaggagcatattatgcagatgctccagagtccagattggaaatacaggcatgccggcttgatggctttatcagccattggggaaggctgtcatcaacaaatggagtccatcttggacgagacggttaattcagtgctgctcttcctacaggacccccaccccagggtgagagccgcggcgtgtacaaccctgggccagatggccaccgactttgccccaaacttccagaaaaagttccacgagacagtcattgcagcactgctgagaacaatggagaaccaagggaatcagcgggtgcaatcacacgcagcctccgctctcatcatattcatagaggattgtccgaagagcctgctggtcctgtatgtcgactccatggtaaaaaacctccacagcgtgcttgtgatcaaactgcaggaactgatccgcaatggcaccaagcttgccttggagcagctcgtgacgaccatcgcgagcgtggcggatacaatcgaagagaagtttgtaccctactatgacatcttcatgccaagtctgaagcacatcgtcgaattagctgtgcagaaggagctgaaactgctgagggggaagactattgaatgcatctcacacatcggcctggcagttgggaaggagaagttcatgcaagatgcgtcgaacgtgatgcagctgctgttgaaaacccagtcagacctgaataacatggaagacgatgatcctcaaacatcatacatggtcagcgcctgggcacgtatgtgtaagattctgggaaaggacttccaacagtatctgcctctggtcatcgaaccccttattaagactgccagcgccaagccagatgtcgctttgctcgacactcaagacgttgagaacatgtctgatgacgacggatggcagttcgtcaatcttggcgatcagcagtcattcggcatcaagacctctggcttggaagccaaggcgacagcttgccagatgctcgtctactacgcaaaagaactgagggaaggcttcgtggagtacactgaacaagtcgtcaagctcatggtcccactgctaaaattctacttccacgacaacgttcgcgtggccgccgccgaaagcatgccctttcttttagaatgtgcacggatacgagggcctgaatacctagcccagatgtggcaatttatatgcgatccactgataaaagcgatcggcacagagccggacaccgatgtcctgagcgagattatgaattcattcgctaaaagcattgaggttatgggcgacgggtgccttaatgacgagcacctggaggaactgggaggaattctgaaggcaaagttagaaggccacttcaagaaccaggaactaagacaggtcaagcggcaagaggaaaattatgaccagcaagtggagatgtcacttcaggatgaggatgagtgtgacgtttacatcttgactaaagtcagcgacattctgcactcattgttttctacgtacaaagagaagatcctgccttggtttgagcaattactgccgctcattgttaacctgatctgcagctctaggccttggccggacaggcagtggggactttgtatctttgatgatatcattgagcactgtagccctacgagctttaagtacgtggagtacttccggtggcctatgctcctgaacatgagggataacaaccctgaggtgagacaggccgcagcctatggcctgggcgtaatggcccagttcgggggagatgactaccgatccctctgtagtgaggccgttccactgctggttaaagtgatcaagtgtgctaattccaagactaagaagaatgtgatagctactgagaattgtataagcgcaatcggcaaaatactgaagtttaaacctaactgcgtgaacgtggacgaagttctgccccactggctgtcctggctaccgctgcacgaggataaggaggaagctatccaaactctttctttcctatgcgacctcatagagagtaaccaccctgtggtcattgggcctaataactccaaccttccgaagatcatcagcattatcgctgaggggaagatcaacgagaccattaactacgaagacccctgtgcaaagaggctggcgaatgtggttaggcaggtccagacctctgaagacctgtggctcgagtgtgtctcacagctggatgatgagcaacaggaagcgcttcaggaactgctgaacttcgcctag

SEQ ID NO: 13906 - DNA, 1914 bp, synthetic construct
  source 1..1914: mol_type = other DNA; note = Synthetic coding sequence
atggaggttaccggttttggagtcaccaggcctggcaaagtgcctcaggccaggatgtctggactcgtcctgggacagcgggatgagcctgccggacatcgcttgtcccaggaggagatactggggtctactcggttggtgtctcagggcttggaagctctgaggagcgagcatcaggcagtcctccaatccctgagtcagactattgagtgtctgcaacaggggggtcacgaggaaggcttggtgcacgaaaaagcccgccagctgcgcaggagcatggagaacattgaattgggcctgagcgaggcccaggtgatgctcgctctggctagtcacctatctacagtcgagagcgaaaaacaaaagttgcgcgctcaggtgcgacgtctgtgtcaggagaaccagtggctgagagatgagcttgccggaacccagcaaagactgcagagaagcgagcaggctgtggcccagttagaagaggagaaaaagcatctggagttcctcggacagctgaggcagtatgacgaggacggacacacatccgaggagaaggaaggcgatgctacaaaggatagcttggatgatttatttcctaacgaagaggaggaagacccctccaatggtttgagccgcgggcagggtgcaaccgcggcccagcagggcggttatgaaatcccagcaaggctacggactttgcacaatctggtaatccagtacgccgcccaaggccgttacgaggtagcagtgcccctgtgtaagcaggccttagaggacctagagcggactagcggacggggccatccagatgtggctaccatgctcaacatcctcgcgcttgtctacagagatcagaataagtacaaggaggcagcccaccttctcaacgacgcactgagtattcgggaatcaaccctcgggcctgatcatcccgccgtggcagccaccctgaataacttggctgtcctttacggcaaaaggggcaagtacaaagaggccgaacccctgtgtcaacgggctctggagatacgcgagaaagtgttgggtaccaatcatccggatgtggcaaaacagctcaacaatctggcactgctgtgccaaaatcaaggaaaatatgaagcggtcgagaggtactaccagagggccctcgcaatttacgaggggcagctgggacctgacaacccgaacgttgctcggactaaaaacaacttagctagctgctaccttaagcagggtaaatatgccgaggccgagactctctacaaagagatcctgaccagagctcacgtgcaagaatttgggtctgttgatgacgaccataagcctatctggatgcacgcggaagagcgggaggagatgtccaaatcccggcaccacgagggaggaactccctacgcagagtacggtggatggtacaaagcttgcaaggtttcatctccgacggttaacactactcttcgaaatctgggcgcactttatcgcaggcagggaaaactcgaggctgctgagactctggaagagtgtgcccttagatctaggcggcagggaaccgaccccatttcacagaccaaggtcgccgagctgctcggggagtctgacggacgacgtacatctcaagaaggccctggtgactccgtgaagttcgagggcggagaggatgccagtgtagccgtggaatggagcggcgacggcagcgggactctgcagagatctggtagcctggggaaaatccgggatgttctgagaagaagtagcgaacttctagtgcggaaactgcaggggactgaaccccggcctagctcaagtaacatgaagagagccgcctccctcaactacctcaatcagccttcagccgcgcctctccaggtttctaggggactctcagcatcaacaatggacctgtcatctagttcttag

SEQ ID NO: 13907 - DNA, 3966 bp, synthetic construct
  source 1..3966: mol_type = other DNA; note = Synthetic coding sequence
atgcagtgcctggctgccgcacttaaagacgagacgaacatgtccggaggaggagaacaggcagatatcttgccagccaactatgtggtaaaagatcgttggaaggtgcttaaaaagataggtggcgggggcttcggggagatttatgaggccatggacctgcttacccgggagaatgtcgcactgaaggtggagagtgcccaacagcccaaacaggtcctcaagatggaagtggccgtactgaaaaagctgcagggcaaggatcacgtgtgtcggttcatagggtgtgggaggaatgaaaagttcaactacgtagtgatgcagcttcaagggcggaacctggctgaccttagacgaagccagcctagagggactttcaccctatctactacgcttcggcttggaaagcagatattagagagtattgaggccatccactcagtcggttttttgcatcgggatattaaaccctcaaactttgccatgggtcgtttgccttctacctaccgcaagtgttacatgctggactttggcctagctcgccagtataccaacactactggcgatgtgcgacccccaagaaacgtggccggttttagagggacagtacgctatgcctctgtcaatgctcataagaatagggaaatgggcaggcacgacgatttgtggagcctgttttacatgctggttgaattcgctgtgggccagttgccgtggcggaagatcaaggacaaagaacaggtggggatgatcaaggaaaagtacgagcaccggatgcttctgaagcacatgcccagtgaatttcacctgttcctagatcatatcgcttccttggactattttaccaaacctgactaccaactgattatgagcgtctttgagaactctatgaaggagcggggaattgcagaaaatgaagcgttcgactgggagaaggctggcactgatgcgctcctctccacaagcaccagcactcccccccaacaaaacaccaggcagaccgctgccatgtttggagtggtgaacgtcacaccagtccccggggatttgcttcgggagaacaccgaagacgtgctgcagggggagcatctgtccgaccaggagaatgctcctccaattcttcctgggcggccaagcgagggattagggcccagtccccacctagttccccacccgggtggaccagaagctgaggtctgggaggagactgacgttaatcggaacaaattgagaatcaatattggcaaatcgccgtgtgtggaagaagagcagtccaggggaatgggagtgccttccagtccagtccgtgcgccacccgactcacctactaccccagtccgctctctgaggtaccgcagagtcaacagccctgagagcgagagactgtcgaccgctgatggacgggtggaactccctgaacgcagatcccgcatggatctgcctggcagtccctcccgtcaggcatgctcatctcaaccggcccagatgctctcagtcgatacaggccacgctgaccgccaggccagcggcaggatggacgtgtccgcatccgtcgaacaggaagccctgtcaaatgccttcaggagtgtgcctttggccgaagaggaggatttcgactccaaggagtgggtcatcattgataaggagacggaattgaaggatttccccccaggagctgaacccagtactagtggcacaaccgacgaggagcccgaggagctgcgtccactccctgaggaaggcgaggagaggcggcggctcggagccgagcccacagtcaggcccaggggtcgctcaatgcaggccctggcagaggaggacctgcagcacctgcccccccagcccctgccaccacagctgagccagggcgatggtaggtccgaaacctcccagcctcctacacccgggagtccctctcatagtccactgcattccgggcccagacctaggcgacgcgagagtgatccaacgggtccccagcgacaggtgtttagcgtcgcacctccttttgaagtgaacggattgcccagggccgtgcctctgagcttaccttaccaggactttaagagggacctaagcgactaccgcgaaagggcacggcttctgaacagagtgcgacgcgtcgggttcagccatatgctgctcactacaccccaggtgcccctcgccccagtccagcctcaggccaacggcaaagaagaagaggaagaggaggaggaagatgaagaggaagaggaagaagacgaagaggaggaagaagaggaggaagaggaggaagaggaagaggaggaggaggaggaagaagaggaagaggctgccgccgccgtggcgctgggggaagtgttgggcccacggtctggatcatccagcgaaggatctgagcgctccacagaccgaagccaggagggcgcccctagcacgctcttggcagacgaccaaaaggagagccgcggacgggcatctatggcagatggagacctggagcccgaggaaggatctaaaaccctggtgctcgtgtccccaggtgacatgaagaaatccccagttaccgcagagctggcccctgatcctgatttgggcactctcgcggcccttacgccgcagcatgaacgtcctcagcctaccgggagccagctggatgtaagcgagccaggcacactttcgtcagttttaaaatctgaacctaagcctccaggtcctggagcggggctcggggcagggacagttacaacaggagtaggcggggtggcagtgaccagctctccgtttactaaggtggaacggacatttgtccacatcgccgaaaaaactcacctgaacgtcatgagtagtggcggacaggcactcagaagcgaggagttctctgccggtggagagctcgggctagagcttgccagtgatgggggcgctgttgaggaaggagctagggccccgctggagaacggcctcgctctctcaggcttgaatggggccgagatcgaaggctcagctctgtccggtgctccccgggagacccctagtgagatggcaaccaactcactccccaacggcccagctctggctgacggtccagcacccgtgtccccgctggagccttcccccgaaaaggtggcaacaatttcccccaggcggcacgctatgcctggcagcagaccacgcagtagaataccagtgctgctgagcgaagaggataccggcagtgagccatccgggagcttaagcgctaaagagcgatggagtaaacgtgcccggcctcagcaggacctggctcggctggtgatggaaaaacggcaaggtagacttctgctccggctggcatcaggggcctccagcagctcttctgaggagcagagacgtgcatccgaaaccctgtctgggacgggctccgaggaagatacgccggcgtcggagccagctgcagctctccctcgtaaatccgggagagcagcagccacacggagtagaattcctcgtcccatcggcttaagaatgcctatgcctgttgctgcccagcagccagcttctcgctctcacggcgccgcgcccgcattagacacggctattacttctagactgcaactgcagaccccgcccgggtcggcaactgcggccgacttgcgtccaaaacagccaccaggcaggggtctcggacccggacgcgcacaggccggcgctcgtccccctgccccacgaagccccaggctgccggcctccaccagcgccgcaaggaacgcttccgcctcccccaggagccagtcattgtctaggcgtgagagcccctccccttcgcatcaggctagaccaggcgtgccacccccacggggcgtcccaccagccagggcccagcccgacggcaccccaagtccgggcggatccaaaaagggcccccgcggcaaactccaggcccagcgggccactactaagggaagggccggcggcgccgaaggcagagcaggagcccgttag

SEQ ID NO: 13908 - DNA, 1818 bp, synthetic construct
  source 1..1818: mol_type = other DNA; note = Synthetic coding sequence
atgagtcaactgtcctccactttgaagagatatactgagagcgcaagatataccgacgcgcattacgccaaatctggctatggtgcatacaccccatcctcctatggagcgaacttagcagccagcctcctggagaaagaaaaacttggcttcaagccagtccctacttctagcttcctgacacggccacgaacatatggaccttcaagtttgctggattacgatagggggcgtcctctactgagacccgacatcacgggcgggggcaagagggcagaatcccagacgagggggacggagcggcctctggggtcagggctgtctggaggatcagggtttccgtatggggtaaccaataattgtctgtcttacctccctatcaacgcctatgatcaaggtgtaacgctgactcaaaaacttgatagccagtcagatttggctcgcgatttttcttccttaagaaccagtgattcctaccgaattgatccaaggaatctggggcgatcacctatgctcgcccgcacaaggaaggagctctgcacgctgcagggtctgtaccagacagcgtcttgtccagagtatctcgtggactacctggaaaattatggccggaagggcagtgcctctcaggttccctcccaggctccaccttctagggtccccgaaatcatttctccaacgtacaggccaatcggacggtatactctctgggagacaggaaagggccaggcccccgggccctctcgtagttccagccctgggcgcgacgggatgaattcgaaaagcgctcagggactggccggcctgagaaacctaggcaacacttgttttatgaattcaattttgcagtgtttgtctaatactcgggagctgcgggactactgcttgcaacgcctgtacatgcgggatcttcaccacggaagtaatgctcataccgccctggtcgaggaatttgcaaagctgattcagacgatatggacctcctctccgaatgacgtggttagtccctccgaattcaaaacccaaatccaaagatacgccccccggtttgtaggatacaaccagcaggatgcgcaggaatttcttaggttcctccttgatggactgcataacgaggtgaatagggtaactttgagaccaaagtcaaatcctgaaaacctggatcacctgccagacgacgaaaagggtcgccaaatgtggcggaagtatttggaaagggaggactcccggatcggcgatctgttcgtgggccagctgaagtcctctttgacttgtacggactgtgggtattgctcaacagtgtttgatccattctgggacctgagtcttccaatcgctaagcgtggataccccgaagtgactctgatggactgtatgaggttattcaccaaggaagacgtcctcgatggtgacgaaaaaccaacttgctgtcgatgtcgcggcaggaaacggtgtatcaagaagttctccatccaaagatttcccaagattctggtcctgcacctcaagagattctcggaaagccgtatccgcacctcaaaactgaccacctttgttaatttccctctgcgggacctggacctgcgcgagtttgccagcgagaatacaaaccatgcagtgtacaacctttatgcagtgagtaatcactcaggtacaacaatgggaggccactacacagcctattgtcgaagtcccgggacgggtgagtggcatacatttaacgatagctctgtgactccaatgagcagttcacaggtgcgcacatctgacgcatatctgcttttctatgaactcgcctcccccccttctagaatgtag

SEQ ID NO: 13909 - DNA, 1353 bp, synthetic construct
  source 1..1353: mol_type = other DNA; note = Synthetic coding sequence
atggtgccactcgtggccgttgtcagtggccccagagctcagctattcgcgtgcctgttgaggctcggcacccagcaggtcggccctctccagctgcataccggagcaagccatgccgcaagaaaccattacgaggttctggtgctcggtggaggatcaggcggcataaccatggccgcacggatgaaacggaaggtaggagccgaaaatgtggctatcgtggagccaagtgagcggcatttttaccagccaatttggaccctcgtcggggctggagccaaacagctcagctctagtggtcgtccaacagcaagcgtgatacccagcggagtagaatggattaaggctcgagttacagaactgaatccagacaaaaactgtatacatacagacgacgacgagaaaatttcctaccgctatctgataatcgcactgggcatccagctggactacgagaaaattaaaggattacctgaggggttcgcccatcccaaaatcggctccaattactctgttaagactgttgaaaagacatggaaagcattacaggacttcaaagagggtaacgctatattcacctttcccaacactcctgtgaagtgcgcaggagcaccccaaaagatcatgtatctgtccgaagcctacttccggaagactggcaagcgctcaaaggccaatataatctttaacactagtttgggagccatcttcggagtgaaaaagtatgcagatgccctccaggaaattatacaggagaggaatttaaccgtgaattacaaaaagaatctcattgaagtgagggccgacaagcaggaagctgtgtttgaaaatctggataagcccggcgagacccaggtgatttcctatgagatgcttcacgtaacaccccccatgtctcctccagacgtcctaaagacgtccccggttgcagacgctgccggctgggtcgatgtagacaaggagacccttcaacaccgcagataccctaatgtgttcggcatcggcgactgcaccaacttgccaacttcaaaaacagcagccgcagtagctgcccagtcaggcatcctggacagaacaatttccgtaatcatgaaaaatcagacacccactaagaaatacgacgggtacacctcctgtcccctagtcacgggctacaaccgggtaatcctagccgagtttgactataaggcggagccccttgagaccttccctttcgatcaatcaaaggagcgcctgtctatgtacttgatgaaggcggaccttatgccttttctctattggaacatgatgctgcgcggctactggggcggccccgcatttttgagaaagcttttccaccttggtatgtcctag

SEQ ID NO: 13910 - DNA, 5244 bp, synthetic construct
  source 1..5244: mol_type = other DNA; note = Synthetic coding sequence
atggacggtgtcagtagcgaagccaacgaggagaatgacaacatcgaaaggccagttcggagacggcactccagtattctcaagcctccacgctcccctttacaggatttgcggggaggcaacgagcgagtgcaggaatcaaatgccctgcgaaataaaaaaaattcccgacgggtgtcgttcgccgatacaataaaggtctttcaaaccgagagccacatgaaaattgtgaggaagagtgaaatggaggagacagagaccggggagaacttgttgctaatccaaaacaaaaagttggaagataactattgcgagattacaggaatgaatacgctcctttctgctcccattcatactcagatgcagcaaaaggaattcagtattattgaacacacccgcgaacggaagcacgccaacgaccaaacagtgatcttcagtgatgaaaaccagatggatctgacttcctcacatactgtcatgattaccaagggactgctggataatccgatctccgagaaatctaccaagatcgatactaccagctttctggcgaatctcaaattacatacagaggacagtagaatgaaaaaagaggtgaatttctccgtagaccaaaacactagcagcgaaaataagattgattttaatgacttcattaaacgtcttaaaaccggtaagtgtagcgcttttccggacgtgccagacaaggagaatttcgagatcccgatttatagcaaggagcctaattccgcctcatccacccaccaaatgcatgtgtcactgaaagaagacgaaaacaattctaatatcacaagactattccgcgaaaaggatgacgggatgaactttactcaatgccacacagctaacatccaaaccctgatcccaacaagtagcgagactaattctcgcgagtcaaaaggcaatgacatcactatatacggaaacgacttcatggacctgacttttaaccatactctgcagatcctccctgcaactggcaacttttcagagatcgagaaccaaacacagaacgccatggacgtcactacaggctatggtacgaaggcaagcggaaacaaaacagtgttcaaatccaagcaaaacaccgcttttcaggacctctccataaactccgcggacaagatccacatcacaaggagtcacatcatgggggcggaaacgcatatcgtcagccagacctgcaaccaagatgccagaatcctggccatgacccccgagtcaatttattctaaccccagcatacagggctgcaaaacagttttctattcttcctgcaatgacgcgatggaaatgacaaagtgcctcagtaatatgcgtgaggagaaaaatcttcttaaacacgactcaaactacgcgaagatgtactgcaatcctgatgcaatgtcctcacttacagagaaaacgatatattctggggaggagaacatggatattaccaagtcacacacggtggccattgataatcaaatcttcaaacaagatcagagcaacgtacagattgcggccgccccaacccccgagaaagaaatgatgctccagaatttgatgacgaccagcgaggatggcaagatgaatgtcaattgcaacagcgtgccacacgtgtctaaggaaagaatccagcaatcactgagcaatccactgagtatatctctcactgaccgcaaaaccgaactcttgagtggtgagaacatggatctgaccgaaagtcacacttccaatctgggttcacaagttccgctggccgcctataacctggcccctgaatctaccagcgagtcccacagccagagtaaatctagctcggacgaatgcgaagaaataaccaaaagccgcaatgagcctttccagcgctcagatattattgccaaaaactcactgacagacacctggaataaagataaggactgggtcctgaagatcctgccatacctggacaaagacagccctcagtcagctgactgtaaccaggagatcgccacctctcacaatatcgtctactgtggaggagtgcttgacaagcagattacaaatcggaatacagtcagctgggagcaaagcctatttagcactacaaaaccgctattctcatcaggacagttttctatgaaaaaccacgacaccgccattagctcacataccgtgaaatctgtcctgggccaaaatagcaaacttgccgagcccttgcggaagtccctgagtaaccctaccccagactactgtcacgacaaaatgattatctgttcagaagaggaacagaacatggatctgactaaatcccatacggtcgtgatcggattcggaccatctgagcttcaagaacttggtaaaacgaacctcgaacacacgacagggcagctgacaaccatgaataggcagatcgccgtgaaggtcgagaaatgtggtaagagcccaattgagaaatcaggagtattaaagagcaattgtattatggacgtactcgaagatgagtcagtgcagaagcccaagtttccaaaagaaaaacagaatgtaaagatatgggggcgcaagtccgtgggagggcctaagatagataagacaatcgtgttttcagaggacgacaaaaatgacatggatatcaccaagtcttacacaatcgagatcaaccatcgcccgttacttgaaaagagggactgtcaccttgtaccgcttgccggtacgtccgagaccatcctgtatacctgcaggcaggacgatatggagattacccggagccacaccaccgctctcgaatgtaagaccgtaagccctgacgagatcacgaccaggccgatggataagactgtggtgttcgtagacaaccatgttgaactagagatgaccgaatcccatactgtcttcattgactaccaggaaaaagagaggaccgacagacctaactttgaactttcccaaaggaagtcccttgggacacctactgtaatttgcactcctactgaagaatcagtgttctttccaggaaacggcgagtctgatagactagtggccaatgattcccagctcacacccctggaggagtggtccaacaatagaggccccgtggaggtcgccgacaatatggaactgtctaagagtgccacttgcaaaaacataaaagatgttcaatcgccaggatttttaaatgagccgttatccagcaaatcccagcgccgcaagagtctcaaactgaaaaatgataagactatcgtgttttcagagaaccacaaaaacgatatggatatcacccaaagttgcatggtggaaattgacaacgagtctgcgttagaggacaaggaagatttccacctcgctggcgcatcgaagactattctgtattcttgcggacaagatgatatggaaattacgcggtcacacacaacggcacttgaatgtaagaccctgctgccaaatgaaattgcaatacgcccaatggataaaacggtactgtttaccgacaactacagcgatctggaagttactgacagccacactgtcttcatcgattgtcaagccacagaaaaaatacttgaggaaaatcctaagttcgggatcgggaagggaaagaatcttggggtgtcattcccgaaagacaattcctgtgtccaggagatcgctgaaaagcaggcgttagctgtggggaacaaaatagtgcttcacaccgagcagaagcaacagctattcgccgctaccaaccgcaccactaatgaaatcataaagtttcatagcgctgccatggatgagaaagtcatcggcaaagttgtcgaccaggcttgcaccttagagaaagcccaggtggagagctgtcagctcaataaccgggaccggaggaacgtagactttaccagcagccatgctaccgcagtctgcggcagtagcgacaactacagttgtttgcctaatgtgatttcatgtacggataacctggagggtagcgcaatgttgctctgcgacaaggatgaggaaaaagccaattactgccccgtgcaaaacgacctggcttacgccaatgatttcgcgagtgagtattatctggaatccgaggggcagcctctctctgccccgtgcccacttcttgaaaaagaagaagtaattcagacctcaaccaaaggtcagcttgactgcgtgatcaccctgcacaaggatcaggatctaataaaggatcctcgcaatttgctagcgaaccaaacactagtgtattcccaggacttgggggagatgacgaagctcaacagtaaacgcgtgtcatttaagctccccaaagatcagatgaaggtttacgtagacgacatttatgttatccctcaaccgcactttagcaccgatcagcccccgctgcctaaaaaggggcaatccagtattaataaggaagaggtgattctatccaaagcaggaaacaaatcgcttaatattattgaaaattcgagtgctcctatctgtgaaaacaagcccaagatcctcaacagtgaggagtggtttgctgccgcgtgcaagaaggagctgaaagaaaatatccaaactacaaactacaacactgctctggacttccacagcaatagtgatgtcacaaaacaggtcatccagacccacgtcaatgctggggaggccccagatccggtgatcacctctaatgtcccgtgcttccattcgattaagccaaatcttaataatctcaatggcaaaaccggcgaattcctggcttttcagaccgtgcacctgcccccactgcctgagcagcttctggagctcggtaacaaggcccataatgatatgcacattgtgcaggccacagagattcacaatatcaacatcatcagttctaatgctaaggattctcgagatgaggaaaacaaaaaatcccacaatggcgcggaaaccacatccctcccccctaagactgtctttaaggataaagtcaggcggtgcagcctcgggatttttctgccacggctgccaaataagcgtaactgtagcgtcacaggcatcgacgacctcgagcagatcccagctgacaccacagacatcaaccacctagaaacacagcccgtcagcagtaaagactccgggattggctcagtagctggaaagctgaacctctccccttcccaatatatcaatgaggagaatcttcccgtctacccagatgaaatcaatagttcagattctataaatatagaaacggaacctaagaaaaacgtcggcacgcggcgccgccggtactcatag

SEQ ID NO: 13911 - DNA, 2061 bp, synthetic construct
  source 1..2061: mol_type = other DNA; note = Synthetic coding sequence
atgatccccggaaagtatagatccgtatctggccgcgccgcaaacaatgtcaattgtgggttgcatctcgtgattcagacatcgtccctgcctgagaaaaataaggtagagtttaaattgaacaaggatacttcttctttcccaggaagattgctccagcacgatctcgaacgcaactactcatcacgtcagggggaccacatcaacctggtttcgtcatcactcagctctttcccaatcctccagcgcagtagcgaggaaaaaatcctctattctgaccgcctgagcctcgaacggcagaagctgaccgtgtgtcctattattaacggtgaagaccacctcaggttactcaactttcagcacaactttattaccagaattcagaacatatctaacctccagaagctcatctcactggatctgtacgacaaccagattgaagagatttccggcctgtcaacactgcgatgccttcgggttctgttactagggaaaaacagaatcaaaaagatttctaacctggagaacctgaagtctcttgatgtgcttgaccttcacggcaaccagattacaaagatcgagaatatcaatcacctctgtgaactcagggtgctgaatcttgcacgtaacttcctgtctcatgtggataaccttaacggccttgatagtctgacagagctcaacttacgtcataaccagataacattcgttcgggatgtggacaatctaccttgtctgcagcatttgtttttgtcatttaataacattagcagctttgactccgtgtcctgcttggccgactcctcttccttgagcgatattacgtttgacggcaacccaatcgcgcaggagtcatggtacaaacataccgtacttcagaatatgatgcagttgcgccagctcgatatgaaaagaataaccgaggaggagcgcaggatggcttccgtgcttgccaagaaggaggaggaaaagaagagggaaagccacaaacaaagcctgctcaaggaaaagaagaggctgacaatcaataacgtagcaagacagtgggacttacagcagcagcgtgtggctaatatcgctacgaacgaggacaggaaagactcagattccccgcaggatccttgccagatcgatggctccacactatccgcattccctgaggagaccggaccgctcgacagtggtttaaacaatgccctgcagggtctgtccgtaatcgatacctatctggtggaggtcgacggcgacacactctctctgtatggttctggagctctggagtccttggacagaaattggagcgttcaaacggctggtatgatcactacggtgtcatttacctttatcgagttcgatgagattgtgcaagtcttgcctaagctgaaaatcaagtttcccaactccttgcacctcaagtttaaggaaactaacctggtaatgctgcaacaattcaatgccctagcacagttgcgaaggatcgatcagctcacaattgatccacaggggaacccagtggtgaatttcactttgtggaagtactacgttctgttcaggttaagtcacttttctatgcaaaagatcaacgggaccgaggtgacccagaatgatatgatcatggcagagagactgttcggcatcctagctcatgttgcctcgtcagagcttcctcagtatagactgatctccatcctgggtgatgccaggaagaaacagtttcgttacttgctggagtctaagggcaagaagccgggcatcatcaacgaagagaacaacgacagcaagaggctggtcggcgagaataccaaccgggctaccctgaactacaccacaagggatttttataacgaaaaactggaagaaattaaagagaaaaagaagttctgcaagacgtacattgaagatctggtcaaggaagcaaccgagattaatatgaaaaatgaggccctgcagaaactgtggcctcagatgttcattgaactagtgagggacgcagtgatcgaaatcaggaacaaaaacagttatatgaagctgtgcttgcagcagatcaccgaccagaaatag

SEQ ID NO: 13912 - DNA, 255 bp, synthetic construct
  source 1..255: mol_type = other DNA; note = Synthetic coding sequence
atgccatatcttctgatcagtactcagattcgcatggaagtggggcctactatggtaggagatgagcagagcgacccggagctaatgcagcatttgggcgcatccaagaggcgggccctgggcaacaatttctatgagtactacgttgatgacccacctcggatagtgttggacaaactggaacgcagaggattcagggtcctgagcatgacaggagtgggtcagaccttggtctggtgcttgcataaagagtag

SEQ ID NO: 13913 - DNA, 2664 bp, synthetic construct
  source 1..2664: mol_type = other DNA; note = Synthetic coding sequence
atgccgtccctcccgcaggagggggtcattcagggccctagtccacttgatcttaatacggagctgccttaccaatcaacgatgaagcgcaaggttcgcaagaagaaaaagaagggtaccatcacagctaacgtggctggcaccaaattcgaaatcgtgagattggtgattgatgagatgggttttatgaagaccccagatgaggacgagacctctaacctgatttggtgcgattccgcggtacagcaggagaaaatctcagagttacagaactaccagcgcataaaccacttcccaggaatgggggaaatctgtcggaaggactttctggcgagaaatatgacaaaaatgattaagtcccggcctctcgactataccttcgtgcctcgtacttggatctttcctgccgagtatactcagtttcagaattacgtcaaagaattgaaaaaaaaacggaaacaaaagacatttatcgttaagcccgcaaacggagcaatgggccacgggataagccttatcaggaatggagacaaactcccctcccaggaccaccttattgttcaagagtatattgagaagccatttctcatggagggctataagtttgacctgagaatatatatccttgtcacctcctgcgatcctcttaagatttttctctaccacgacggtctggtccgaatggggactgaaaaatacatccctccaaacgagtcaaacctgacacagctctacatgcacttgacaaattactcagtgaacaagcataatgagcattttgagagggatgagaccgaaaacaagggctccaagcgcagtattaaatggttcaccgaattcctgcaggccaaccaacacgatgtagccaaattctggagtgacatttcagaattggtcgttaaaacgctgatagtggccgaaccgcatgtcctgcacgcctatcggatgtgtcggccagggcagccccccggctctgagtccgtgtgttttgaggtgctcggattcgatatcttattggaccgcaagctgaagccctggctcttagaaattaaccgcgcgccaagcttcggcactgaccagaaaatcgattacgatgtgaagagaggggtattgctcaacgcattgaagctgctgaacatcagaacaagtgataaacgtcgcaatctggcaaagcagaaagccgaagcccagcgaaggctttacggtcagaactccatcaagaggcttctacctggcagcagcgactgggagcaacagagacaccagctggagcggcgcaaggaggaattaaaggagcggttggctcaggtgaggaagcagatctcacgagaggagcatgaaaacaggcacatgggaaattacaggcgaatttatccccccgaagacaaggccttgctggagaaatacgaaaacctgctcgccgtcgcttttcaaactttcctgagtggacgcgcagcatcgttccagagggagctgaacaaccctttaaagcggatgaaagaagaggatattcttgacttactagagcagtgtgaaatcgatgacgaaaaacttatggggaagactacaaagacacgaggtccgaaaccactctgcagtatgcctgaaagcactgaaattatgaaaagacctaagtattgttcttccgactcctcatacgattcctcgagtagttcctccgaatcggacgaaaacgagaaagaggagtaccaaaataaaaaaagagaaaagcaggttacttataatttaaaaccgagtaaccactataagctaatccagcagccatcgtccatacgtaggtccgtgagttgcccccggagtatctccgcgcagagcccctcaagtggtgatactcgcccattcagcgcccaacaaatgatttccgtctctcgtcctaccagcgcatccaggtctcactctctcaacagggcttcatcatacatgcggcatctgccgcacagcaacgatgcatgcagcactaactctcaggtctccgaatcgttaagacagctgaaaacaaaagagcaggaggacgatctgacgtcccagactctgttcgtgctcaaggacatgaaaatccgattcccaggtaagtctgatgcagagtccgagttgctgatcgaggatataattgacaactggaaataccacaagaccaaagtggcttcatactggctgatcaaactcgatagcgtgaagcagaggaaagtcttggacattgttaagacttccatccgaactgttttgccgcgaatctggaaagtcccagacgtggaggaggtcaatctgtatagaatcttcaatagggtgtttaaccggctgctgtggtccagggggcagggcttgtggaattgcttctgtgattccggaagttcctgggaatctatttttaacaaaagtcctgaagtagtgacccctctccaactgcagtgttgccaaagattagtggaactttgcaaacagtgcctgttggtggtatataaatacgcaactgataagcgcggttccctgagcggcatcggccctgattggggcaactcccgttacttgctcccaggaagtactcagttcttcctccggactcccacatacaacttgaagtataatagtccgggcatgactaggtctaacgtactgtttaccagtaggtacggccatctgtag

SEQ ID NO: 13914 - DNA, 1140 bp, synthetic construct
  source 1..1140: mol_type = other DNA; note = Synthetic coding sequence
atggcaggccctagggtggaggtggatggttctatcatggaggggggtggacagattctccgggtgtccacagccctctcctgtctgctcggcttaccactcagagtgcagaaaatacgagcgggcaggtctacccccggattgtcgtcaggcggatggaagtccaaaatcaaagtgttgactcgcccgcaacatttaagcgggctagagatgattagagacctgtgcgatggccaactggagggggccgaaatcggctctactgagatcacctttactccagaaaagatcaagggcggaattcacacagctgacacaaaaactgccggaagcgtatgtttgctgatgcaggttagcatgccttgcgtgctcttcgcagcctcaccttcagaattacacctgaaaggcggaactaatgctgaaatggctccccaaatcgattacacagtcatggtgtttaagcctattgtggagaagttcggtttcatttttaactgcgacataaaaactaggggatactaccccaagggggggggcgaggtcattgtgcggatgtcgccagtcaaacagcttaatcccattaacctgacagagcgaggctgcgtgacaaaaatctacggacgggcttttgtcgccggcgtgctgcccttcaaggtggcaaaagatatggctgctgcagccgtgaggtgcatccgcaaagagataagagatttatacgtgaatatccagcccgtccaggaacccaaggaccaagcttttggtaatggtaatggcatcataattattgccgaaaccagcacgggctgcctcttcgccggctctagcctggggaaaaggggcgtcaatgctgacaaggtgggcattgaagcagcagagatgctgctggccaaccttcggcatgggggaactgttgatgaatatttgcaggatcaactcatcgtcttcatggcccttgccaacggagtgagcagaatcaaaactggaccagtgaccttacatactcagacagcaattcatttcgccgagcaaatcgccaaagcaaagttcatagttaagaagtctgaagacgaggaggatgccgcaaaggatacatatatcatcgagtgtcaagggattgggatgactaatcctaacctttag

SEQ ID NO: 13915 - DNA, 1056 bp, synthetic construct
  source 1..1056: mol_type = other DNA; note = Synthetic coding sequence
atgccttccgagacattgtgggaaatcgctaaggctgaagtagaaaaaagaggcatcaacgggagtgagggagatggggccgagatcgccgagaaattcgtcttctttatcggcagtaagaacggcggtaaaaccacaataatcttgcgctgtctggaccgcgatgagccaccgaagccgacactggccctggaatacacatacggacgtagggccaaaggtcataacacccctaaagacatagcccacttctgggagttgggtggagggacttccctactcgatctcatttctattccaataacgggagacacattgagaacttttagccttgtgctggtactagatctatccaaaccaaatgacctgtggccaactatggagaatctcttacaggctacgaagtcccacgtggacaaagtgattatgaagttgggtaagacaaacgccaaggcggtgtccgagatgcggcaaaaaatttggaataacatgccgaaggatcatccagaccacgaactcatagatccatttcccgtgccccttgttatcattggttcaaagtatgacgtgtttcaggattttgagagtgagaagagaaaagtaatctgcaaaacactgagattcgtggcacactattatggcgcaagtttgatgttcacatccaagtcggaagcactcttgctgaaaatccggggtgtgatcaaccagctggctttcggcatcgacaagtcaaaatccatctgtgttgatcaaaacaagcctctgtttatcacagccggactagacagcttcggtcagattggcagcccccctgtacctgagaacgacatagggaagttacacgcccactctcctatggagttgtggaaaaaggtttacgaaaagttatttcctcctaaatctattaacacattgaaggacattaaagatccagccagggatccgcagtatgccgagaatgaggtcgatgagatgaggatacaaaaagatctggaattagagcagtacaaacgcagcagcagcaagtcttggaagcagattgagctggacagttag

SEQ ID NO: 13916 - DNA, 798 bp, synthetic construct
  source 1..798: mol_type = other DNA; note = Synthetic coding sequence
atgtgcacaagcgaaaccttccaagctctggacacatttgaggcgcgacacgacgacatcgtcctcgcctcctaccctaagtgtggatcaaactggattctacatatcgtgtccgagctgatttacgccgtgagtaaaaagaagtacaaatatcccgagttccccgtgctggagtgcggcgactccgaaaaataccaacgcatgaaaggcttcccaagtccccgcattctggcaacacacttgcactacgacaaactgcctggatccatcttcgaaaacaaagccaagatcttggttatatttcgcaacccaaaggacaccgctgtctccttccttcactttcataatgatgtccctgatatcccatcttacggcagctgggatgagttcttcagacagttcatgaaggggcaagtcagctgggggagatacttcgactttgcgatcaactggaacaaacacttagatggcgacaatgtcaaatttatcctgtacgaggacctaaaggagaatctcgctgctggcattaaacagattgccgaatttctcggctttttcctcactggagagcagatccagacaatttctgttcaaagtacttttcaggccatgagggccaagtctcaagatacacatggggctgtaggcccattccttttcaggaagggggaagtcggcgattggaaaaacctgttcagcgagatccaaaaccaggaaatggatgaaaagttcaaggaatgtctggctggaactagtctgggcgccaagctcaagtatgaaagctattgccagggttag

SEQ ID NO: 13917 - DNA, 5343 bp, synthetic construct
  source 1..5343: mol_type = other DNA; note = Synthetic coding sequence
atggaaagtaacttcaaccaagagggggtcccaagaccaagctacgttttcagtgccgacccaatcgcccgcccttcagaaataaatttcgatggcattaaactggacctgtcccacgagttttccctggtggccccaaacaccgaggccaactcttttgagagtaaggactacctgcaagtatgtttgaggatccgtccctttacccaatccgagaaagaattggaatcggagggatgtgttcacatcctcgatagccaaacggtcgttctgaaagagcctcagtgtattctgggtaggctgtctgagaaatctagcggtcagatggcccagaagttctcattttccaaggtcttcgggcccgccactactcaaaaggaatttttccagggctgtatcatgcagccggtcaaggatctgttaaagggccagagtagattaatcttcacatatggcctcactaatagtggaaagacctatacatttcagggcaccgaagaaaatattggcatcctgccaagaactttaaatgtgctgttcgactcattgcaggagagactctatacaaaaatgaacctcaaacctcaccgcagccgggagtacctccgcctttcctctgagcaagaaaaagaagaaatagcctccaaatcggcattgttgagacagatcaaggaggtcactgttcacaatgatagtgatgatacgctgtacggttcactaaccaattctctcaacatcagcgaattcgaagaatccataaaggactacgagcaagccaatttaaacatggccaattccatcaagttctccgtctgggtaagcttttttgaaatctataatgaatacatttacgacctgttcgtccccgtctccagtaaattccagaagcgcaagatgctgcggctgagtcaggacgttaagggctattccttcatcaaagacctacagtggatccaagtctccgatagcaaagaagcctaccggcttctcaaactgggtattaaacaccaaagtgtagccttcaccaagctgaataacgcttcaagccgcagtcatagcattttcacggtgaagatccttcaaatcgaagactcagagatgagcagagttatcagggtgagcgaactgtctttatgtgatctagcgggcagcgaacgtacaatgaaaactcagaacgaaggcgagagactccgggagacaggcaatataaataccagcctcttaacactcggcaaatgcatcaacgtgttgaagaacagcgagaagtctaagtttcaacagcacgtgccattccgcgagtcaaaacttacgcattattttcagagctttttcaacggaaagggcaagatttgcatgattgtaaatattagtcagtgttacctggcttatgacgaaacgttgaatgtgcttaagtttagtgccatcgctcagaaggtctgtgtgcctgacacactgaacagctcccaggaaaaactattcggcccagtgaaatcctctcaggacgtaagtttggactcgaacagcaactcaaagatcttgaacgtgaaacgggccacaatctcctgggagaatagcctggaggatctgatggaggatgaggatttagtcgaggagctcgaaaatgccgaagaaactcagaatgttgagaccaagcttctcgatgaagacttggataaaacgctggaggagaacaaggcttttatctcgcacgaggagaagagaaaattgctggacctcatcgaggatcttaagaagaaactgatcaacgagaagaaagagaagctgactttggaatttaaaattcgcgaagaagtgacacaggagttcacccagtattgggctcagagagaagccgatttcaaagaaacattattgcaggagcgcgagatcttggaagagaacgcggagcgacgcctcgcaatcttcaaggatctggtcgggaagtgcgacacaagagaggaggcagcgaaggacatttgcgccacaaaagtggagactgaggaggctactgcctgcctcgagttgaaatttaaccaaatcaaggccgagctggccaagacaaagggagagctgataaaaacgaaagaggagctgaagaaacgcgaaaacgagagcgattctctgatccaggagctggaaacatcaaataaaaagattattacacaaaatcaacgcatcaaagagttgatcaacataattgatcagaaggaggatactatcaacgaattccaaaacttgaagtcccacatggagaacaccttcaaatgtaatgataaggcagatactagctctctgataataaacaataaactgatctgtaatgaaactgtcgaggtgcccaaagacagcaagtcgaagatctgttccgaacgcaaaagagtcaatgagaatgagctccagcaagatgagccacctgcaaagaagggcagtatccacgtgagcagcgcgattactgaagaccagaaaaaatcagaggaggtccggcctaacattgccgaaatcgaagacatacgcgttttgcaggagaataacgaagggcttcgagcctttcttctaacaattgaaaacgagctgaagaacgaaaaagaggagaaagcagagctgaataaacagattgtgcatttccagcaggagctgtcacttagtgagaagaagaatctgacactctcaaaagaagttcagcaaattcagagcaattacgacatcgccatcgcggagctgcatgtccagaagtctaaaaatcaagaacaggaggagaaaatcatgaaattaagtaacgagatcgagaccgctacccggagtattactaataatgtaagccaaattaagcttatgcataccaaaatcgatgagctaagaacacttgactccgtcagccagatttctaatatagatctgctaaaccttagggacctctctaacggttcagaagaggataatctgccaaacactcagctggatctactggggaacgattacctcgtatccaagcaggttaaggaataccggattcaggagcccaaccgggaaaacagttttcactccagcattgaggctatttgggaagagtgtaaggaaattgtcaaagcatcgagtaagaagtctcaccagattgaagaattggagcagcaaatagaaaagctccaagctgaggtgaagggctacaaagacgagaataatagactaaaggagaaagagcataagaaccaggacgatctcctgaaagagaaggagactttaattcagcaacttaaggaggagcttcaggaaaagaatgttactctggatgtccagatccagcacgtggtggaggggaagcgagctctgagtgaactcactcagggggtgacatgctataaagcaaaaattaaggaattggagacgattctggagacccagaaggtggaatgtagccactcagcgaagttggaacaggacatcctggaaaaggagtcaattatcctcaaactggaacgtaacctgaaagagtttcaagagcacctgcaggatagcgtcaaaaatacgaaggatttaaacgtgaaggaactgaaactcaaagaggaaatcacccagctgaccaataatcttcaggacatgaagcatctcctccagctcaaagaggaggaggaggaaacaaacagacaggagacggagaaattaaaggaggaattaagcgcttcatctgctagaacacagaacctgaaagcggacctgcaacggaaagaagaagactacgccgatttaaaagagaaattaaccgacgctaaaaaacagatcaagcaggtccagaaggaggtgtctgttatgcgggacgaggataagcttctaaggataaagataaacgagctggaaaagaaaaagaaccagtgctcccaggagctcgacatgaagcagaggactattcagcagctcaaagagcagttgaacaaccaaaaagtagaggaggctatccagcaatacgagcgggcttgtaaggacctgaacgtaaaggagaagataatagaggacatgcgcatgactctcgaagaacaggaacagactcaggtagaacaagaccaggtgcttgaagccaaattagaggaagttgaacgactggcaaccgagctggagaaatggaaagagaagtgtaacgatttagaaacaaagaacaatcagcgcagcaataaggagcacgagaataatacggatgttctaggtaagcttaccaacctgcaggatgaactgcaggagtccgagcagaagtacaatgctgacagaaaaaaatggctggaggaaaaaatgatgctcataacccaggccaaggaagcagaaaacataagaaacaaggaaatgaaaaagtacgcggaggaccgcgagaggttcttcaagcaacagaatgagatggagattctcactgcccaactgactgagaaagactcagatctccaaaagtggagagaggagagggaccagctggtggccgcactggaaatccagcttaaggccctcattagttctaatgtccagaaagacaatgagatagagcagctgaagcgcataatttcggaaacatccaaaattgaaacccagattatggacatcaagcctaaaagaatctcaagtgcagacccagataaactgcagacagaaccgctgtccacgagctttgaaattagtaggaataagattgaagacgggagcgtcgtactcgactcctgcgaagtgtccacagaaaacgatcagagcacaagatttccgaaacccgaactggagatccagtttacccctctgcaaccgaataaaatggctgttaagcacccaggatgcactacccctgtaacagttaaaatccccaaggcccgcaaacgcaagtccaacgagatggaggaagacctggtcaaatgcgaaaataaaaaaaatgccacaccccggacaaatctgaagttcccaattagtgatgatcggaatagctcagtcaaaaaggaacagaaggtggcgatccgcccatcttcaaagaagacttatagtctgcgatcccaagcaagcattataggagtgaaccttgcaactaagaagaaggaagggacactgcagaaattcggggacttcctccagcacagcccctccatcttgcagtctaaggccaagaaaatcatagaaaccatgagcagctccaaattgtctaacgttgaagcctccaaggagaacgtatcacaaccaaaacgcgcaaaacgaaagctgtacaccagcgagatctcaagtcccatcgacatatctgggcaagtgattcttatggatcagaagatgaaggagtcagaccatcaaattatcaagcggcgccttagaacaaagaccgcgaagtag

SEQ ID NO: 13918 - DNA, 1371 bp, synthetic construct
  source 1..1371: mol_type = other DNA; note = Synthetic coding sequence
atgaatagctcagatgaagaaaagcagcttcagcttattacgtccctgaaagagcaggccatcggtgagtacgaggacctccgagcagaaaaccagaagacgaaggaaaagtgcgataaaattaggcaggagagggatgaggcggtcaagaaactcgaggaattccagaaaattagtcacatggtcatcgaagaggtgaacttcatgcagaaccacctggagatagaaaaaacttgtcgggaaagtgctgaggccttagccaccaaactgaacaaggagaacaaaaccctgaagagaatcagcatgctctatatggctaagctgggccctgacgttatcactgaggaaattaatattgacgacgaagacagcaccaccgatactgatggcgctgcagagacctgcgtgagcgtccagtgtcaaaagcaaattaaggaactgcgagaccagatagtgtctgtgcaggaagagaaaaagattctcgccatagaactagaaaacctcaagtcaaagttggtcgaggtaatcgaggaggtcaataaagtgaagcaggaaaaaacggtcctgaacagtgaggtgctggaacagagaaaagttttagaaaaatgcaatagagtctccatgctcgccgtggaggaatacgaagaaatgcaggtcaacctcgaactcgaaaaagatctgcgaaagaaagccgaaagctttgctcaagaaatgttcatcgagcagaataaactgaagaggcagtctcatctattgctgcagtcctctatcccggaccagcagctcttgaaagcattagatgagaacgctaagctgactcagcagctggaagaagaaaggatacagcatcagcagaaagtcaaggaactggaggagcagctagagaatgaaacactacacaaagaaattcacaatttaaaacagcaactggagctgctggaagaggacaaaaaggagctagagctgaagtaccaaaattccgaggagaaggcacgcaatttgaagcactctgtcgacgagctgcagaagcgggttaaccaaagcgaaaactcagtgcctcctcccccacccccgccccccccacttccacctcccccacctaaccccattaggtccctaatgagcatgattaggaaaaggagtcacccttcagggtcaggcgcgaagaaggagaaagctacccaacccgagacgaccgaggaagtgaccgacttgaagagacaagccgtggaagagatgatggatcggattaagaaaggggtacatctgaggcccgtaaatcagactgccaggccaaaaaccaagcctgagtctagcaaaggatgtgagtccgctgtagatgagctgaaggggatattagcctcgcagtag

SEQ ID NO: 13919 - DNA, 630 bp, synthetic construct
  source 1..630: mol_type = other DNA; note = Synthetic coding sequence
atgaagaaagttcgactcaaagaacttgaaagcagactccaacaggtcgatggcttcgaaaaacctaagctcctgctcgaacagtatcctaccaggccacatatagccgcttgcatgctgtacaccattcataatacttatgatgatatcgagaataaagtggtggccgatctcggctgtggctgcggagtgctcagtatcggcacagcgatgctcggtgccggcctatgtgtcggattcgacatcgacgaagatgctctagaaatctttaaccgcaatgcggaggagttcgagctgacaaatatcgatatggtacagtgcgacgtgtgtctactgtccaatcggatgtccaaatctttcgacaccgtgattatgaatccaccatttggaacaaaaaacaacaaaggcactgatatggccttcttgaaaaccgcactcgagatggcaagaacagccgtgtattcgctacacaagagctcaactcgggaacatgtacagaaaaaagcagcagagtggaaaattaaaattgatataatcgcggagctacgatacgaccttccagcttcctacaaatttcataagaagaagagcgtggacatcgaggtggatctcatcaggttttccttctag

SEQ ID NO: 13920 - DNA, 4719 bp, synthetic construct
  source 1..4719: mol_type = other DNA; note = Synthetic coding sequence
atggctagctctgctcgagaacaccttttgttcgtgcgccgccgcaatccacagatgcgttatactctctccccagaaaacctccagtccctcgcagcccagtcctctatgcccgaaaatatgacactccaaagggccaatagcgacacagacctggtaacatctgagtctcgcagcagtcttacagcctccatgtacgagtacaccttggggcaggcgcagaatctgattatattttgggacattaaggaagaggtggacccaagcgactggataggactgtaccatattgacgaaaatagccctgccaacttttgggactccaagaaccggggggtaaccggaactcagaagggccaaatcgtatggaggatcgaacccggtccatacttcatggaacccgagataaagatttgttttaaatactaccacggtatatctggggcactgcgagcaacgactccatgtatcactgtgaaaaatcccgcagtgatgatgggggccgaaggcatggagggcggtgccagcggcaatttacactcccgtaagctggtgagtttcacactatccgatcttcgggcggtgggtctgaagaaaggcatgttctttaatccagatccctacctgaagatgtcgattcagcctggcaagaaaagtagcttcccaacctgcgcgcatcacggacaggaacggaggagtacaattatcagtaacacaacaaatcctatttggcaccgagagaaatatagcttcttcgcactgttaacggatgttcttgaaatcgagattaaggacaaatttgcaaagtccagaccaattatcaaacgcttcctgggcaagctgactataccagtccagcgcttgctagaacgccaagccataggcgaccaaatgctgtcgtataatcttgggcggaggctgcccgctgaccacgtcagtggttacttgcagttcaaagtggaagtgacctcgtcagtgcacgaagacgcttctcctgaggccgtgggcaccatcctcggagtaaactctgtgaatggcgacttaggaagcccttctgacgacgaagacatgcccgggtcacatcacgattcacaagtgtgtagcaatggaccagtgagcgaggatagtgccgcagacggaacgccaaagcactcgttcagaacgtcctctaccctggaaatagatacagaggagctgacatctacatcaagcagaaccagcccacccaggggaagacaggacagtcttaacgactatctagacgcaattgagcataatggacactcccggccgggtactgcaacatgcagcgagagatctatgggggccagccccaagctgcggtctagtttccccacagacacacgactgaatgcaatgctccatatcgattcggatgaggaggatcacgagtttcaacaggatctgggatacccctcaagtttggaggaggaaggtggtctcatcatgttctcaagggcctcgcgggcggacgatgggtctctgaccagtcagaccaagcttgaggataatccagttgagaacgaagaagcaagcactcacgaagcggcttcgttcgaagacaaacccgagaatctacctgagcttgcggagagcagcctcccagcaggccctgccccggaggaaggggagggcgggcctgagccgcagccgtccgccgaccaggggtcagccgagctttgcggatctcaagaagtcgatcagccaactagcggtgccgacactggaacctccgatgcaagcggaggttctcgacgggctgtcagcgagaccgaatccctggaccagggaagcgagccttcacaggtgagtagtgaaacagagccatctgatcctgcccggacagagtcagtgagcgaagcttctactcgaccggaaggggaaagcgacttagagtgcgccgattccagttgtaacgagagtgttaccactcagcttagctcagtggatactcgttgttcctccctggagagtgctcgttttccagagacacccgcgtttagctctcaagaggaggaagatggggcctgtgcagcagagccaacaagttcgggtccagctgaagggagccaggaatccgtctgcactgccggaagtctaccagtcgtgcaggtgccttcaggcgaggacgaaggaccgggcgctgagagtgctacagtacccgatcaagaggaacttggtgaagtctggcagcggcgcggaagcctcgaaggagccgccgctgccgctgaaagcccgccacaagaggaaggatctgcgggcgaggcgcaggggacttgtgaaggggccacagcccaggaagaaggtgctacaggagggtcacaggctaatggacatcaacccctgcgttctctgccttcagtaagacaggatgtgtctcgctaccaacgcgtcgatgaagccttgccccccaactgggaggcccgcatcgatagccacggaaggattttctatgttgatcatgtgaacaggactacaacctggcagcgacctactgcccctcctgctccccaggtcctgcaaagaagtaacagtatacagcagatggagcagctgaacaggcgataccaatcaatccggcgcaccatgactaatgaaaggccagaggaaaacactaatgccatagacggggctggggaggaggccgatttccaccaggcctccgccgattttcgacgtgagaatattctcccacatagcaccagtaggtctcggattactctgctgctacagagccctccagtgaagttcctaatatctccagaattttttacggtgctgcactctaatccctctgcttatagaatgttcacaaataacacctgcctgaagcatatgatcacaaaggtgcgcagggatacacaccattttgagaggtaccagcataatcgggatttggtgggttttctgaacatgtttgccaacaaacaactcgagctgccccgaggctgggagatgaagcacgaccaccagggaaaggcattcttcgtggatcacaactcgcgaactactacattcatagatccacgacttccactgcagtcttctcggcctacctccgctctggtacataggcagcatcttacccgtcagaggtcacatagtgcaggagaagtgggcgaagactcacgtcatgctggcccacccgtgctgcctagacctagctctaccttcaatactgtgtcccggccccagtaccaggatatggtcccagtagcatacaatgataagattgtggctttcctgcgacaacctaacatttttgaaatcctccaagaacgccaacccgatctgaccaggaatcatagcctccgcgaaaagatccaattcatacggacggaggggacacccggtctcgtgcgactgagcagtgatgctgatttggtgatgctgctgagtttatttgaagaagagattatgtcctacgtgcctcctcacgccctcctccaccccagctactgccagagtccccgagggagtccagtctctagcccgcagaattcccccggtactcagcgagcgaatgcacgcgcgcccgctccctacaagcgggactttgaagcaaaactccggaatttttaccgcaagcttgagacgaaaggatacgggcaaggcccaggtaagctcaaacttattatccgaagagaccatctgttggaggacgcgttcaatcagatcatgggctattcgaggaaggacctccagagaaataaactttatgtgaccttcgttggagaagagggactggactactccggccctagccgggagtttttctttctggtgagtcgcgagctttttaacccatactacggactgttcgagtactctgccaatgacacatacactgtccaaattagtcccatgtcagcctttgtagataaccaccatgagtggtttagatttagcgggagaatcctcggcctggccctcatacaccaatacctcctggatgccttcttcacacggccattttataaagcgctgcttagaattctgtgcgatctcagcgacctggagtacctggatgaggagttccaccagagccttcaatggatgaaagacaatgacatccacgatatacttgatctgacctttaccgtaaacgaggaggtgtttggccagattaccgaaagagagcttaagcctggaggcgccaatattcctgttacggagaaaaacaagaaagagtatatagagaggatggtaaagtggcggatagagcgaggggtcgtccagcagactgagtccctggtgagaggcttctacgaggtagtggatgcccgccttgtctccgtatttgacgccagggagttagagctggtaatcgctgggactgccgaaattgacttgtctgactggaggaacaataccgagtaccgagggggatatcacgacaaccacatcgttatccggtggttctgggccgctgtggaacgttttaacaacgagcagagactgcggttgctgcagtttgtgaccggcacaagcagtatcccctacgagggcttcgcctctttgagggggtctaacggccctcgtaggttctgtgtggagaagtgggggaaaatcacagccctgccaagggcccacacctgttttaaccggttggacttacctccatacccttccttttcaatgctgtacgagaagctgctgactgctgtggaagaaacatcaaccttcggcctggagtag

SEQ ID NO: 13921 - DNA, 1206 bp, synthetic construct
  source 1..1206: mol_type = other DNA; note = Synthetic coding sequence
atgtcctgtcgctgctggatatctcggcatcctagctacgagggctggaatctccagtctattatctttcacaaacagattagaggagtcgatttggaatcaacttttgtaacaaagttcggcaataactgttccctgcggttaaatgagactgtagacattcacaaggagaaggtggctcgcagagaaatcgggattctgaccaccaacaaaaacacctctcggactcacaaaataatcgcaccggccaatctggaaaggccagtgcgatacatcaggaagccgatcgattatacgattcttgatgatatcggccacggcgtgaaagtgtccacccagaatatgaaaatgggagggctgccaaggacaaccccccccacacagaagccaccttcccctcctatgtctggcaagggcaccctcggccgtcacagtccatataggactctggaaccagtgaggccccccgtcgtgcccaatgattacgtccccagtcccacccgcaatatggccccttctcaacagagccctgtgcggacagcatcagtgaaccagcgaaatagaacgtacagtagcagtgggtccagcgggggaagccatccaagcagccgctcctcttcccgcgaaaatagtggatccgggtcagtgggcgtgccgattgcagttccgaccccgagtccacccagtgtctttcctggacacccagtccagttttattcgatgaaccggccagctagtagacacacccctccaacgataggcggttcccttccataccggcggccaccatctattacctcccaaactagcctgcagaatcagatgaacggaggaccattctactctcagaatcctgttagcgacacgcctccgccccccccacctgtagaggagcctgtgtttgatgagagcccgccccccccccctcctccggaagattatgaggaggaggaggcagccgtggtggagtactccgatccttacgccgaggaggacccaccttgggcgccccgtagctatttagagaaagtggttgcgatttatgactacacaaaggataaggaggacgaattatcattccaagagggagccattatatacgtgattaagaagaatgacgacggttggtacgagggcgtcatgaacggagtcacaggactatttcccggtaactatgttgagagtattatgcactatagcgagtag

SEQ ID NO: 13922 - DNA, 1428 bp, synthetic construct
  source 1..1428: mol_type = other DNA; note = Synthetic coding sequence
atggctgagctacagatgttactggaggaagagattccaggggggagacgggcacttttcgactcctacaccaatctagaaagggtggccgactactgcgagaataattatatacagagcgctgataaacagcgagcgctggaagagactaaggcttacactacacagagcctggccagcgtggcctacctcatcaacacgctggccaacaacgtcttacaaatgctagacatccaggcaagccaattacgacgtatggagagctcgatcaaccatatcagccagactgtcgatattcataaggagaaggtcgccaggcgcgagatcgggatcttaaccactaacaaaaatactagccgtacccacaaaataattgcacccgccaatcttgagcggccagttcgttacattagaaagcctatcgactacactatcctggatgatattgggcacggagtgaaggtgtccacgcagaacatgaaaatgggaggcctgcctcgcaccacccccccaacccagaaacctcccagtccacctatgagcgggaaaggtaccctcggccgccattcaccgtaccgtacactcgagcccgtcagacctcccgtcgtcccgaatgattacgtgcctagtcctacccggaacatggccccctcccaacagagtcccgtgaggactgcttctgtcaatcagcgaaatcggacttatagctcttcgggctccagcggggggagccaccccagctcacggtcaagctccagggaaaacagtggaagcggatccgtgggagtacccattgccgttccaaccccatctccccctagtgtgtttcctggtcaccctgtgcaattttactccatgaacaggcccgcatcccgccacacccccccaacaattgggggctctctgccatatcgaaggcccccctcaataactagtcaaactagcttgcagaaccagatgaacggaggacccttttattcccagaaccctgtatccctggccccaccccctccatccatactccaggttacccctcagctcccactgatggggttcgtggcccgggtgcaggagaatataagcgacaccccaccgccccccccccctgttgaggagccggtgtttgatgaatccccaccaccacccccaccacctgaggattacgaggaggaagaagctgcagtcgtcgaatacagtgatccatatgcagaggaagaccccccctgggcccccagatcttacctggaaaaggtggtggccatctacgattatactaaagacaaagaggatgagttaagcttccaggagggggccataatctacgtgataaagaagaacgatgatggctggtacgagggagtgatgaatggggtgaccgggctttttcccggcaactatgtggagtccatcatgcattactcagagtag

SEQ ID NO: 13923 - DNA, 900 bp, synthetic construct
  source 1..900: mol_type = other DNA; note = Synthetic coding sequence
atgaaaatgggagggctgcccaggacgacacctccgacgcagaagcccccaagcccacccatgtcaggaaagggcaccctcgggagcagtgggtcatcaggcggcagccacccttccagccgctcaagctcaagggagaatagcggaagcggctctgtcggagtgcccattgctgtgccaacacccagtccacccagtgtcttcccagcccccgcagggagcgcggggacacccccactccccgctacaagcgcatctgcaccagccccactggttccggccaccgtgccctccagcaccgcgccagatgccgctgccggaggcgcccagacgctggctgacgggttcacatctcctactcctcccgtggtgtcctcaaccccaccaactgggcacccagtgcaattctattcaatgaatcggcccgcatcgaggcatactccacccacaataggagggtctctgccgtacaggcgacctccttcgataacaagccagacaagtctgcaaaatcagatgaacggcggccctttctactcccagaaccctgtgtccgacactccccccccacctccccctgtggaagaaccagtgttcgatgagagtcctccccctccccccccacctgaggattacgaggaagaagaagctgcagtcgtcgagtattcagatccttatgcggaagaggatcctccatgggccccaaggagttatctggagaaagtggtggccatctatgactataccaaagacaaggaggatgaactgtcattccaggaaggagcaataatttatgtgattaaaaaaaacgacgacggatggtatgagggagtgatgaatggcgtcacaggtctttttcccgggaactacgtagagagtatcatgcactacagtgaatag

SEQ ID NO: 13924 - DNA, 1926 bp, synthetic construct
  source 1..1926: mol_type = other DNA; note = Synthetic coding sequence
atgggtcgaaggtctactagtagtaccaaaagcggaaagtttatgaatcctaccgatcaggctcggaaagaggccaggaaacgggagctgaaaaagaacaagaagcagagaatgatggtccgagccgccgtgctgaagatgaaggatcctaaacagatcattagggatatggagaagctcgacgaaatggagtttaacccagtgcagcagccgcagctcaacgagaaggtgctcaaagacaaacgcaaaaagctccgtgaaaccttcgagcgaattctgcgtttgtatgagaaagagaatcctgacatctataaagaactcagaaagctcgaagttgagtatgaacagaaaagggcacagctgtctcagtacttcgatgcagtgaaaaacgcacagcacgttgaggtggagtccatcccgcttcccgatatgccccatgctccatctaatatcctaattcaagacatcccactccccggtgcgcagcccccctcgatcctaaagaagaccagcgcctatggccctccgactagggccgtttccattctccctttacttggccatggagtgccacgtctccctcccggaaggaagccaccaggcccccctccaggacctccacctccgcaggtggtccaaatgtacgggcggaaggttggctttgcactcgacctacccccccgccgacgcgatgaggacatgctatattctcccgagctggcgcagcggggtcatgatgacgatgtcagtagcacttccgaggacgacgggtacccagaggacatggaccaagacaaacatgacgactccaccgacgacagcgatacagataaaagcgacggagagtcagacggggatgagttcgtgcaccgggacaacggcgagcgggacaataatgaagaaaaaaaatccggcctgtctgtcaggttcgccgacatgccagggaaatcgcggaaaaaaaaaaaaaatatgaaagagctgaccccattgcaggctatgatgttgcgaatggccgggcaggagatccccgaagagggacgggaagtcgaagagttcagcgaagacgacgacgaagatgactctgatgatagcgaagctgaaaagcagtcccagaagcagcataaggaggaaagccacagcgacggtacttccactgcctcttcacagcagcaagctccaccccagtccgtgcctccctcccaaatccaggcacctcccatgcccggccccccaccgctgggcccaccgccggccccacccctgagacccccgggtcctccaacgggcttgccaccagggcctccacccggggctccccccttcctcagaccaccaggaatgcccggcctgcgcggtccactcccccgtctgctgccaccagggcctccacccgggagaccgcctgggcctccacctggcccacctccagggttaccgcccgggccacccccgagaggcccccctccaaggctgccacccccagccccccccgggatcccaccaccacgccctggcatgatgagaccccccctggtgcccccactgggtccagcccctccaggtctctttcctcccgctccacttcccaacccaggagttttgagcgcacccccaaacctaattcagcgaccaaaggctgatgatacttcagccgcaacaattgagaagaaggccactgccaccattagtgctaaacctcagatcaccaaccccaaagcggagataactcgctttgtccctacggctctcagagtgcggagggagaataaaggagccacagccgcgccacagcggaaatcggaagacgactccgctgtacccctagctaaggcagcaccaaagtccggaccctccgtgcctgtctccgtgcagactaaggatgacgtctacgaggccttcatgaaagagatggaggggctgctttag

SEQ ID NO: 13925 - DNA, 4419 bp, synthetic construct
  source 1..4419: mol_type = other DNA; note = Synthetic coding sequence
atgaaaggctcagaagtctctctcgaaaagaaaaagaaaattaagatgcccgtcaaacgtctgcgagaggtggtttcacaaaatcatggcgatcacctagttctgctcaaggatgaactgccgtgtgtgcctcctgctctgagcgcgaataagaggctcccagtcgggactggcacctccctcaacggcacctccagaggctcttctgacctcacctccgcccgcaactgctaccaaccacttctggagaatccgatggtgtccgagtctgatttttccaaggatgtcgccgttcaagtgctaccccttgataaaatagaggaaaataataagcaaaaggccaatgacattttcatctctcagtacaccatggggcagaaagacgcgcttcgcacagtactgaagcagaaggcgcagagtatgcctgtgtttaaagaggtgaaggtgcatctgctggaggatgccggaatcgaaaaagatgcagtgacccaagagacgcgaatctcccctagtgggattgactccgctacaactgtggctgctgccacagccgccgcgatagctaccgcagccccactcatcaaagtgcagagcgatcttgaagctaaagtgaactctgtgacagaactcttgtcgaaactgcaggagaccgataaacaccttcagagggttactgagcaacagacgagcatacagagaaaacaggagaagctacattgtcatgatcacgagaaacagatgaatgtatttatggagcagcacatcaggcacttggagaagcttcagcagcagcagatcgacattcagacccacttcattagtgcagccttaaagacttcctccttccaaccagtgtccatgccttccagcagagctgtggagaagtattccgtgaagcccgagcaccccaatttgggctcttgcaatccaagcctgtataacaccttcgcgtcgaagcaggctccactgaaagaggtcgaagacacctcattcgataaacagaagagccctctcgagactcctgccccaaggcgatttgctccagttcccgtaagtagagacgatgaactgagtaagagggaaaaccttctagaagaaaaggaaaatatggaagtctcgtgccatcggggcaatgttagactactggagcagatcctcaataataacgattctttgaccagaaaatccgaaagtagcaataccacttcacttactcgaagcaagattggctggaccccagagaaaacgaaccggtttccatcatgcgaggaactggagaccacaaaggttaccatgcaaaagtccgatgatgtgctgcatgatctgggccagaaagagaaagaaaccaattctatggtgcagccaaaagaatccctgagtatgttaaagctgcctgacttgccgcagaactccgtgaaattgcaaacaacgaataccacacgcagtgtcctcaaagacgctgagaaaatcctccggggcgtgcagaacaacaaaaaggtcctagaagagaacctcgaagctatcatccgcgccaaagatggagccgctatgtacagccttatcaatgcactgtccacgaatcgggaaatgtccgaaaaaattcggatccgcaaaaccgtcgacgaatggattaagacaataagcgccgaaatacaggggctgcttaaggcaacaactgtgattcaggatgaggattacatgttgcaggtgtacggcaagcccgtttatcagggccacaggagcaccctgaaaaaggggccctatttacgttttaacagcccatccccaaagtcacgtccacaaagaccgaaagttattgagagagtaaaaggtactaaagtgaagtccattaggacccagactgacttttacgccactaagcctaagaagatggactccaagatgaagcattccgttcccgtgttgcctcacggcgaccagcagtacttattcagtcctagccgtgaaatgcctaccttttccggaacactggaagggcacttaatccctatggcaatccttctaggtcagacacagagtaatagcgacaccatgcccccagccggcgtaattgtgtctaaacctcaccccgtaacggtcaccacctccatacctccatctagccggaaggtggaaacgggcgtcaagaaacctaatatcgcaattgtcgaaatgaaatctgagaagaaggacccacctcagctgaccgtccaggttctgcccagtgtggacattgactcaatcagtaactcttcagccgacgtgttgtctcccctgagcagccccaaagaggcttcgctgcctccagttcaaacctggatcaaaacgcctgaaataatgaaggtggacgaggaagaggtaaaatttccaggcacgaacttcgatgaaatcattgacgtgatacaggaggaggaaaagtgtgatgagatccccgactccgagcctattctagaattcaatagaagtgtcaaagcagactcaactaagtataatgggcccccgtttcctcccgtggcctctaccttccagcccaccgctgacattctggacaaggtgatcgagcgcaaggagacgctggaaaacagtctgattcaatgggtggagcaggagattatgtccagaatcatttccgggctattcccggtgcaacagcagatcgccccttcgattagcgtgagcgtctcagagactagtgaaccgctgaccagcgacattgtggaggggacttcctccggggcactccagctgttcgtagacgctggcgtgcccgttaattcaaacgtgattaaacatttcgttaacgaggccctggctgaaacaatcgccgtgatgctcggagacagagaagccaagaaacaagggcctgtggcaacaggagtcagcggagacgctagtacgaacgagacctaccttcctgcaagagtatgtaccccactccctacgccccagcctacacctccctgtagtccatccagccccgcgaaggaatgtgtgctcgttaagacgcccgatagctcaccttgtgattcagaccatgacatggcttttccggtcaaagagatatgtgctgaaaagggggatgatatgcccgctattatgctcgtgaacactccaactgtaacaccaacaacaacacctccacccgccgcggccgtgttcaccccaacactgagcgacatcagcattgacaagctcaaagtgtcaagccctgagctgcccaaaccatggggagatggagacttgcctcttgaggaagagaacccaaatagtccacaggaagaactgcacccccgtgccatcgttatgagtgtggctaaggacgaagaacccgaaagcatggacttccctgcccagcctcctccaccggagcctgtgccgttcatgccattccccgcaggaaccaaggccccatctccgtctcagatgcccggttcggacagctctaccctggagtccaccctatctgtgactgttacagagaccgaaaccttggacaagccgatcagcgagggcgaaattctgttctcctgtggccagaagctggcgccaaaaattctggaagatatagggctgtacctaacaaatctgaatgactcactgagctccaccttgcacgacgccgtggaaatggaggacgaccctccgagcgaaggccaagtgataagaatgtcccacaagaagtttcatgcagacgctatcctttcttttgccaaacagaaccaggaatctgcagtgagtcagcaggctgtttatcatagcgaagatctggaaaactctgtaggcgaactctcagaaggccaacggccacagctgacggccgccgccgagaatatccttatgggtcacagcctgtatatgcaaccccctgttacaaatacacagtcactggatcaacaatgtgaccctaagcccctgtcacggcagtttgacaccgtgtccggaagcatttacgaagattcctgtgcctcccacgggcctatgtctctcggggaacttgaactcgaacctaacagtaagttggtcctgcccacaactctcctgacggcacaagagaatgatgtgaacctccccgtcgcggccgaggatttttcacagtaccagctaaaacagaatcaagacgtgaaacaggtcgagcacaagccctcccagagctatctccgggttcgcaataaatccgacattgctccttcgcagcagcaggtgtctccaggagacatggataggacacagatagagttgaacccttacttaacatgtgtgttttccggaggcaaagcagtgccactgtccgccagccagatgccacctgcaaaaatgtccgtgatgctcccctctgtcaatctggaggactgttcacagagcctctctctgagcaccatgcaggaggacatggagtcaagcggcgccgatacattttag

SEQ ID NO: 13926 - DNA, 1986 bp, synthetic construct
  source 1..1986: mol_type = other DNA; note = Synthetic coding sequence
atggagggggccgccgcccctgtcgctggggatcgtcctgatctgggactcggggcacccggcagccctagggaggcggtagctggcgccaccgcagccctggaacccaggaagccacacggagtgaagaggcatcatcacaagcacaatctcaaacaccgttatgagcttcaggagaccctgggcaagggcacatacggcaaggtaaagcgcgccacagaacgattttccggaagggtggtagcaattaagagtattagaaaagacaagatcaaggacgagcaggacatggtgcatattcgccgcgaaattgaaatcatgagttctctgaatcaccctcacataatatccatctacgaagtgttcgagaataaagataagatagtcatcataatggaatatgccagcaaaggcgaattatacgactacattagtgaaagaagacggttgtctgagcgcgaaaccaggcatttttttaggcagatagtaagcgccgtgcactactgtcacaagaacggcgtggtccacagggacttaaagctggaaaatattcttcttgatgacaactgcaacatcaagatcgctgactttggactatcaaatctgtatcagaaagataagtttctgcagacattctgcggctctcccctttacgcctctccggagattgtcaacggacggccataccggggccctgaagtggactcctgggccctgggagtgctcctgtacactttggtgtacggtactatgcccttcgacggctttgatcacaaaaacctcatccgtcagattagcagcggggaataccgagaacctacccagccgtcagatgctcgtggattaattaggtggatgctgatggttaaccctgacagaagagcgaccattgaggacatcgcgaatcactggtgggtcaactggggctacaagagttctgtctgcgattgcgatgcattacacgattccgaaagccctctacttgcccgtataatcgattggcaccatagatcaaccggactgcaagccgacaccgaggcgaaaatgaagggccttgccaaacctaccactagcgaagtgatgctcgagagacaacgcagcctaaagaaatcgaagaaagagaacgatttcgcccagagcggacaggatgccgttccagagtctccatccaagctttcatccaagaggccaaaaggcatcttaaagaagagatcaaattctgagcaccgttctcattccactggctttatcgaaggcgtggtgggcccagcactcccttctactttcaagatggagcaggatctgtgtagaactggcgtactgctaccgagtagccccgaggctgaagtgcctggcaagttgagtcctaaacaatccgccacaatgcctaagaaaggcattttaaagaagacccagcagcgggagtcaggatactactcttctcctgagagaagtgaatccagtgaactgctggactccaatgacgtcatgggcagtagtatcccttccccctctcctcctgatccagccagggtcacttcacattctctctcctgcaggcgcaagggcatccttaaacattcatccaaatactctgctggaacgatggatcccgccttggtttcacccgaaatgccaactcttgagagccttagcgagccgggcgtgccagcagagggcctttctagaagctattcgaggccgagtagtgtgattagcgatgattctgtcctcagttcagattcttttgacctgttggatcttcaggagaatagaccagcccgccaaaggataagatcatgcgtgtccgcagagaactttctccagattcaggatttcgaaggacttcagaacagaccacgcccacagtaccttaaaagatatcggaataggttggctgattcgtcgttttcactacttactgatatggatgatgtcacccaagtttacaaacaggccctagaaatctgtagcaaactgaactag

SEQ ID NO: 13927 - DNA, 603 bp, synthetic construct
  source 1..603: mol_type = other DNA; note = Synthetic coding sequence
atggcgaacatcgctgtgcagcggatcaaaagagagtttaaggaggtcctaaaatcagaggaaacttctaagaaccagataaaagtcgacctggttgatgaaaattttacggaacttaggggagagatcgcaggcccccctgacaccccatatgagggaggaaggtatcagctggagatcaagatccctgagacctacccttttaatccgcctaaagtgagatttatcaccaagatctggcatcccaatatcagctcagttactggagccatttgccttgacattctcaaagaccagtgggctgccgccatgacactccgcactgtgctgttgtctctgcaagcccttctagctgctgctgagcctgatgacccccaggatgccgtggtggcgaatcagtacaagcagaaccccgaaatgttcaaacaaacagctagattgtgggcgcatgtatacgcgggagcccctgtatccagccctgaatacaccaagaagatcgagaacttgtgcgccatgggtttcgaccggaacgccgtgatcgtagcactctcatccaagtcgtgggatgtggaaaccgccacagagttgctgctcagcaactag

SEQ ID NO: 13928 - DNA, 5313 bp, synthetic construct
  source 1..5313: mol_type = other DNA; note = Synthetic coding sequence
atgccacggcggcgcaagaatttaggtggaaacccatttcgaaagactgcaaatccaaaagaggtcgtggttagcagtgtagcttcacgagaggagcccaccaccactcttccaagcatgggggaaaccaaagttgatcaggaggagctgtttaccagtatctctgaaatatttagcgatctagatcccgacgtcgtgtacctgatgctgagcgagtgtgattttaaggttgaaaatgcaatggactgtctgctggagcttagcgccacagacacaaaaattgaagaaagttctagtcagtctttcgttgccagtgagaatcaggtcggagccgctgaaagcaagataatggagaaacgccctgaggaggaaagtgaggactctaaaatggattcgttccttgacatgcaactgacagaagacctggacagccttattcagaacgctttcgagaaattaaactctagtcctgacgatcaagtgtacagctttttacccagccaggacgttaacagcttcaatgactcttctgagtttataaaccccgactctagtaatatgacgccaatattttccactcaaaatatgaatctgaatggcgagaatctggaaaattctggctctacactgtcactgaatcccctgccaagtcattctgttctgaacgagagcaaatgtttcatcaaagataacaccctggcactggagagtaattacccggaagacagcctacttagctcatctcttaacgtggccagcgattccatcgcaggatgttctagtctgaaccaaaagcagaaagagttattggagtccgagtgcgtggaggcacagttcagcgaagcgcccgtcgacctggacgcatccgagccccaggcttgtctcaacctgccaggattagatctcccaggcactggtggtgatcagaaaagcacccgagtgagcgacgtattcttacctagcgaagggttcaacttcaagcctcataaacacccagaactccctaccaagggtaaagacgtatcttactgccccgttctggcacctctgcctctcttgctgcccccgcctcccccaccgccaatgtggaatcccatgattccggccttcgacctgtttcagggtaaccacggtttcgtggctccagtcgttaccaccgctgcacattggcggtccgtgaactataccttccccccatcagttattagtcatacatctccgaccaaggtctggcgaaacaaagacggaacgtcagcataccaggtccaagaaactccagttagccaagtagttcgcaaaaagacctcctacgtggggctggtcctggtactactccgtggattacccgggagcggaaaaagcttcttggcccgaacactccaggaagataacccgtccggcgtaatcctgtccacggatgattatttctacatcaatggccagtatcagtttgatgtgaaataccttggcgaagcccacgaatggaatcagaacagggcgaaggaagcttttgaaaaaaaaataagccctatcatcatcgacaacactaacttgcaggcttgggagatgaaaccttatgtggccctgagtcagaaacacaagtataaagtcctgtttcgagaaccagacacatggtggaagtttaagcctaaggagctagcccggagaaatatacacggcgtgtctaaggaaaaaattactagaatgcttgaacactatcagcggtttgtgtccgtacccatcatcatgtcttcaagtgttcctgaaaaaattgaacgcattgaactttgcgcctattcgtgtgaagaccggagtacttcccctagggatgacgaggacatcatctctgaaaaagaagagaacattctctctctctcattaaaacatctggagtttactgaggagaagaacttagatgtaaccaaggagactatgctccctgaaaacgtggcctatctgagcaatgccgatcttaataaaagacgcaaagagatttcggatatgaatccttctattcagagtgccctgatcctggagaccccccacatgtacttttccgattctgaaagtaaactgcaagcgaccgacaagtctgagaacgagcagattgagatggtagcagtgaagggatacagcaagacagataccgatagttccatggagcgagtgagtcctagcacatgttgttctgaaaacaatcaggaggattgcgacctggcgaacagcggacctctacagaacgagaaatcaagtcctggtgaaattgtagaagagcgggccacagtaacaaagaaagccttcggcaaacaaaagagcaagtcaactctcgagaaattccccaggcacgaactctccaattttgtgggtgattggcctgtagataagacaattggtcagagaacgaaaagaaaccgtaagacagaaaagacgtcctcagtacagtctgacaaaaagtataactatcctcagagccacaaactggtgaattccgtctccgtcaatacggattgtgttcagcagcgaggcagcccacatgaatccgtcgaggacgggaggaagtctcagtgtgacgacgcttctgaacccttgaacagttataagtacgatgcatacaaaaatattgacaagaactccttcaacattatgggagattggccatcttccgatagtctggcacagcgggagcaccgttcccgaatgccaaaaacgggactgagcgagccgaatcttgaaattggcacgaatgataagatgaacgaaatcagcctgagtaccgcccatgaagcttgctggggcacttcttcgcagaagctgaagacgttaggctcatccaatctagggtcctcagaaatgctgttatccgagatgacctgcgagtcccagacatgtcttagcaaaaaatcacatggccagcacacatccctgccattgacatttaccaatagtgccccaactgtgtccggagtcgtggagccacagaccctggccgagtgccaggaacagatgcccaagcgggatcctggtaaagaggttggcatgtgtacccagacagagcctcaggattttgctctactgtggaaaattgaaaaaaacaagatcagcattagcgacagtattaaggtgctcaccggtcggctggatgggttcaaacctaaagtatttaacattaacactaagtctgacgtccaggaggcaatcccctatcgggttatgtatgacaaaagcacctttgttgaggagtccgagctgacaagtgccgacgaatccgaaaatttgaacattctctgtaagctgttcggcagtttctctttggaagccctgaaggatttatacgagcgctgtaataaggatatcatttgggccacttccctgcttctggatagcgaaacaaaactctgcgaagatactgagttcgaaaacttccagaagtcatgtgacggatcccagattgggcccttctccttgggcctcaatctcaaggaaataattagccagagaggtaccctggaaaatagcaatagtcccgtgccagagttcagtcacggcatcggcatcagcaacgccgattcacagtctacctgcgacgccgaacgaggtaattcggagcaagccgagatgcgcgcagttaccccagaaaaccacgaatctatgacttcgattttcccctcggcagcggtgggcctgaaaaataacaatgatatcctgcccaatagccaagaagagttgctctattcctcaaagcagagctttcccgggatacttaaagccaccacacccaaggacatgtcagaaaccgaaaaaaatctggtggtgaccgaaacaggagataacatccatagtcctagtcactttagcgatatcttcaatttcgtgtcctccacctctaacttagaacttaatgaggagatttactttaccgatagcttggaaattaagcgaaatgaaaactttcctaaagactacgtcaagttcagtgatgaagaggaatttatgaacgaggacgaaaaggagatgaaagagattttgatggctggctcctccctgagcgcaggcgtctcaggcgaggacaaaacagagatactcaatcctaccccagccatggccaagagcctcactatcgactgtctagaactcgcactgcctcctgagctagcctttcaattgaacgagctgtttggacccgttggaattgacagcggctcgctgacggtggaagattgcgttgtgcacatagacttgaacctggcaaaagttattcatgagaaatggaaagaatcagttatggaacgccagagacaggaagaagtgagttgtggaaagttcatgcaggatccatcattggtagggcataccggccttgataaccccgaacagaaaagctcccagaggacaggcaaaaagttactgaaaacattaaccgccagcgagatgttaccgcttcttgaccattggaatactcagaccaagaaagtaagtctgcgagagatcatgtccgaagagatcgcactacaagagaagcacaacctgaaaagggagacacttatgttcgaaaaagactgtgccaccaagctgaaggaaaaacagctttttaagatcttccctgcaatcaaccagaatttcctggtcgacatctttaaagaccataactacagtttggaacatactgtgcagttcttaaattgcgtgctggagggagacccggtgaagactgtggtggcccaggagttcgtacatcagaacgagaacgtaacgtctcataccgggcaaaagtccaaagaaaaaaaaccgaagaagctaaaagaaactgaggaaacgccatcggaattgtcattccaagatttcgagtatccggactacgacgactaccgcgctgaggctttcctgcaccagcagaagcgcatggaatgctatagcaaggctaaggaggcttaccgcattggtaagaaaaatgtcgccaccttttatgcccagcaagggactcttcacgaacagaaaatgaaggaagccaatcacctcgcagccattgaaatctttgaaaaagtgaacgcctccctcctgcctcaaaatgtgctggacttgcatggcctgcacgtggacgaagccctagaacacctaatgcgtgtgctcgaaaagaagaccgaagaattcaagcagaacggagggaagccttacctgagcgtcatcaccggccggggaaatcactcacagggcggcgtggctaggataaagcccgcagttataaaataccttatttctcattcttttcgattctccgaaatcaagcccggatgtcttaaagttatgttaaagtag

SEQ ID NO: 13929 - DNA, 1362 bp, synthetic construct
  source 1..1362: mol_type = other DNA; note = Synthetic coding sequence
atggactggaaggaggtcctgaggcgacggcttgcaaccccaaatacctgccctaacaagaagaagtcagagcaagaactcaaggacgaggagatggatctgtttaccaagtactattccgaatggaaaggagggagaaagaacaccaacgagttttataagaccatccctcgcttctactatagacttcctgccgaagatgaggtgctcctgcagaaacttagagaagagtcacgcgcagtctttcttcaaagaaagtctagggaactccttgacaatgaggagctccaaaatttatggtttcttctggataagcatcagacccctcctatgatcggcgaagaggccatgattaattacgagaacttcctgaaagttggcgagaaagcgggcgcaaaatgtaagcagttcttcaccgctaaagtgtttgcgaaactccttcacaccgatagctacgggcggatttcaattatgcagttttttaactatgtcatgcggaaagtatggctccatcagaccagaatcggccttagcctgtatgacgttgccggacagggatacctccgcgaaagtgatctcgagaactacattcttgagctcattccaaccctgccacagctcgatggactcgaaaagagcttctactcattctacgtttgcacagctgtgcggaagttcttcttcttcctggaccccctgaggaccggaaaaatcaaaattcaagatatcctggcttgttcattcctggatgacctgctagagctgcgcgacgaggagcttagtaaagagagtcaggagaccaattggttttctgcgccctcagctctgcgggtctacggacagtacctcaatctggacaaggaccataacggtatgctctcgaaggaggaattgtcccgatacggcacagcaaccatgactaacgtgttcttggaccgggtcttccaggaatgcctgacttatgatggcgaaatggactataaaacatatttggattttgtactcgccctagaaaatcggaaagaacctgcagcactccagtacatcttcaaactgctggacatagagaacaaggggtacctgaatgtcttctcccttaattacttcttccgggcaattcaagaactcatgaaaatacacgggcaagaccccgtgagcttccaggatgtgaaggatgaaatcttcgacatggtgaagccaaaagaccccctcaaaatttctcttcaagacctcatcaatagcaatcagggcgacaccgtgaccacaatcctgatcgaccttaacggtttctggacatatgagaacagagaggctttggtggccaacgacagcgagaactctgctgatctggatgacacttag

SEQ ID NO: 13930 - DNA, 3348 bp, synthetic construct
  source 1..3348: mol_type = other DNA; note = Synthetic coding sequence
atgcccgaagatcaggtaggaaagctagaagccaccgagaacaccatctcagccatggctgctgctgccgcggagcagcagcagttctatctgctgcttgggaatttgctctcaccagacaacgtcgtgcggaagcaggcggaggagacatatgaaaacatccccggccagagcaagatcacattcctcctgcaggctattcggaacacaaccgccgcagaggaggcccgtcagatggccgcagttttgttacgccgactcttatcaagcgcctttgatgaagtgtatccggccctgccctctgatgtccagacagctataaaatctgagctgctgatgattattcaaatggagactcaatcttcgatgaggaagaaggtctgcgacatcgctgccgagttagcccggaatctgatcgatgaagacggtaacaatcagtggcccgagggactgaaatttctatttgactcagtcagcagtcaaaacgtagggctgcgtgaggctgctctccacatcttctggaattttcccgggatctttggcaaccagcagcagcattatctcgatgtaatcaagagaatgttagttcaatgtatgcaggaccaggagcacccttcaatacgcaccctgagcgcgcgggcgacagcagccttcattttggctaatgagcataacgtggctcttttcaagcatttcgcagaccttctcccaggatttctccaggctgtgaacgactcgtgttaccaaaacgatgatagtgtgcttaagagccttgtcgagattgccgatacagtcccgaagtacctaagaccccatcttgaagcaacactgcagttgtccttgaaactctgcggcgacactagtctcaataacatgcagagacaattggcattagaagtgatagtaaccctgtcagagacggctgccgctatgctgcgcaagcacacgaacatcgtcgcacaaacaatccctcaaatgctggcaatgatggtcgatttggaggaggacgaggactgggccaatgctgatgagctggaggacgacgattttgactctaatgcagttgctggtgaaagcgcattggacaggatggcatgcggcctgggtgggaagctggttctcccaatgattaaggagcatattatgcagatgctgcaaaaccctgactggaagtacaggcatgcaggtctgatggcccttagcgccatcggggagggctgccaccagcagatggagggtattctgaatgagatagtgaatttcgttctgctcttcctccaggacccacaccctcgggtgagatatgccgcctgcaatgccgtcggacaaatggcgacggacttcgcccccggctttcaaaagaaatttcatgagaaggtaatagccgcgcttctccagaccatggaagaccagggaaaccagcgggtgcaggcgcacgccgccgcagctctgatcaactttacagaggactgtcccaagtcacttttaatcccttacctggacaacctggtgaagcacttgcacagtatcatggttctcaagctgcaggagctgatccagaagggaactaagctcgtgctggagcaggtggtcacgtcaattgcctccgtggcagatactgccgaagagaaattcgttccttactacgatctgttcatgccctctcttaaacacattgtggaaaatgccgtccagaaagaattgcgcctcctccgcgggaagacaatcgagtgtatttccctcattgggctcgctgtaggaaaggagaaatttatgcaagatgcatccgatgtgatgcagttgctgctaaaaacgcagacggacttcaacgacatggaagacgacgacccccagattagctacatgatttccgcctgggctcgcatgtgtaagatactcggcaaggaattccagcagtacctgccggtggttatggggccacttatgaaaacagcttccattaagcctgaggtcgctttgctggatacccaggatatggaaaatatgtcggatgacgatggatgggagttcgtgaatctgggggaccagcagagctttggcattaagaccgccggcctcgaggagaagtcgactgcctgtcaaatgctagtctgttatgccaaggagcttaaggaagggtttgtggaatacaccgaacaagtagtcaagttgatggtaccccttctcaagttttactttcatgatggggtcagagtggcagccgccgagagcatgcccctgctgctggaatgcgccagggttagaggtccggaatatctgacacagatgtggcacttcatgtgcgacgccctgattaaagccatagggactgagcctgattccgacgtactctcagagattatgcactcgttcgctaagtgtatagaggtcatgggcgacggatgtctcaacaatgaacacttcgaggagcttggggggatactgaaggctaagctagaagagcatttcaagaatcaagaactacggcaggttaaaaggcaagatgaggactatgacgaacaggttgaggaaagtctccaggatgaggatgacaatgatgtatatatcttgaccaaggtaagtgacatattgcactccatctttagctcttataaggaaaaggttctgccctggtttgagcagttgctcccgctcatagttaacctgatctgtccacaccgaccttggccggataggcaatgggggctttgtatattcgacgatgtgatcgagcactgttctccagcaagctttaagtatgccgagtactttctgcgccccatgcttcaatacgtatgtgacaatagcccagaagtccggcaggccgctgcctatggactcggagtcatggcccagtatggaggggacaactacagaccattttgcacagaagccttacccttattggtgagagtgatccagtccgccgattccaaaaccaaggagaacgtaaatgctactgagaactgcatatctgccgttgggaaaataatgaaatttaagccagattgcgtaaacgtggaggaggtactaccgcactggttgtcttggctccctctgcacgaagacaaagaggaagctgtacaaacttttaattatttatgtgacctaatcgaatcgaatcatcctatagtgctcggccccaacaacacaaatcttcccaaaatcttttctattatagctgagggagagatgcatgaggccattaaacatgaagatccttgtgccaagcgcctcgccaacgtggtacgtcaggtgcaaacatcaggcggcctctggaccgagtgcatcgcccagctgtccccagaacagcaggcagccatacaggagctcctcaactcagcttag

SEQ ID NO: 13931 - DNA, 1929 bp, synthetic construct
  source 1..1929: mol_type = other DNA; note = Synthetic coding sequence
atgaagcggagtagcgtttcctcagggggcgcaggacgcctgagcatgcaagaactgaggagccaggacgtcaataaacaaggtctgtacactcctcagaccaaggagaagcccacatttgggaagctgagtattaacaagcctacgagtgaaaggaaagtctctctcttcggaaaaaggacaagtggccatggttcgcgcaatagccagcttggcatcttctcatcttctgaaaagataaaggatcccaggcccctgaacgacaaggcctttattcagcagtgcataaggcagttatgcgaatttctgactgagaacggctacgcacataacgtctccatgaagtcccttcaagccccatccgttaaagactttttaaaaattttcacatttctctacgggtttctctgcccttcatacgaattgccggacaccaagttcgaggaggaagtgcctcgcatcttcaaagacctgggctatccttttgctctgtctaaaagctccatgtatacagtcggggctcctcacacatggccgcacattgtggcagctttggtgtggttgatcgactgtataaaaattcacactgccatgaaagaaagctcccctctattcgatgatggccagccctggggggaggagacggaggacggcattatgcacaataagctgtttttggactatacaatcaagtgttatgagagctttatgtctggagccgacagcttcgacgaaatgaatgccgagctgcagtccaagttgaaggatttatttaatgtggacgccttcaagctggaatccctggaagccaagaatcgagcactcaacgaacagatcgccaggctggaacaggagagagagaaagagcccaatcggcttgaatcactgcgaaagctaaaggcttccctccagggagacgtgcagaagtatcaagcttacatgtctaatctggagagccacagcgctattctcgatcagaaactcaacgggctgaatgaggaaattgctagagtggaacttgagtgtgagacaattaagcaagagaatacacgcctgcaaaacattatcgataaccagaaatactcagtggccgacatcgagaggatcaaccacgaacgaaacgagctgcagcagactatcaataagctgacaaaagaccttgaagcagagcaacagaaactgtggaacgaagagctgaagtacgcaaggggaaaggaggcgatcgagactcagctagcagagtaccacaaactagccaggaagctgaagctcatccctaaaggggcggagaattccaagggttacgacttcgaaattaagtttaaccctgaggctggcgccaattgcctcgtgaaatatagagctcaggtttatgtaccactgaaggagcttctgaacgaaaccgaggaggaaataaataaagccctcaacaagaagatgggactggaggatacactcgagcagttaaacgctatgatcactgagtccaaacgcagcgtgcggaccctgaaggaggaggttcagaagctggatgacctctatcagcagaaaataaaagaagcagaagaggaagacgagaaatgcgcaagcgagctggagagcctcgagaagcataaacacctgttggagtctacagtgaatcaaggtttatccgaagcaatgaatgagctggacgccgttcagagggaatatcaactcgtggtccaaaccacaactgaggaaaggcgcaaggtgggaaataatctgcagagactattggaaatggtcgcgacccacgtggggtctgttgagaaacatctcgaagagcagatcgcaaaggtggatcgggagtacgaagagtgtatgtctgaggatctgagcgaaaatatcaaggagatcagagacaagtatgaaaagaaggcgactctcatcaaatccagtgaagagtag

SEQ ID NO: 13932 - DNA, 4770 bp, synthetic construct
  source 1..4770: mol_type = other DNA; note = Synthetic coding sequence
atgtcacttccgttttaccaaaggtgccatcagcattacgatctgtcttaccgcaataaggacgtgcgcagcaccgtgagtcactaccagagagagaagaagcggtccgcggtgtatacacaaggaagcactgcatactcatccaggtccagcgccgcacaccgcagagaaagcgaggccttccggcgggcaagcgcatccagttcacagcagcaagctagccagcacgcccttagcagtgaagtctcacggaaggctgcttcagcctatgattatggatcgtcccatggcttaaccgattcttccctcttgttggacgactattctagcaaactgagcccaaaaccaaaaagggccaaacacagcctgctgtctggagaggaaaaagagaacctgccgtccgactacatggtgccgatcttttccggacgtcagaaacacgtgtcaggaatcactgataccgaagaggagcgaatcaaggaggcagctgcctacatagcccagaggaacctgctcgcttctgaggaggggattacaacgtctaaacagtcaacggctagtaaacagaccacagccagcaagcagtcgactgcatccaaacaaagtaccgcgtccaaacagagcaccgcctcacggcagtccaccgcttctcggcagtctgtcgtgtctaagcaggccacctccgccctgcagcaagaggaaacgtccgaaaagaagagtaggaaagttgtgatccgcgagaaggctgagaggctttccctgcgcaaaaccctggaagaaactgagacttaccacgcaaaattaaacgaagaccatctcctccacgcccctgagtttattatcaaaccacgctctcacacagtctgggagaaggagaacgtgaaactccactgttctatcgcagggtggccggaacccagggtgacttggtataaaaaccaggtgcccatcaacgttcacgctaatcccgggaagtacataatcgagagccgctacggaatgcataccttggagattaatggatgtgatttcgaggacaccgcccagtaccgagcttcggctatgaacgtcaagggcgagctgtctgcctacgccagcgttgttgtaaagaggtataagggggagttcgatgaaactcgttttcacgccggcgcttctactatgccgctgagtttcggagtgaccccatatgggtacgcttcccggtttgagatacattttgatgacaaatttgacgtgagcttcgggagggagggtgaaactatgagtcttgggtgccgggtcgtcatcacacctgagatcaagcacttccaacctgaaattcagtggtacagaaatggtgtgcccctctcaccaagtaagtgggtgcaaacgctctggtccggagagcgtgctacactgacctttagccacttaaacaaggaggatgaagggctgtacaccattcgcgtcagaatgggagaatattacgagcagtatagcgcctacgttttcgttcgcgacgctgatgctgagatcgagggcgctccggcagcacccctggatgtcaaatgcctggaggctaacaaagactacatcatcatttcctggaagcagcctgccgttgatggcggatctcctatcttggggtatttcatcgataagtgtgaggtgggcacagacagttggtcccagtgcaatgacacccctgttaagtttgcccggttccccgtcactgggctcatcgagggccgcagctatatatttagagtcagggccgtgaacaaaatgggcattgggtttccatcccgcgtgtcagagcccgtggccgccctggaccctgcagagaaggcaaggctgaagtcccgtccctcggctccctggaccggccagatcattgtgaccgaagaggaaccttccgaaggcattgtcccaggcccacctaccgatctctcggtcacagaggctactcggtcatatgtagtactgagttggaagcccccaggccagagggggcatgaaggcataatgtatttcgtcgaaaagtgcgaagcagggacagaaaattggcaacgcgtcaacaccgagctgccggtgaagtcacctcgattcgctctgtttgacctggccgagggaaagtcttattgtttcagggttcgctgttcaaattctgcgggggtaggagagcctagtgaagcaacagaagttaccgtggtcggagacaaactggacatccccaaggctcctggcaaaatcattccttcaaggaacacagatacgtccgtggtcgtctcatgggaagaaagtaaagatgctaaggagttggttggctattacattgaggcctctgttgcggggtctggaaagtgggaaccgtgtaacaacaatccggtcaaaggttccagattcacctgccacggacttgttactggccagtcctacatttttagggtacgcgcagtgaatgcggccggcctgagcgaatatagccaggactccgaagcaatcgaggttaaagcagcaatcgcacctccctcccccccctgcgacattacatgcctggaatccttccgagactctatggtgttaggctggaagcagccagacaaaattggtggggctgagattaccgggtactacgttaattacagagaagttattgacggcgttccaggtaaatggagggaggcaaatgtcaaagccgtgagtgaggaggcatataagatcagtaacctgaaagaaaatatggtttaccagtttcaggtggcggccatgaatatggcgggtttgggcgcaccatccgccgtgtctgaatgcttcaagtgcgaggagtggacgatcgctgtgcccgggcctccacatagtctcaagtgctcggaagtgcgcaaagatagcctggtgctccagtggaagccccccgtccacagtggacgtaccccggtgaccgggtactttgtggatctgaaagaagccaaggccaaggaagaccagtggagagggctgaacgaggccgccatcaaaaacgtgtaccttaaagtacggggactgaaggagggggtgagctacgtgtttagggtgcgggcgattaatcaggccggtgtcggcaagcccagcgatctcgccggaccagtggtcgcagagactcgccccggcacaaaggaagtcgtggtgaacgtggacgatgacggggtgatcagccttaatttcgagtgcgacaagatgacaccaaagtctgagtttagttggagcaaagattacgtgtccacagaggattctcctcgcttggaggtagaaagtaaaggcaacaagaccaaaatgacgttcaaagacctgggcatggatgacctagggatctactcgtgtgatgttaccgatactgacggcattgcaagctcatatttaatcgatgaagaggagctgaaacgacttctggccctgtcacatgaacacaagtttcctacagttcccgtcaagtctgaactcgcagtggagatactggaaaagggtcaagtgcgcttttggatgcaggcagagaaactgagtggcaacgcaaaagtgaattacatttttaacgagaaggaaattttcgagggtcctaaatacaagatgcatatcgatagaaatacaggaattattgaaatgtttatggagaagctgcaagatgaggacgagggaacctatacattccaactgcaagatgggaaagctacgaaccactcaaccgtggtgcttgtgggcgacgtctttaagaaactgcagaaagaggccgagtttcagcggcaggaatggatcagaaaacaggggccacactttgttgagtacctcagctgggaggttacaggagagtgcaacgtgctcctcaagtgtaaggtcgctaacattaagaaagaaacacatattgtttggtataaggatgaacgcgaaataagcgttgacgagaaacacgactttaaagacggcatctgtaccctgctcataaccgagttttccaaaaaggacgcaggtatatacgaggtgatcctgaaggacgacaggggaaaggacaagtcaagactgaaactagtggacgaggccttcaaggaactgatgatggaggtgtgcaagaaaatagctctatccgctactgatttaaagatccaatctacggccgagggaatccagttatattcattcgttacttattatgtggaagacttgaaggtgaactggtcacataatggttccgccattcgctacagtgaccgtgtgaagacaggtgtcactggagagcagatctggcttcagattaatgagccgaccccaaacgacaaagggaagtatgtgatggaactctttgatggtaagacaggacaccagaagaccgttgatttaagcggtcaggcctatgatgaagcctatgcagagtttcagcgcctgaaacaggccgccatcgcagagaagaacagggcacgggttctgggcggtttacccgacgttgtgacgattcaggagggaaaggccctaaacctcacctgtaacgtttggggggacccaccccccgaggtttcttggctgaagaatgagaaggcactagctagcgacgaccattgtaaccttaaatttgaagcagggcgcaccgcatattttacaattaatggtgtgtccacagcggacagcggcaaatacggattggtcgtgaagaataagtatggctccgagacatcagactttaccgtgagtgttttcattcctgaagaagaagccaggatggccgcattagagtccctgaagggtggcaaaaaggctaagtag

SEQ ID NO: 13933 - DNA, 546 bp, synthetic construct
  source 1..546: mol_type = other DNA; note = Synthetic coding sequence
atgggggggttcttttcaagtattttcagcagcttgtttgggaccagggaaatgagaatcctcattctgggcctggatggcgctgggaagacaacaattctgtaccgcttacaagttggcgaagtggtgacaacgattcctaccatcgggtttaatgtagagacagttacctacaagaatctcaagtttcaagtctgggacctaggcggccagacttctattcgcccatattggcggtgctactacagcaacacagatgcagttatctatgtcgtcgattcttgcgacagggacagaataggaataagcaagagtgagctggtcgccatgttagaagaggaggaattgcgaaaagcgattctcgtggtgtttgctaataaacaggacatggagcaggccatgacatcatccgagatggcaaacagcctgggtctgcctgctctgaaggaccgcaagtggcaaatatttaaaacatctgctaccaaaggaaccggcctcgacgaggccatggagtggcttgtggagactcttaagagcagacagtag

SEQ ID NO: 13934 - DNA, 1269 bp, synthetic construct
  source 1..1269: mol_type = other DNA; note = Synthetic coding sequence
atggccgccgctgccgtggttgagttccaaagagcacagtcactgcttagtactgaccgtgaagcctctatcgacatactgcatagcattgttaaaagagacatccaagaaaacgatgaagaagctgtccaagtgaaggagcagtccattctggaacttgggagcctgctagctaagaccggtcaggcagccgagttgggaggcctgctgaagtatgttcggccctttctgaacagtatttccaaggcgaaagccgccaggctggtgaggagtttgctggatctgtttttggatatggaggcagccacaggacaggaggtcgagctctgcctggaatgtattgagtgggcgaaatcagaaaagcgaactttcctccggcaggcccttgaagcacggctcgtctccctttacttcgacacgaagcgatatcaggaggctttgcatctgggaagccagctactccgggagctcaagaagatggatgataaagctctgctggttgaggtgcagttgctggaatccaaaacctaccacgctctctctaaccttcccaaggctcgtgccgcgctgaccagtgcaagaaccacagcgaatgctatctattgtccccccaagcttcaggcgactttagacatgcagtccggaatcatccacgctgccgaggagaaggactggaaaaccgcctactcatatttttacgaggcctttgaggggtacgactcaatcgacagtcctaaggcaatcacgtctctgaagtatatgctcctatgtaaaatcatgctgaacactccagaagatgtgcaggccctggtctccggaaaactcgcgctccggtacgctggcaggcagactgaagccctaaaatgcgtggcccaggcgtccaagaatcgttccctggccgattttgagaaagcactgaccgactatagggctgagctgcgggatgaccccatcatcagtactcacttggcaaagttatacgacaacctacttgaacaaaacctcatacgggtgatcgagccgttcagcagagttcagattgagcacatatctagccttatcaagctttccaaggctgacgtggagcggaaattatcccagatgatcctggataaaaaatttcatggaatcttagatcagggggaaggagtgctgatcatcttcgacgagccacctgtggataagacttacgaagccgcactggaaaccatacagaatatgtctaaggtcgtcgattcactgtacaacaaggctaaaaagctcacatag

SEQ ID NO: 13935 - DNA, 1449 bp, synthetic construct
  source 1..1449: mol_type = other DNA; note = Synthetic coding sequence
atggcctccctggggcctgcagcagccggtgaacaagccagcggcgcagaggcagagccaggccctgctggcccccctcctccaccctcgcctagcagcctgggtcctctgctgccactacagcgggagcccctgtataactggcaggccacaaaggcctcattgaaagagcgcttcgcatttctttttaacagcgagttgttatcggatgtgaggttcgtcctgggtaagggcagaggggccgccgcggccggagggccgcagaggatcccggcgcaccgattcgtgcttgccgccggatccgccgtgtttgatgctatgtttaacggcggaatggcgaccacctctgccgaaattgagctgcccgatgtggagcccgcagcttttttagccctcctcaggtttttgtactctgacgaggtccagatagggccagaaacggtcatgacaactctctatacagcaaaaaagtatgcagttcccgcattggaagctcactgcgtcgaatttctgacaaagcacctaagggcagacaacgcctttatgctgcttacacaggcccggctgttcgacgaaccgcagcttgcatctctttgtctggacactattgacaagagtacaatggatgccatttcggccgagggcttcaccgacatcgacattgataccctctgtgctgtcctcgagagagataccctctctatcagggagtcaaggctgttcggggctgtggtacggtgggccgaagctgaatgccagaggcagcagctgccagtgaccttcggcaacaagcaaaaagtgctgggcaaggctctgagtcttatccggttcccactaatgaccattgaagagttcgccgccgggccggctcagagcggcatcctatccgatcgcgaagtcgtcaatctgttcttgcacttcaccgtcaaccccaaaccacgagttgaatacattgacagacccagatgctgcctgagaggcaaggagtgttgcatcaaccggtttcagcaggtcgagtcacgttggggctacagtggcacatccgatagaatccgattcacagtgaacaggcgaattagcattgtaggctttggtttgtatggaagtatccacgggccaactgactaccaggtcaatatacaaatcatcgagtacgagaagaagcagaccctgggccagaatgataccggctttagctgcgacggtaccgctaacactttccgtgtgatgttcaaagaacccatcgagattctgcccaacgtgtgctataccgcctgtgccactctgaagggccccgattcacactacggtactaagggcttaaaaaaagtggtacatgagacccccgctgcgtccaagaccgtttttttctttttctcttccccagggaataacaatgggacaagcatcgaggacggccagatcccggagattattttttacacctag
